United States Patent Application Publication US 2007/0054278 A1 - sequence listing, part 103

SEQ ID NO: 97736 - DNA, 63101 bp, Homo sapiens
tactggccatttgtataccttccttggagaaatgtctatccaagtcctttgcttatactttaattggattgtttgcctattcattgttgagttgtagaagttctttatattctgaatttatcagctatatgatttgcaaaaatgttccttcactctgtaggttgtctttcttgataatatcctttgatacacaaaatttcagattttaatgaagattactcccagtggattttgtttctttttgttttttcattgttgttttgcaagagattttgctatcatatctaagagcctattaccaaacccaaaattatgaagatttgcttctatgttttctcctaagaattttatgattttagtttttatatttagttcattgcttgtgagggtttttttaatacggtgtgaagcagggtctaactttactcttgcatgtggaaatacagtccttccatatcatctgttgaagactattcttccctgaattgaatactgcttggcacccttggccatagacatatgagtttattgaggatcccttgtacatgtcttgctgcttttatgattttctctttgtcttatacagacatccctcatttcattgcattttgctttagcgcaattcaaagatattgtgttttttacatattgaaggtctgtggcaactgtgtcaagcaggattttgggaccatttttccaacagcatgtgctcatttcttgtctctgtgttacgttttggtaattctcacaatatttcagacattgtcattattattacatctgttacagtgatccgggatgttactactataattgttttggggtgccacaaactaaacccatatacgttgacaaacttaatggataaatgttgtgtgtgttctgactgctccagtgagcagtcatttcccatctctctccctctcccaaattctttgagacaacacaacaatatttaaattagggtagtgaagaaccaaccctataatgacctttaaatcttcaaataaaaggaagagttgcatgcctgtcactttaaatcaaaagtgaaagacgattaaagttaggaagacatgtcaaaagccaagataagccataagcaagacctcttgcaccaaacaagctgccaagttgtgaatgaaagaaaaagttattgaaggaaattaaaagtgctgctttagtgaacacatgaatgataagtaaaacagccttattgctgacatggggaaaatttaagtggtctgtatagatcaaaccagccacagaactcccttcagccaaagccgaatccagagcaaggccccaactctcttcaatcctatgcaggatgagagaagtgaggaaattgcagaagaaaagttggaagctagcagaggttggttcttggttcatgaggtttaagggaagaagccatctctgtaacataaaagtgcaatgtgaagcaggaagtgctgatggagaagctgcaccaagttatccagaagatctagctaagatcattgatgaaggtggctacactaaacagattttcaatgtagataaaacagccttctattggaagaagatgccacctaggacttccatagctagagaggaaaagtcaatgcctggcttcaaagcttcaaaggataggctgactctgttgttaggggctaatgcagttggtgactttaagttgagaccaatgctcatttaccatactgaaaatcttagggctttaagaattatgctaaacctactctgcctgtgctctcagtggaaccaccaagcctgggtgacagcatgtctctttacagcataggttactgagtattttaagtccactgttgagactcactgttcagaaaaaaagattcctttcaaaatattactgctcattgacaatgcacctgattacccaagagctctgacggagacgtacaaggagatgaatgctgttttcatgcctgctaacacaacgtccattctacagcccatggatcaaggagtaaattcaactttcaagtcttattatttaaaaaatacacttccggccgggcgtggtggctcacgcctgtaattccagcactttgggaggccaaggcgggtggattaaccaaggtagggagttcgagaccagcctggccaacatggggaaaccccgtctctactaaaaatacaaatatcagctgggcgtggttgcgggcgcctgtcatcccagctacttgggaggctgagtaacgagaatcgcttgaacccgggaggcggacgttgcagtgagccgagatcgcaccactgcactcctgcctgggtgacaagagtgtgactccatctcaaaataataataataataataataataataataataataatgataatgataataataaacacaaaataatttttaaaaggctattagctgccagatatagtgattcctctggtggatctgggcaaaataaattgataaattgctagaaaggttctcaccacccttgatgccattaagaacatttgtgatgcgtggaaggaggtcaaaatgtcaacattaacaggagtttggaagaaattaattccaacgctcatggaagactttagggaaggaagtagctgcagatatggtggaaatagaacagaactagaattagaaatggaacctgaagatgtcacagaattgctgcaacctcatgataaaactttcacagatgaggagtcacttcttatggatgagcaaaggaagtggtttctggagatggaatctgcctctggggaagatgctgtaaccactgttgaaatgacaacaggccgggtgtggtggctcacacctgtaatcccagcactttgggaggccgaggccggtggataacctgaggtcaggagttcgagaccagcctggccaacatggtgaaaccctgtctctactaaaaatacaaaaattagccaggtgtggtagcacatgcctgtaatcccagctactcgggaagctgaggcaggagaattgcttgagcctgggagacggaggttgcggtgaactgagattgtgccactgcactccagcctggctgacagagcgagactctgtctcaaaacaaacaaacaaaaaccaaaagatttaggatataacaaagtaagttgataaagcagtggcagggtttgagaagattgacaccaatttgaaataagttctactgtgcataaaatgctatcaaatggcgttacatgctacagagaaatctttcataaaaggaagaatcaattgatgaagccaactgattttaaaaaattgccggccaggcacggtggctcacgcctgtaatcccagcactttgggaggccgaggtgggtggatcacgaggtcaggagatcgagaccatcctggctaacacggtgaaaccccatctctactaaaaatacaaaaaattagctgggcgcagtggtgggcgcctgtagtcccagctactggggaggctgaggcaggagaatggcgtgaatccgggaggcggagcttgcagtgagctgagatagcgccactgcactcaggcctgggcgacagagcgagactctgtctcaaaaaaaaaaaaaagaaattgccacagccactccagccttcagcaaccaccaccttgatcagtcaggttcattaacattgaggcgggccactccaccagcaaaaagattatgactcactgaaggctcagatgactatcatcattttttttagtgataacatgtgttatgattaaggtatctacatttttgagacataacgtgcacttaatacactgcagtatagtatataactattatatgcatagggctgctaaagcgttgcgtgatttgcattattgtggtattcgctttattgtggtggtttggaacctaccccacaatatctctgaggtatgcctgtatattgctggcaggaatgtaaaattgcacagtagctttgcaaaaacaagtttggcagttcttcaaaaagttaaatatagagttataccatatgactcaccaattctacccactggtatatatccatgataagctcaagaaaacatacctctatacatatatttatacatgaatgttgatagcagcattattcataaatatatttatacatgaatgttgatagcagcattattcataatagccaaagatggaaaaaacccaaatgtctgtcaattgaaagggtaaacaaaatagatatatgtatacatattattatattattcagccataaaaagaaatgaagcctgacaaatgctaccttgaaccatcatgaatgaacctttaaaacattatgctaagtaaaagaagcagccacgaaagaccacatattgtatggttcattttgcatgaaatccccgaaataggaaaatccagagacagaaaataaatctgtggttgccagggattgtgggaaggaggaaatggagaataattgctaatgggtatcacagttccttttagggtgatgaaaatcttctggagttagatagtggtgatagttgcacagcttcatcaatatactaagaactactgaattgcatgctttaaaaggatgaacattatggtatgtgaattgtattttactaaaggtgttattttatttatatattatttatttatttatttatttttatttttatttttattttttgagacggagtctcgcctgtcgctcaggatggagtgcagtggtgcaatctcggctcatggcaactttcgcctccaggttcaagcgattctcctgcctcagcctcctgagtagccgggtctacaggcgtgcaccaccacgccgggctaatttttgtatttttagtagagacgaggtttcaccatgttggccaggctagtctggagctcctgacctcgtgatctgcctgcctcggcctcccaaaatgctgggattacaggcgtgagccaccgtacccaaccttaataagaacaagctaggcacctagggtgtcaaattgaaggaggctctgattctcagggccgcgcaaatgcagggttggcacctatgcgtgtggccctcctgaaattttgtgccttaggcacctggcttgcttctccctaattcaggccctcaggagaaagctctaattctggtcaatttgaaacaggagggcacggcttctgggcgacgctccgtgctccagagagagccatttgtctgttcccttcctctggacgtcaccgtgccaacatgaaatgcttccaattgagtccagcctgagatggaagggggtggggggatatctgatgacatcacgaactgctgcatcaactcccccgagtccctgcctctggaccccctgatagaggacacaaggagtgtcctgagcccgtgtgactcagtgtctcttcccatcactttgcgggaaaatggggctgcttacaccacaccgcagcccaaacacctgtggctagagaagggcttgggtactaggagtgaggacgcctggttctgggcccaggactagtactagttagtggtgggacctggaacaaatgctttggttctaagtgaatcccccatattcatgacaagaggcgtggaacacagacccatggggccttcccactggaacagggagcttggctgtcacccgaccttcgcttccttaagtagaaaagcccagggttccaggctccgtctcctttcccgcagacgccttgtttcttcgcgcggaggccctggacgccgcaggctcccaacctacttctctgggctgtcaggttctgaacccggtcctgaagaggccctggcgccgggggtgggtgaggccgagcgcgcgccttgggaacctggccggcctcaggctggcgggagcattggcggacatcgccctgggcggggcggactgggggtagacggatctgcctctgcgcctagccctgccctccgccgccgcgcgaacgcgcgcgcctccccggctagtcccggcaggcggagccccagttagactgctcgtcaagtgtgggaaaagctccgtggcgtcacaagctactatataaaaggcggtgcccgccggggccgagtgggagtccgcggcgagcgcagcagcagggcccggtcctgcgcctcgggrgtcggcgtccaggctcggagcgcgacacggagactaggtggcaggtgaggacgtccccgcgcacggccggggtggagcacgggagtggcgagcttcaggtccaccggctgccaccgaaagatgggacctgaagacaggagaggtcgctcagccaagagccccggggaggcggtggtgtctcggcggggtcagcaacggtctctggggggtcccctgcagcgcgcagccggtttccgcctccgcagctcccagccagcgcggacgccgccctccycggcgcctcctcgctgcccttccctggccgaagccctcccctgcagcctcctccccacctgccggccctgtgttctcactgctcctctctgctctgggatccgcaggatgacgtctgtcctggttcttcttctgtctttcaaagtcactagtctccagttctaaatccgagcactcttacccattctaattctttcagtaactcagcgaaacggatggggcccttccttccccggagcactcctccagggactgagaatctgcagagccaggctcagcgctcgcctgcagagcctgcggtctgtgggacccgccagcaagatgaggaatcactttcgggaggaagggtcgtgctggggagggtcgcgccggcggggtcaagagaacctcctctagggtgggaatcagagcctccgggccgcggtgtttgagggtgagtggaattaatcccgtgatggacatggggccttctaagggggaccaggagtttgcgaagaggtgactttgggaggggttcaggatggccagaggtggaggctgtgacctcagtgaggctggatcaagggaggggcaggtggagaagaaaccgttttaacgaggtggctttaagcggatcctaagggccccaggagatttaggaggaaggacaagaggattaagacaccgctttctggtcgggtgcggtggctcacgcctgtaatcccagcactctgggaggccgaggcgggcggatcacgaggtcaggagatggagaccatcctggctaacactgtgaaaccccgtctctactaaaaaaaagaaaaaaaagaatacaaaaaaatagccgggcgtggtggcgggcgcctgtagtcccagctactcgggaggytgaggcaggagaatggcgcgaacccgggaggcggagcttgcagtgagctgagatcgcgccactgcactccagcactccagcctgggcgacagagccagactccgtctcaaaaaaaaaaaaaaaaaaaaaaaagacacggctttctgaggtgccgtgcggctgtggcgggggtggctgggggtgcgggttgtgttcattgtccaaggctctccagtgctttgcgtggcgttttggggagcacagatgaggtgtcccgacagtggggagtggctctagggagaccagaggctcgggagggggcctgggcattagaccaggcacaggatccaaagtgggaagaaatgtgggcgtagagggcaggccttggagatgggtgtgggggaggagggggagatggaaaggagtcagggaggtctcccaggctcacctggaggagtcagggtctcatttccaagtgcactgggaactgcagcctgggggtgggggttcatttggtttcaggcctgtggccaagagacctaccccctcatattcacactttggcctccacgggcttcagagatagtaccagctctttgttctcgctggttttctttcctcaccttgggctgtttcttgccttttccattctggtgttctgcaaggaccagttccttcatctcatgcacagtctacactcatggcttttgctgggagtaatgagtaaagctcccaaatagatgtttctgagttaaaacactgaacacaaaatgaagcaaaaacaacgcatttccaacctcccaaggtcacatgatgtctagaggacagtgatgggcaataactttttgtcttccccattagaatgcaagctccacgaatggaacgtggagttttttattttttattgttttttgagacggagtctggctctgtcacccaggctggagcaatcttggctcactgcaacctccgccttctgggttcaagcaattctcccgcctcagcctcctgagtagctgggtctacaggcatgcaccaccacgcccagctaatttttgtatttttagtagagacgaggtttcatcatgtttgccaggctggtccggaacccctgagctcaggcaatccgcccgacttggcctcccaaagtgctaggattacaggtgtgagccactacacacggccagaacatagagattttttgtgtttaattcacaaccgagtcttcagtgcctagaacaggtgctcagtaaatatttactgaaggaatgaattcctttttgtatttcttgtatctatcaccagatgctcttgtatctagtacctgcttggcatacagtagatagaaagctttgctgagtgaatagctctgcctttcgtcttttttgatatgtgtacatcttttaaaaaataatgaatagactttgttttagagctgttttgrtttacagcaaaactaagcagaaagaaaatatccccttccacaaacatcctggactgtacagcctcccctaccatcaacatcctgcattactgtggaatatttgtcacacctgataaaccaacatagattcatggttacaaaaatgaaccaatatggataaaacatatacattatcagccaaagtccagagtttgttaggttttgctctttgtgtatattcaagatacatttgacaaatgtatagagatgtacccaacactgtaacgtcagactccactgccctaaaaatcccttgtgcctcacctatccatccctccttccctgcaaatccctggcagccgctgatcttttttactatctccgtagtttttccttttccagaatgtcacatagttggaatcatgcattatgtagtcttctcagattggcttctttcacttagatttatacatttaggattgctccaggatttttttttttttttttttttttttttgtggcttcagagctcatttctttttagcacttaatattccattgtatagatgtaccacagcttatctgtccacccattaagtgatatcttggatgccctcaagttttggcaattatgaataaagctgctatagacattcttgtacaggtgtttgtatgggcataagctttcaactcgtttgggtaaataccaaggtgtggagttgcttcatcttatggtaagaagagcttggttaagaaattgccaaaatgtcttccagactctaacattaggcattcccactaggaatgtatgggagttccttgtgctccagatcctcatcaacatttgttgttgtcagtgttctgaattttagccattctaataaatgtgtaatagtatttgtttttttaaattgcaattctttaatgacatgatgttgagcatcttttcatatgcatatacatatggtgaggtgtatgttcagagcttttgcccgcttttaatcaagttgtacattttcatattgttgcattttaagagggttttttttggtatattttgggtcacagtgctttatcagatatgtcttttgcaaatattttctcccagtctgtggctcgtgttgtgaacgtggctagttctcttgacatacatatcttttcacagtatgtaatcctgttgtgctttttttttttccttttgagacggaatcttgctcttgtcacccaggctggagtgcagtggcgcgatctcggctcactacaatctccacctcccaggttcaagggattctcctgcctcagcctcccgagtagctgggattgctggtgcccgccaccacgcccarttgatttttgtattttttagtagagatggggtttcaccatgttggccaggctggtctcgaactgctgacctcaagtgatccgccygccttggcttcccaaagtgctgggattacaggcgtgaacaaccgcgcccggcctgatgtgcatataattttattatttgatttttaatatacatgaatagcatgcagttccaactttgctcgagacttcacaattaccattttaaagggctgcaaaataatcacatttcctcctcaacagccccactttacagatgaaggtagaggaatgctaacttgcctatgctaacccgcagagctctgaatcctccggatagcgcccccgctgtaatccacccagtgcttccctccagacccttctccctctcgtgcgcgcggaggtttcggtttcctcttttacgtaggccgccccactcgcttgaaaacaaagtccgcgatcctctagcccgcaagagagctccgggactcagaccccgggcgcgaggtcccacgagcggcggggcggcgctctcgcggtcctcctccccggcaagggccggggcagggggaggaggcagcgcgaacagtccacgccctccagccgggcgcgctcgacgcggacggcgggccagctgccggagcgcggcgactccaggggacccacagctggggcgccagagcgcggccatccgggcggggccgacggagcgcggcaggacttggctggacggcgcggccacggagaagggcgcggtgagcggactggcaccgcgcggggaacattccggaggccgccgggctcagtcccggtgacccccctggtcggggttcgcgcgccctcccccagcacgcccgggcaaggctgccgcggcgtcggagtaatccccaaccctccgccgccgcttcttccctcayccgggcctccagacgtttgccgcggaaacgaaagtaacgctcgggtgcttgcgtggaggccggggcggccgcgggcttcccggaaggagagggactctgcccggggtgcgcgcggcgggcgggccccgccggtaccggaagtcgggcggtgggcggggccgcgggcgctcccggaagtcaggggtgctccgctaggtgtctctgcttatccggagtccgctggccgcctctgtgccagaggtcggggcgctggactggtagcgggcggagacctgcctttgggccgcggttaccgcgtgagggtggaataggcagtcccacacgccattaatgttgttttggtggagaaggtgggctcctagtgccctatcattaagaaaaaacagtttgggctcttcccttaccagccctttgaaagggccttttactgttgcgcttgaggccgcagcaggttccaaaaacaaaagcatttctgcgtgatcttagacgactgaggggacgaatgtggtaaccctagcaggcttctgtcactggcaggtgcttttgtgaagtgctgcggaccctcttgagggttgggaagaggataggctgcatcctccttccctaagcatttgacaaagcctcacagggatgcgggggttgcgggggcagggggaggtctggggttgttagttctttctctcttgctgaccatttggctctcccttaatcagagctcttttttattttgggcaaagcaggaggctgttccaatgattaattcttccctgacttacacttgaagaagccaaggcaggaagtgaactttgaaatgtgcaatgtcttagtactcatctgcawtctgtgactgctaggaagatggactgagtcaagaggaaattgtcttgttagaaatgtggaatactgcgtcgggcacggtggctcactcctgtaatccgagcacttcggaggccgaggtgggaggatcacctgaggtcaggagttcgagaccagcctggccaacatggcaaaaccctgtctctactaaaaatacaaaaattagccaggtgtggtggcgggtccctgtaatcccagctacgcgggaggctgaggcaggagaatggcttgaacccaggaggcggtagttgcagtgagccgagattgccacttacactctatcctgggcgacagagggagactctgtatcaaaaaaawaaataaataaagaaatggggaatactgcagctcttctattcacaaaaagtgaagactaggcttgtttaaaatgaaatttggagtgtatcattattactgataaaatagcaaaaatgataacttttaatactcattttcctctgtctgaactatactgagcctcagagatatgttgtactttctggattgtgaatattaatgagtattaagaaaagctcttaaacagcctctttcaaactgggcagcttactttttggtgcttattaatctataacgtgttaacatccatatgatctgggaatttgaagaaaatacttaatttcccatgctttagttggatattacattctggcaaaaaaggttgactgtattaatctgtagaacattgattttgaaccatatatttcaaaaatacatgagccgtgtatttttatttttgagacagagtcttgctctgtcacccaggctggagtgcagtggcgcgatcgcggcttaatgtaaccttcgcctcccgggttcaagcagttctcctgcctcagcctcccaagaagctgggattgtaggcatgcactaccatgcctggctaatttttgtatttttagtagagacagggcttcaccacgttggccaatctggtctcaaactcttggcaatctgccctccttggcctcccaaagtgctgggattacaggcatgagcccctgcacctcaccttcctgtatttaaaaagtttattctgtactttctccgtgtttctgactgtcgcacatttatttaatatagatgagtaaggctgtaagggtgggtctttgcatctggatttttccgaagacagattatttgctatctagagaagtagcatgtattagtgagccaatagtgaaagtttgaatgaagggacaaatatttcattccaggatcctaccactttaggtgaatcacttagctccaaatcttaktttctttatttgcaaattgaaatcatgataaaatttgcttcaggggttatgatgcttgtttaaactctgtttcaattcttgtctcttgctggtccttaagtctcttccttgctcagagcttttgtttatccaggcaaagcatcaggctgctgtaatcaaggaagttggagaaatcctctggtcacttggatagctgagcaaaatcagaattctgttagtgggaagaaagggggcaatggcaggtgggcaaccagcattttctgccattctcttgttatgtgtggtcatcatagaaaaatggggaaaaagttaattagaatattttgatatgtatacttaccctgccttagaaggtaatcgtgaaattccttgagatttcacattaatttcaatagaaamaaattcactgtcctgagtccctgaattaatatttatgcaaaacatytacaaattccttcaaatggacgtaattattagttaaaattatttgctataacaggccagcatgtctttgtcactctgtgtcatggctttgtaataatatggttatgcagtatggccatataagctgcctaaattcactgtttttgtatatccttcaactactcacaaggccttcctaagatattcagtgctcataaagttgaatctttcatgtggaaaaaagaggggtggataggaaaaacaaaagaaatcactgaamaccatgcagaagatgcagaagattaacagactaaactagcaaaccgcaagactgtaaggagaactgacttgggtcaggagctaagcycccaaagtccagtggacccaactagaggccttcccaaactccaccgcacacagcagcacctgcaggtcctagttggtcttgacaaatttgaggagatgtggctgagactgaagaagagataccaaataggactcctcataaagtagaaaccttttactcaaaagggcatttttcagggcatgttgtagttcctgcctgtttctttactgtctgtgaccttttttaaatattattaaacattctttcacaacatcgcttttgcaaactgctagatatatttcagtgttgatgggcataactgattctctcctctgtacatgctaagtgttttacctacttttgctgttctatgtaatgctaccaggaacagctttgcacataatctttatcagcatctctgatttgatccctcagagtaaagaaatactgagtcaaggaattattcctttcaaaaaaataattttaattttacatttaattcatgtctattgtggaaaatttggaaaacatagtaaaagtgtaaagaagaaagtaaaaatcaacctatcatcaagatacaatccttgttaacattttggtgtctttatgtcttttttatctgtacttatatctttatctatttacatatatatatatataaaacacacacaaatgtgaatataatttttacagatttattcgtcaaaaacaattttgaatggctatataatattctgttaggagtgtgccgtaattcatttaacaatatttttatttttatttttttggacaattaaatagttctctttttaaaatagttattcaattgatgatgggccggcatacgttgggttctgctaggctctggagatggtgcacaagacaagtttcctgccttctgtgaacttcatgagaaataattctcaattacagtactgtcttacctatggaagtgtctaatgggaagacttaggatggcttccttgacaaaatgacagttctctgacacctaaccaggcaagaagttggaagaatatggcctaagagggtggggcggatgacccttatggaatggggaaggcttcacagttctgcctgctccagtgatgtgtagtgaatgaaaaaggaggcctaaaatcaatgttatcttttatgccctctgtctccacccgctcctacctcattctcactaggattggtcagtagggccctgctgacagagtgatcccagctgagaatgttggcattctcaaagcccaaggaaacaacacccgtgtggataaacacatgtgggcggctgggccaaccatagctagagacataaagcaggcaacaaacgtgttttcacaaatatatacatatgtacatatatacgcatatacaaatatatacatataygtatatacacatagacaaatatagctatatatctacatatacaatatatgcatacacacatacaaatatgtgtatatatacacacatatacatttttatatcatatattatatattacatatatacatatacaaatatatgtatatttatacgtatacatacatgaacgtatactttttttttctcataatccttaccacttctgtgaggtggtcattattgtttcactttgcagatgaggaaactgaggcataagtaagtgccccaaggtcacaggttggtgagtcacagagctagagttcacgctcatagtggagggcccgtgctctcggagctatggctcctggtctcttacctcacgcgtgtgcctcaccccacccctcagtcttcaggccttcatctaggcagccccccrcctccacccactgcccacgtcccaccgatgtagttgtttcctgaggcacttctcttgtttggtaatgtcttatgtcctaggaaagaaggcccataggtgctgctgtatgagcttcctccrctagacagagctggccccagcctttagatgaggtgtagaaggctggttacccgggtcacctgtagccggccactgtgcaacaccatgggcagcctaggagtttccagartcccctctccccaaggtatttcttttttcattttttaactccctgccctccaacattttattatgaaaaacaccaagtctgaaggttacgtccaccacgactatcgtcttaacaccgcttgcttcatcgtgtaattctccatctcctttcccgtcatctgtccgtcattgtctgactttttgatgtatttccaagtacacatcagtacacatctcgaaatacttcagcatgcataccatagctagagttcaatatgtttacaggtttgtcttttgatgtaaaatttacctgctgttgttgggagtacatctgctgagtatgggcagatgcgtatgcctgcaaccctagcccccgttgatatcctacaacattatcatcaccccagaaagttccttcatgcccctgcccactcagcctcaccgtgctcacaggcggccagtgttctttttctgacacagattggttttgacttctgaaccgtcatataaatagaattacatagtatgtatgcttttgtataaggcgactttcacttatcacgtttttgcatttcgttcatgcggttttcattcatgtgtatcagtagttcatttttattgctgagtagtatcccatcgtgttcatacaccagtgtgttcactcattctcttactgatgggcagctgtttccagtttggagctattataaataaagttgctatgaacattttacaagtgttttccaacatacgttttcatttctcttgggattggaattgctgggtcatagtgcaggtgtttgtggttttataaacaaaataaatgcctatgaaatttcaatgaatattttatgccccagaaagagtatttttcatggtctgtatctggatgtagatatttattattttattttattttaatttttttgagacagagtctyactttgttgcccaagctggagtgcagtggcatgcgatctcggctcactgcaacctccgcctcccaaatttaagcaattctcctgcctcagcctcctgagtagctgggattagaggcgcgtgccaccacgcctggctgatttttgtatttttagtagagacggggtttcaccatgttggccaggctggtcttgaactcctgacctcgtgatccgcccgcctcagcctcccaaagtgctgggattacagacgtgagccacggcgcccagccgggatgtgggtatttctggaatacaaaacatccatagccctccttttactctcaaagcaaaacacagacacgcacattcacatgcacacaccagtgtgtccgtgtcctgttggtttgcatggagtttctgttttgccacgaagctttttgccagcccttttcccaaagtgtttgtaccattttatactcccaccagtgatgtttgagaggtctggttgcttcacatgtttgccagtgtttggtgtattagtctttttagttttggatatcctggtagttgtgtagtggtgtctccttgtggttctccatgggtttttattctatatttcagtttggggaraatgaatgaatggaagaaaagaagggaggaaggatgaagcaaatagctgtgctttgagatctgacactgtatacttcacagccctgatggacattctccaaattctactcctttttcacattttcttcttagagtttgcattgttctttttatattcttcagattccttcttttgttcataattacttaaacctattcattttctaatgcctttcagttgttaatttactgaagttctttggtgcttactagtgctgcttgctgtagctgcagggtctgtctcacagtgaattttttcttttgtgttttataattttggaaagggagctcatgttaaatttgtatttgtaggaattctgtctggcctggcttgaggttgttgtttgctttagcctataacctcaggatggcatcagcctgtgaccacttcctgtgtaaaagttcatagtttaggcgatcctctcaattcaaagtctgtatctatttcaagacaggcccaaggttataaatttgcacaaactttttttttttttttaataccttgtgcccagtccaagacaaatatgtttgtttgccatgggctgctttttttctagttcatcctttcatcaaagggttgcacattgagcagtgccgtgttaaggggggattcttcattctaccttcttttcttgtattccttgacctcagctgggctttaaaccttgacttctggatggcgaggttggcactcccctgtgtgagctactgcctgcctccggtgctctgtttctgtccctaaagttcttttcctttccacggagttttggtatgcatttcaatgaatgtttgtattatgttgtccaacatacttgtgtcctttatagctggagggttcttaaaattttctaatgctccatattgccagaaataaaaaggctgagggaataaatattatagtcttctctgattcttaaaaatatgaaaaatagctcatcagatgactgtaagtctatcctcagaaatccaaggcacaccaagcatgtggtggaatgttaacaaaagtttttaaaaatgatcttttctgccaggtacaatggctcacacctgtaatctcagcactttgggaggctgaggtgggaggatcccttgatcttaggagtttgagaccagcctgggcaacatagtgagatcccccggcccccccatctctacaaataattaaaaaatcagctggtcacggtggggtgcacctgtggtcccagctactcaaggaggctgagggaggaggattgcctgagcccaggaggtcgaggctccagtgagctatgattgtgccactgcactccagcctgactgacaaagtgagaccctgtctccaaaggagaaaaaaaaatacatayatatatatatatatatatatatatatagtcttgccctgaggttttctctctgttttctttacagggtacagctctgccggggggggaaaaagtggtaccattttgggcgttcttgagcttcagaatgcaaccagacatgtccttgaatgtcattaagatgaaatccagtgacttcctggagagtgcagaactggacagcggaggcttygggaaggtgtctctgtgtttccacagaacccagggactcatgatcatgaaaacagtgtacaaggggcccaactgcattgagtgagtagggagcaggggtgggtgggctaagttctgagcgggatggggacgttggctgttgtggagccgttggctgctgcggagccgttggtgggtagagtgagagggagcctgccaagatgtcagggtgacgatggctcttcggattgttattgtcgctgatgtggactctgagactgggtagtgaaggactctcacagctggtaagtaacagaagagacatgaacaagaaggaaatagagaaagacaaagagataagtgtggtggggggacaatgaaaaggaaacaggaggatgggtgaagacagacctattcactcgcttcacattttcagtgaggaccagccctaagtataaaaatgaaaaggcagttcattcctgagaggttctgagagccttccctttaaagcaaccagtagagtggtttcacctctctccctcctttgtcagagtggttttgagagaggctgttttttttttttttaatcgttctgtccagcacggtcttttttcaggttaccttgctgctgttcatgtacttttcattcattgattcattcattccttcattgatttacatttttggagcatgcactgccagttactgggcaggagtactgtgaggaagtgagaaaccgctctgccttctaacgcttctggcctgtgcctggaagagatcggtacagacccaagcatgaccccagcacgtgggagtgatgtgttggaggtgtgcaccaggctcttgaggcgctggctctgccagcctcagcatagcacctttcctgcccacaggcacaacgaggccctcttggaggaggcgaagatgatgaacagactgagacacagccgggtggtgaagctcctgggcgtcatcatagaggaagggaagtactccctggtgatggagtacatggagaagggcaacctgatgcacgtgctgaaagccgaggtagagagggcccctccgcacrgggatccccagcgcttgggccctggctgtctgttatggctccccttggggtgtttgtttgcagctcgttagcatmaaatttgcaaattgcttggtagtttgaattttcttttcctttttttatagagacaaggtcttgctatgttgcccaggctgaactccaacacctggtctcaagtgatcctcccacctcagcctctcaagtagctgggattacaggctggatttcctgaagtcagtttctccttaaaacatctatgccttgattgggctccgtgggtcacttctgtaatctcagcacttttggcaggaggatcacttgagccttggtgctcaagaccagcctggataacacagtgaaatcccctctctacaaaaaataaaaggtgcatgtgaacagagcaagaccctgtctctgaaaaaaagagaaaatcttccttgccttttactgccctgagagtggtctcttcatcctctcgatcctgtggacagtcctccatagtctgtgtcttaggaatgtgattggctgtttaccatacctgtccgctgctctgcaatctacagttcagagacaagccctgtcttcatgatgcagacatcatctgatgtagagtatatgcatgatgggatgacattaaatatggattaatgaaaggatatacactataaatgaccgtgagagcagatagaatattagtggttgcactttgataccattcaacaaagttttattttaaattaaatatagaaattattggcaacaacactggataggatttaaaacaaaaataaaaattgtttaccaaagtcaaatgatttgaaaacatttttaaaagcttatgtgcctgttaagatgaaggccttgcgctagttgctcatgaatcaatagctaatatgacgtaggagagtaaaaggaggcagatagctaaataagtggtatggtgtgatggggttttttttttttcttttgtaagagaacaaggtctcactgtgttgcccaggctggagtgcagtggcacaatcatagtgcactgcaggcttgaactcctggccttaaatgatcctctcacctcagcctcctgagtagctgggactatgggcatgagccactgcacccagctgtgtggtggtatttttttttttagaggagtctcgctctgtcgcccaggctggagtgcaatggtgcaatctcggctcactgcaacctccacctccctggttcaagcaactctcctgcctcagcctcttgagtagctgggattacaggcgcctaccaccatgcctggctatttttttaatttttagtagagacaagttttcaccatgttggtcaggctggtctcgaactcctgacctcgtgatccgactgccttggcctcccgaagttctgggattacaggcatgagccaccgttcccagctgatggtgttttgatagacatactcattgctgagggagtacacatgagaggcacccactcagcctggaatagacagaaaaggcttccaatgtgaaggacatgtagacgttttgaagcagagaattagagaacaagtgttctaggcagagagaataccatgtagagactgccaaatttggggaactgtaaattcctgggtttggctagagcatagattgcacagggtatggggaggggtggcgggatatggctgcctttatggcaaatactcccacttttccactttcttctcccaccccacaattgccaagccaacagacatctcacaaaaatacccttgggaaggagaagaggtgatcacttatacgcatggtattatagtttgatcagattgctctccaccccagaactagagaagatcagctgtttgaagtaaacattttgattgggaaataagtctttggtctcccatccaagtactaaccaggcccaaccctgcttagcttctgagatgagagagaaatcattggggacatgaggcattgtgcaagatgagggaaagttcaggtgcacctgtttggactcagtcagggcatcaggaggacctgagagagaagcagaaagagaggagagagggggaccaactttgcttactcagaagtttttcctaagtccaaaggtataccaaggaagaagagaaaacatcttttctgmtactttctgtatggtggtgatcaagctattaacagtgtagctctgctacgttatgtcataaatatggtttgagggggaatctcacttctatcattaaaatttttttcctgttaaccaacgaccaaaatacatatacatttttaggaaacatcttgtttgtatactgmttttttattgttaagcaaaactgtaatttaaccactataatagaaactggaattgtttctgttagtattgatgctcacataacaagaatacaattataagaaccagtgacctgagactctacagaagcctgaagtatctgctaccaggtcatcaaatagatattaattcacttaagcgtagttttaacatcatgtttatctcagatttttctatgattgtaatcagtgtgaacatgttcccttgtattcttttttctcttaatgttattttacacgcgacatttgcatggcattgttcatgtccttaatgtaaacttagtatgatgtcgtgtgagtatcccacagaaactgcttgctcgtatatttattcatccattcattcaacaagcattccaggtacaatcctaggttctaaagatacagtcctaaataatatatatttttgttctcraggagcttaattttatagtattttatgcattaccaaattattgtgggatttttgtttttacactaacaaaatacaacacgaataccctctgcccccccccgaatgaaatctttcttgtttcccagtgacagcagtactgtggtgcacctgctggaaggaaacctggtaaccttctcctcaggctcagatcccaccaccctttcatgaaacagttgctttggcctatttgataacctttccatttcatagacttaatatcacttgttttagatgagtactccgctttctgtaaaaggaaggataattttggaaatcattgaaggaatgtgctacttacatggaaaaggcgtgatacacaaggacctgaagcctgaaaatatccttgttgataatgacttccacattaaggtaaaccatcatcggtaggcttccagaaagttgggtgattttagttttaattctccaatgtaaatccattctcgtacattggagaagctaaaggaagacctagctcagcttataactgttgatgatggtgccgaaaggctctaccggtgattgagaggaaggctgcaggcttgatgggatcaggagataactgtcaggataactcatatcttttgggggaggagtggarttgaatggggtagatgagaagacctctttcctagactgtgttttttcctctgttagaaacatttagaaacattcaagggttgcccttttcatcctggaatgggccattggtgtcataatgttctccaggaaatctgtgtcaccaagactctcctcctctggaaatgcaggggaatgtgaaggtgtgtgcggaaaatccttagagttcagatatggcctaagagtgagatcagcggccgggtgcagtggcccacgcctgttatctcagcactttgggaggctgaggtgggcggatcacctgaggtcgggagttcgagaccagcctgaccaacatggagaaaccccatctctactgaaaatacaaaatcagccgggcgtggtggtgcatgcctgtaattccagctactcgggaggctggggcaggagaatcgcctgaaccggggaggtggaggttgtggtgagccgagattgtgccatcgcactccagcctgggcaacaagagcgaaactctgccttaaaaaaaaaaaaaaaaaaaaaaaaaaaaaaaaaaatcagcagtgcatcaaaaacctctactttgaaattttgttttatatttgtattcgattgtttacttctgtctgtattttaaaaatcagtttcctttgaacacattctttccattgtcgtaaagggaacaagggaaagggatttttcttttgttcattcaagggcaggatttagctagggggagtgtcatatctaattggcttccgcagcaggaatccaagcacaagaatccaaaaggggaagcggaaggggaagcagccctgggggaggcacccaggagctgctgacacaggggcctctcatcaccagcaggttctgcgtctagcgctttgtcctagtcttggacaaagggctgggaataaaaattccttattcataacctatcttcaaattcatgacttccctcttatgtcgtgggttagaatctgtgaattttaggtactcatgtgccacagttcatccccacatgcttgcttggattcctggaggcagaagtggaactggcacctatattctcttctgaactgtgctgccctgtcattttgccctgccagcactgttcttgttctgtgtctgaccttgctatttttctctctgcttttttgtctgtttttctcctcctttccaccctatctcctcttaggttcaggctacagctcaaaacaagcaacactgcagtccttatcctcagtgtgtctttgggatccttggacactygcatccatgggcctctggacgccatttggggaaatagaaggtgtagtatttagccactgtctgctgcataaatgtgcagagaagaaaataaccattttccccccaagccctagaaatagttgaaaaacatacgcagagtcaatggggaatgagaataaatatgtttggttgttactgttcttgtcagaaacatcttccgcttttcccctcccccttactgcataaggaatacgataccagaatttcatgtgaacgtttcctgggcgacattttacaaatggctgaggagacacacagtttctatgagtctgttgagaagtcgctgttttgaacctgcccagtgcaaccatttctggaaaatttaccgtaccttatgtataatggataagcccaaaattgaaagtcagatctgatttgcttacggccttcaccaaacaatcccagtggctcaatgtctttcgcagatcgcagacctcggccttgcctcctttaagatgtggagcaaactgaataatgaagagcacaatgagctgagggaagtggacggcaccgctaagaagaatggcggcaccctctactacatggcgcccgagcacctgaatgacgtcaacgcaaagcccacagagaagtcggatgtgtacagctttgctgtagtactctgggcgatatttgcaaataaggagccatatgaaagtaaggcattacttactttccactgccgtcccctcagcatctacacgcactgtgcctggaactaataggtgcccagtaaatttttgttgaatgaatgagtaatcccatttaggaatcagtgatcataggatgaataggaacctcratagtgtgtcattagctggagaggtgctgtgaaattccagggttcttcctagacaggaaagttgattgtttctgcttgtgaggacttagcctttcacactacaaggcatacacttcatactttcactcattcacttgctccttcattcaagaattatttcttttcagtccctactgtgggcacttgagtcggcattgggaatataaagatgagtaagtcgtggcttgtgtaggatagagacactctgcagtttgttaagtgcataaactgatggatgttgtcctacatactcttcttgggtgatcatcagctcccatggtttgatgatcatctctttgcaaatgcttcttaaatctgtgtctctggctctggaatggatatccacttgtcttacagtcagatccatcgcaggtaccagaggaacctccaaagcagcatcccccaaacacatcctgtcgacactgtcctgcagctcgccccgcttcacccctcttcatatgcttgggaagtggcatcgccatccttttaccaagttgttgcccaataagaaacttcagagtcatcccagactcgcccttgcccctctctcccacattctatcagatctcaaaacctgtgaattcaagatatatgtatgactcaagatatatctgcaacccatctgcctttctctgtctccactggcctctgctcagttcaaaccctcctcgtttctgcagcaggctccttccaccgtccaccattcatgtggcagccaaaatggtcgtcctaaaaggcacatgcaaccctctccctcacatattggaaatccttcccagatgctctgtggtcttcaggatgaagttcgaattcctcagcgtggaataaaaggccttcatgttctggcctttgcttctctactggcctcgtccctaaccctcccttctttgtcagtgtgcagttacactgaggaatttgtgggatgcgtcatgatctctgtaacttctagtctgttgatatcctgcttctcttgcctggagtcctcctccttaagtctccctttcccattctttacctgctaatttttctggactcaacaaagccttcctggacctttttagtcaggtttgtgctactggaaccccttgtacatcctttttttttttttttttcccgtgagacagagtctcattctgtcgccaggttggagtgcagtggtgcagtctcggctcactgcagcctccacctcccaggttcaagcaattcttctgcctcagcctcccgagtagctgggactacaggtgcacaccaccatgcccagctaatttttatatttttagtagagacggggtttcaccatgttggccaggatggtcttgatctcttgacgtcatgatccgcctgtctcaacctcccaaagtgctgggattacaggtgtgatccaccatgcccagcctcatccttcttgaatagcaatgatcactctgtgttttaagtcactctcattaaactgagctcctaaagacaaggactgccctgtatttgcttttgcacatggagcatgccattggccttgcccacataatctttttgttccatcagcaggcagctttgtcgagaattttgttttatctgcagacattaagatattgtttggtcatctctgtagtggaatatgtcagctccttgtcataaggccattccactctatggaatgaggcagctgtaccagaggctgagaaaaatgagcagtattgttcaagttctgtcaccttcctgcctgagagaggagcaagacctgaaagaamgtctttgctttgtagatgctatctgtragcagcagytgataatgtgcataaaatctgggaacaggccagatgtggatgacatcactgagtactgcccaagagaaattatcagtctcatgaagctctgctgggaagcgaatccggaagctcggccgacatttcctggtaagagcatcttttctgactgtgtaggatgcatcctgtgtggtgattttcctagtaacatattgttaggaacttggtttgaatcctcagaaaactgagttcgacttgacttgtggttttaaactgattttctagatttcaaacatgttattcagtgcaaagaagccctctctctcaaaagcatgatggcacataaggccttcttgtttcctttttttgtaattaactttttaacttgggtttaaatatacgtaacatgaaatttaacattgtaactgttttcaagtgcactgttcaggggcagtaagtacagtcccatagtacattcactttccatcgtctctctccctgcccctggcagcccyyatcctactttctgtctctgtgaatttaactgcactgggtgccttatataagtggaatcatacagtatttgtccttttgtgtctggcttaytccacttggcatgatgtcctcgaggttcatctgtgttgtagcatatgtcagaatttctttccttttcaaggctgaataatattccattgtatgaatggagtgcattttgtttatccattcgtccgtctatgggcacttaggtggctttgaccagccttcttgcttcttcacttcttttatttccatcccctcccttgtttagctggcatcttttgccgtctagattggccttgtcatacagggatgaggaaaggtgccgggatgtttgctgagcagtattctatggtgtggatgtaccacggtttggttaactactcactccttgaaagacttgtttccagttcttaactgttgggactaatgcagctgtaaatatttgtggacatgtttttgtgtgaatataagtcttcatttctctggagtaatacccaggggtacaatagctaggttgtatggtagtttcatgtacagtttattttaaaaattccctaacattttcccagaggggctgtgccattttatgttcggtgtccgagtgatgcaggttcttgtatcctcaccagcatggggtacccaggctcctcacacttctgcttagtcagctacaaatttatttgagtattcccacaagccccacttcaggtttggtaattcgttagaaagactcacataactcaagaaaacattttacttacgtctccccttttactgcagtgggtacaattcagaaacagccaaatggaagagatgtacaaggtgaggtatgggaggagggtgtatagaacttccatagcctttcaagacacaccgcattccagtgcttctgtgtgttcagcaacctgaagctctccaagcctcaccgtttaaggtgatttatggaagttccattacataggcatgactgactaaatcatggtcattggtgcttgagcttaatctccagtccctctctcctcactggaagtcaaaggtggagctgaaagtcccaaccttctaattatagcttggtctttctggttgctagcccccattctgaagttgcctagttttctgaccccacccaaaagacactcttagaagactccaaggattttaggtgctacctgccatgaacaaaatcaaaccttcctgattctccaaggtgtcttcttttattgtttcctttctgtttagagaactttccttaatcattcttttaggatatgtctgaactctgtcattctaaaatttttttccttatagggaaggtgttatttttctcttgctgctttcaagactttgtctttatttttcagagatttagttgttatttatcttggtgtggattcctttgggtttattctgtttaggttttgctcagcttcttaaatctgtaggtttatgcctcttaaaccatatttgggaagctttcagccattatttctgtaagtactttttaacccccaccctctttctcttttctttctggaattctgacaacataaaaactatatctttggttatggttatagtcccacaggtccctgaggctttgtgttttttttgttttttttgtttttgtttgtttttttcagttaattttctctctcttattcagactgggtaagttctatcattctgtcttccagttcactgatttttctgtttctcctcgattccacagttgaacctgtctactgagcttttttttttttttgacacggactctcactctgtcgcccaggttggagtgcagtggcgcaagctctgcctcctgggttcacgccattttcctgcctcagcctcccgagtagctgggactacagacacccgccaccacacctggctaattttttgtatttttagtagagacrgggtttcaccgtgttagccaggatggtctcsatctcctgaccttgtgatcagcccgccttggcctcccaaagtgctgggattacaggtgtgagccactgtgtccggcctaccgagctttttattatgttttggtcattaaagttttcagctctaaaatttatattctccccttttttgctgagactttctatttttcatttgtttcaagcaggttcataactattaattgaatcgtttttatcatggctgttttaaaatccttgacaggtaattctgacattgctgtcatctcagtattggcatctattgattgtcttatttcattcagtttctgattcttaatgtaatgggtaatttttctgttgaaacttgtacattttcttcctatgtttggagattctgtatcctctttaagccttctgttttaactgaactttcctgacactgctctgacaagggaagagtggtggccaccttattagtgctgggtagaggtagaagttcagcctctcgactcagcccttattgacacctaaggtcagaggctcctcttcactgctgatcaggggtgggaattctggcagagtccacacggtccccactgacacagaggtgaaggtacctcattactactggacaatgttaaaagtcccgattctccactagacctcctctgacacttccccagtggggaagggaagggtggtcttgttactgccatgtggggcaaatccaggctattcttgtgttctcctgacaccatgggagtggaggcgctcattatcagctggcaggtaggacagccctggcttcctgttgggccttctctgacattaccccggtgggggtgttgggttacgttgttactgtctcatgcggttggatgttgaggctctccacttggccttagctgctgtgggtggggttggagccacagggttttttctgtggtggttggctggaacagagtggttgctgactaaaagttttctcctatccaagtactaaccagacctgaccctgcctaacttccaagatcagacaagtttgggcatattcaggatggcatggctgtagactggctaaaggttttctgtctgtcccttgctgccccttgcttagttctttggctagaaagagcaggctttagttggagatttttttttatctgtggctcttgatggtttgaggttgccaccttttcagccaagtctgagatatatgaggaaaagagaaaatccagtgaactcactatcgtgtgtttcatctgatcccgaggtttcctgctggtctgcctccttctcttctcctttcagagactctgtatgtttgttttataaataatatataggatgtttttgttgtacttagaaggaagattaagaaaaaagtaygtccactccatcttcctggaactggaagtttcttttttcttttaaggctaacagctgtaacccattacactaaatccttcctctgactatcccaatctctcataaatttgatgccagaggaacagaaacatggagttcgcccatccctgttcagctggagatgaactcacatcagggagcagtttgtgttgcagccagagaaactgcagcacgaataaaaagcacaaagagcacaggctattgaggcagaaacccctggtttcctgtgttagcctatcccttgttctgtctattaatcttattagtctctatcagagtcagtgatttggagcttaaatttttatttaagctttgcccacagattgaggtaagtaattcaaagataatagatggctaatatttttattttatgttagaaaataattaagaaatttaaagtacattttacttttacaggcattgaagaaaaatttaggcctttttatttaagtcaattagaagaaagtgtagaagaggacgtgaagagtttaaaggtaggcaatatagcagatgctcaaaatattaacatagcaaaatatatactgtcaatcatgaaaaccaaaacaaagtgatttgttattgagatttgaggtaagctagcttggtaaacatataaaacaaaatgagcaattgtctgcacatatcatcctgttggcatactggacccatttctccttcaaaactcatgaaatgagagaaaacatatatagcaatatgaaaacaaaagcacaatgtcactggcaaagattggaaagtaccataagtggatcagccattttgaggaattcttgaaagatagaaagaccacagaattattctgctgagacatataacagacaaggaatactagcccaagacataatgctgaggaagaagtaccggaggggcagtcttgggtcagtgtgcagaagcaacagcacagtcacctgggatgttgacaggggagtcatctgagaacctcatttatgctatttaggaaagtcggcttctctccctccttcccctgtacttagcaacagatggcagcagcatctgcccaagactgaagcaaggaggtggtttctggggttagaggggcatgacaaggcccagttaggaaccaatcaactaagaggaatggagaccaccccgcccccctgccaactctggaatcaagctactgccatccatcttccagcaacctaccccataatcatgaacaggagactacgacaaataaaacaggcagagactttaaaatataatttaaaaaagagattagaatcagctaagataaactctaaggcaaaaaatcattccctcaaacaatcaggaatatttcataatgataaaaggcccaattcatctggaaagtataaccgctttaaatgtggatccaccttcaataacatgacctcaaaatcaaccagccaaaagtgacagaactcaaagaaaaacagacaaatccacaattaaaactgaagattttaatacacatctctcttcaattgatagaacgagcaaacaaaaatcagtaaggatatagaagacagaaagaacatgacgaacacacttgacgtaacggaaacacaggatacgctgcacctaataaccgcagcgcacctacctgccgcacctagtaaccgcagagcgcctacctgccgcacctagtaaccgcagcgcacctacctgccgcacctagtaaccgcagagyacctacctgccgcacctagtaaccgcagmgcgcctacctgccgcacctagtaaccgcagcgcgcctacctgccgcacctagtaaccgcagcgcgcctacctgccgcacctagtaaccgcagcgcgcctacctgccgcacctagtaaccgcagagcgcctacctgccgcacctagtaaccgcagcgcgcctacctgccgcacctagtaaccgcagcgcgcctacctgccgcacctagtaaccgcagagcgcctacctgccgcacctagtaaccgcagagcgcctacctgccgcacctagtaaccgcagagcgcctacctgccgcacctagtaaccgcagagcgcctacctgccgcacctagtaaccgcagcgcgcctacctgccgcacctagtaaccgcagagtacctacctgccgcacctagtaaccgcagcgcgcctacctgccgcacctagtaaccgcagcgcgcctacctgccgcacctagtaaccgcagcgcgcctacctgccgcacctagtaaccgcagcgcgcctacctgccgcacctagtaaccgcagcgcgcctacctgccgcacctagtaaccgcagcgcgcctacctgccgcacctagtaaccgcagcgcgcctacctgccgcacctagtaaccgcagcgcgcctacctgccgcacctagtaaccgcagagcgcctacctgccgcacctagtaaccgcagagcgcctacctgccgcacctagtaaccgcagagcgcctacctgccgcacctagtaaccgcagcgcgcctacctgccgcacctagtaaccgcagcgcgcctacctgccgcacctagtaaccgcagcgcgcctacctgccgcacctagtaaccgcagcgcgcctacctgccgcacctagtaaccgcagcgcgcctacctgccgcacctagtaaccgcagagcgcctacctgccgcacctagtaaccgcagcgcgcctacctgccgcacctagtaaccgcagcgcgcctacctgccgcacctagtaaccgcagcgcgcctacctgccgcacctagtaaccgcagcgcgcctacctgccgcacctagtaaccgcagagcgcctacctgccgcacctagtaaccgcagagcgcctacctgccgcacctagtaaccgcagcgcgcctacctgccgcacctagtaaccgcagcgcgcctacctgccgcacctagtaaccgcagcgcgcctacctgccgcacctagtaaccgcagcgcgcctacctgccgcacctagtaaccgcagcgcgcctacctgccgcacctagtaaccgcagagcgcctacctgccgcacctcgtaaccgcagagcgcctacctgccgcacctcggaaccgcagagcgcctacctgccgcacctcggaaccgcagagcgcctacctgccgcacctcggaaccgcagagcgcctacctgccgcacctcggaaccgcagagcgcctacctgccgcacctcggaaccgcagagcgcctacctgccgcacctcggaaccgcagagcgcctacctgccgcacctcggaaccgcagcgcgcctacctgccgcacctcggaaccgcagcgcgcctacctgccgcacctcggaaccgcagcgcgcctacctgccgcacctcggaaccgcagcgcgcctacctgccgcacctcggaaccgcagcgcgcctacctgccgcacctagtaaccgcagcgcgcctacctgccgcacctagtaaccgcagagcgcctacctgccgcacctagtaaccgcagagcgcctacctgccgcacctagtaaccgcagagcgcctacctgccgcacctagtaaccgcagagcgcctacctgccgcacctagtaaccgcagagcgcctacctgccgcacctagtaaccgcagcgcgcctacctgccgcacctagtaaccgcagcgcgcctacctgccgcacctagtaaccgcagcgcgcctacctgccgcacctagtaaccgcagcgcgcctacctgccgcacctagtaaccgcagcgcgcctacctgccgcacctagtaaccgcagcgcgcctacctgccgcacctagtaaccgcagcgcgcctacctgccgcacctagtaaccgcagcgcgcctacctgccgcacctagtaaccgcagcgcgcctacctgccgcacctagtaaccgcagcgcgcctacctgccgcacctagtaaccgcagcgcgcctacctgccgcacctagtaaccgcagcgcgcctacctgccgcacctagtaaccgcagagcgcctacctgccgcacctcggaaccgcagagcgcctacctgccgcacctaggaaccgcagagcgcctacctgccgcacctaggaaccgcagagcgcctacctgccgcacctagtaaccgcagagcgcctacctgccgcacctaggaaccgcagagcgcctacctgccgcacctagtaaccgcagagcgcctacctgccgcacctaggaaccgcagagcgcctacctgccgcacctagtaaccgcagagcgcctacctgccgcacctagtaaccgcagagcgcctacctgccgcacctagtaaccgcagagcgcctacctgccgcacctagtaaccgcagagcgcctacctgccgcacctagtaaccgcagagcgcctacctgccgcacctagtaaccgcagcgcgcctacctgccgcacctagtaaccgcagcgcgcctacctgccgcacctagtaaccgcagcgcgcctacctgccgcacctagtaaccgcagcgcgcctacctgccgcacctagtaaccgcagcgcgcctacctgccgcacctagtaaccgcagcgcgcctacctgccgcacctagtaaccgcagcgcgcctacctgccgcacctagtaaccgcagcgcgcctacctgccgcacctagtaaccgcagcgcgcctacctgccgcacctagtaaccgcagcgcgcctacctgccgcacctagtaaccgcagcgcgcctacctgccgcacctagtaaccgcagagcgcctacctgccgcacctagtaactgcagcgcgcctacctgccgcacctagtaactgcagcgcgcctacctgccgcacctagtaactgcagcgcgcctacctcctgcacctagtaactgcagagtacctacctgccgcacctagtaactgcagagtacctacctgccgcacctagtaactgtagcgtacctacctgctgcacctagtaactgcagagtacctacctgctgcacctagtaactgcagtgcacctacctttaaaggcttttcaagaacatacagagcattttcaaaaactgaccatgtgctgggaaatcaaataagtctcaatttaaaaggattgtaatcataaaaatgtcctctgagtatatttcaattatgttcaaaattaattttaaaaaggtaattggaaaatcttatgtggttagaagtaacgaaatatacttttaaatatcccttggatcaaaaaaaataaatcacaatggtatttagaaaatatttttcactgaaggctaacaaaacactacatattaaaattataaaatgcactttgcaaaggagtacttaatataaccttaaataaataaatatttcatatatatatatatatatatgaagaaaggctgaaaattaattagccaaacattatctgaagaagatagcaaataaacctagagaaaaaagaagtaaataataaggaaaagagcataaattaatgccgcagaaagtaactaacagcggatcaaaaaatccaaatattggttattcgaaaggctaatacaatagactaattaagactgatagagccaggtgtgaggtaatcccagttacttgggtggctggggtgagaggatcgtttgaggccaggagtttgagaccagcctaggccacacagtgagaccccatctctaaaaaaataaaataaaaaattaatgagacatggtggcatgtgccagtagtcccatgaaggctgagatgggaggactgcttgagcccaggagtttgaggctggagtaagctatgatcatgccgctgcactccaacctgggcaacagagtgagacyctacttctgagaaaaaaaagaaaaaaaagactgacaaaaaaggagacaagattgaaatccatgaataaggaggaatcactataggtcctgcagacatcaaatgktattaagagaatattatgaacaactttttgttaattattttaaaatttaggtaaaatggaccaatgtctttaaaaagttcaatttagcaaagctaactcaaatagagatagaaacttagaatattcctgtaactattaaaagaagcagtgataaaaaaagaaaacttcctatagagaaaaccccacagagagcttcatcaatgatttctgccaaatattcaatgaagaaattatgtcaatcttayacagttttctctagataatagagaagagagaactcttccagattcactttgtgtaagcataaccttgattcccaaaactggaaaataaggtacaagaaaggaaaattacagaccaatcttgtttaacagtatagatgcaaaagttctaaataaaatactataaacaaactcaattcatcaaagaacaaacgcaaaattcggtttctgccaagaatgcaaagttagtttaactttatgaaaatctgtcattataatttattacattgtcttcttaaatgagaaaaagatatatcttttcaatagatgcagataaatctgttgataaaatgtaatgtttattcatgattaaaaatgctagcaagtcagaaaagaaattccttttctgataataaggtatcttgaaaygaacagaagttttgtacttattttaacaaaatgttaacagccttttttttttttttttgaggcaaggtcttactctgttgcctaggctggagtgcagtggcgtgatcacggcttactgtatccttgacctcccaggccgaagcaatcctctcacctcagccccctgagggaccacaggcatgcaccaccatgcctggctaatttgtattttttgtagagacaggattttgccatgttgcccaggctggtctcaaactcatgagctcaagccatctgccctcttcagcttcccaaagtgctggaattacaaggcatgagccactgtgtccagcccacctttctctgaaataatatgcaagaccaagctacttaccacccctatttctggtcagcctggtactggaggccctagctattttagtagagcaagaaaaagaaagaagagatataggattggaaaagaagaaacaaaactgttcataggttataggatgtgtacatagaaaaactcaaaagtatcttttaaattaataatagtttagttataaaaatcaatatataaaaataaatcttacaaaaggtatgtagtaactctaaaagtataaccttaattgagagacataagaccaaagtaagtgaagaaatataccatttactttgtgattcggaagtcaccatagtacgaagatgtcagctcttctcaaattgatctatagaatcaatgcaatctcaaccaatatctcaagtttttttttttttttttttttttttttgagacagagtctcgctctgtctcccaggctggagtgcagtggcatgatctcggctcactgcaagctctgcctcctgggttcatacaattctcctgcctcagtctcctgagtagctgggactacaggcgcccaccaccacacccagcgaattttttttttttttaatagagacggtgtttcaccgtgtcagctaagatggtctcgatctcccgacctcgtgatctgcccgyctcagcctcccagagtgctgggattacaggtgtgaggcaccgtgcccagccaagtattttgttttgttttgttttgtttttgagacagagtcttgctctgttgcccacgctggagttcagaggcgcaatctcggctcactgaaacctctgcctcccgcgttcaagcaattctcctacctcagcctcccgagtagctgggattaaaagcgtgcgccaccatgcccggctaatttttgtatttttagtagacatggggtttcactatgttggccaggctggtctcaaactcctgacctcaaatggtccgcctgccttggcctcccaaagggctgggattacaggtgtgagccaccacgcccrgcctatatctcaaccttttagttttgtgtgtgtgtggcaagtgggtgtgaggagtggaacttgacaaacctactctgaaatccatatgaaaaggtaaagaagagaataagatcagccaggatgcccttgaagaaggacaagactagtagtgaagggtttgccttatcagattcttgtcaagaattattataaagctatattaaaaagacagtggtattggtgtaggttggacagatactgttggaatggagttgaaaacccatagatctacacatacctagaaacttgattttcacagagatggcactgtagagcagtggggaagtgacagtcttttcagtaaatggtgctgagacaactgggtatccacatggtacagaaatgaaattgggcttctaccttacaccataccaaaaaatcagctccaggttgattactgacagaaatgtgaaagataaaattataaagctattggaaaatataggagaatttgtccatatcctcagggtaggggatcctcaacagtatacaaaagcattagctgtagtggtaagaactgataaattttaaaatttataaaattttaaatgaatgtttaaaacgaatttataaacgaattcattgtaaaattctataaattatttataaataaatttatacatttataaatttagaagatttttaaatgaatgtatacattcattttaaaacttttattcatcaaaataaaccattaagagaatggaggcagggcatggtggctcatgcctgtaatcccagcactttgggaggctgaggtgggaggatcgcttgaggccaggagtttgagactagcctgggcaacatagtgagacctcctctttacaaataataattaagaaattagctgggcgtggtggtgcccactttcggtcccagctactcaggaggctgagatgagatgactgcttgggcccaggaggctgcgccattgcgctccagcctgggttactgaatgagaccccatctccaataaataaataaataaataaaccagtcacagaatgggagaagtgcaacacacacataactgacaaaggacttgaatacataaaatctagagaaattgtataaatcggaaaggaaaagatatgcaacccagttaaaacagggatgaaatagctgaatgggcacttcaccaaagagaataaatacaccaaaaaagtgcacaactttactggtaattagagaaatgcaaattaaaaccacaataagataatatgtgtctaaacattggcaaatatggcaaggcttttctaaacaacatgaaataaatccaaataaacagtgaaatgtgtttatggatggaaagacttgacatactaaagctgtctattctccccaacatgatttataaaaggagtgcaatcctaattaaaagcacaaccaaattctttatggaattcaacaagctgactcttaagttacacaaaatgtacaaagatagctaagaaaattctgaaggaggagatcagaacagtgtagactacagcaaggataatcaaatagattaatagaaaaggtgagtctttgcaggttgggttttccagaagcagccactgagttggagattggggtgcaaggaaggagtgggaagcaggaatgagcagaggaagaagtcagaaggcaacgaagcctgacagctctggcagccgggagcactgagcaaatgcccctcaggcttgtcccacgtcagactgaaatggccaaggctttatcccctcgcctttctcagtcactggctcagaaggggagtacctggggcaaaggagttcacagctgcaggctgtttgttcactcagctccttgcaacagggcagcaaatccctccttgagggggaatctgagaggcccatcactgtgtctaccacaaagtccaaaatcaatccatgtatgtttcttaagccacacacaaaattcgcaaggtataaagaaaaagattattgtatatgacttcatgaaaatggaaaggtagtcaaaaaggagaaattgtgtttagcaaaggattaatatccaggatatttaatagagtgcctacaaataaaaaacaaaaataggccgggtgcggtggctgacgcctgtaatcccagcactttgggaggccgaggctggtggatcacgagatcaggagatcgagaccatcctggctaacatggtgaaaccccatctctactaaaaatacaaaaaattagccaggcgtggtggcaggcacctgcagtcccagctacttgggaggctgaggcaggagaatggtgtgaacccaggaggcggagcttgcagtgagccgagatggagccactgcactccagcctgggtgacaaagtgagactccgtctcaaaaaaacaaacaaaaaaaccaaaataaaagaaaaataatagacaaagaacatagacaattcaaaaaagaaactgaacaacatacttcagaaaagatatttggcctygccaacagagaaaggcaaaatgaacccgttacaatttttcatccattagattgaaatttttgaaagattagtgatacagtgtgttggtgaaaatgcagaataacaagcagtcttctgcagtgttggtaagagtggcgaagtttattagaaggtgaggcacccaacaaactccacaagcccataagtttggctgcagttctactctcagtaatctatactgctcacgtgcactcaaagatgtagtttccattctttgcaccttagtttataagagtgaaaaattagaaacaactcaaatgtccataagtaactgccctaaattatgattcatctaaactacagaatactaatagccatttaaaagaaagaggtggaaactaacatgtaatgatatagaaagatcttcaagattagctgttagtgaaaaaaataagtcacaaaacaatacttacagtgtggtccttttaatgttaaagatatatatattttggcctggtgcagtggctcatgcctgtaattccagcactatgggaggcggagttgtacagatcacttgaggtgaggagttggagaccagctggccaacatggtaaaaccccgtctctactaataatacaaaaaaaactggccaggtatggtggtgcatgtccataatcccagctactcaggaggctgaggcatgagaattgcttgaacccgggaggtggaggttgcagtgagccaagattgtgccactacactccatcctgggcaacagagtgaaactgtgtctcaaatatatatatatttctggaatgtgtgtgcaaattcctagagagagaataagagtgatatgcatcacactctggataaggcttacctctagagaatggaagagtaggtgctgaaggaatgtttggatgttattctatgtgattctgcattgtttgaatctttgggggtttttttggttttctttttgagacggtcttactctgtcacccaggctggagtgcagtgacacaatctgggctcactacaacctccacctcccgggttcaagtgattctcgtgcctcagcctcccgagtagctgggattacaggcgtgtaccaccacacccagctaatttttttgtacttttagtagagatggggtttcaccatgttggccaggctggtcttgaactcctgacctcaagcgatctgctcgcctcggcctcctagagtgctgggattacaggcgtgagccaccatgtctggcctgtttgaatctttcaaaaggactttgtacttaacatatttgtgtaataaaaataactataaaaagaaaatcaatttgataaaattaaaataacaaaaatacttttcatattaggctaagcagggtggctcgtgcctgtaatctcagcactttgggaggctgaggtgggtggatttcttgaggccagttcaaaaccagcaacatggcaaaaaccgatctctacaaaaaacacaaaaattagccaagcgtggtggcgcatgcctgttgtcccagctacacaggaggctgaggtggcaggctctcttgagcctggaggttgagcctgcactctagcctggaggacacagtgagactctgtctcaagaaaaaaaacaacaaaaaacccttttcatgttaattaaaaacaataaacatacagctgggtgaggtggctcatgcctgtaatcccagctctttgggaggacaagctgggaggattgcttgagcccaggagttggaggtttcagtgagctatgaccatgccactgcactcctgcctgggcgacagaggcagatttgatctctaaaaataaacatgcaaagagacaaaaacaatatatagaatgctacaaagtgtgaacataattaataccctctgtcattctcccctagatcatgcatgtattcatttagctagtatttttgaccacttatttatatagcagacaatcgttaacagcaaaatacaaataaaactaggaaaaaaaaaacttgaaggaaaaataccaaagtgttaacattttatctttgggtgtagggcaaaactatggataggttttaagaatatataattttctatgttttctataatgaggattattgctcctataaggaaaaagttttttactgtggcaaaatatacttaacataaaattctctattttaaccatttttaagtgaacaatccagtggcattaagtacattcataatgttgtgcggccattaccactatctatatctagaacttttttatcatcccaaactgaaactctgtacctgctaaacggtaactccccattcctccctctcccagcccctggtagcttctattctgttttctgtctctgaattctaggtagctcctagcaaaaggatcacacaatgtatttcctttggagtctggcatatttcacttagcataatgttttcaaggttcatctgtttcatagcatgtatcagaatttcattcccttttatggctgaataacattccatcatatggatatacaggttgaacatccctaaacccaaaatccaaaattcaaaatcctccaaaatctgaaacgttttgagtgccagcatgatgccacaagtggaaaataccacacctgacacctctgctttctgatagttcagtatcctcaaactttgtttcatgcacaaaattattaaaatatggtataaagtgaccttcaggctatgtgtataaggtgcatatgaaacacaaataaacttcatgtttagacttaggtcctctccccacgatctgtcattctgtacatgcaaatattcccaaattggaaacaatccaaaatccaaaacacttctaatcccaagcattttggataagggatactacacctgcaccatattttgagttcctgccttcagttctttggggtatatatatccgggtgtggaattgctagatcatatggtaattctatgtataactttttgtttttctgagacagagtctccctctgttgcccaggctggaatgcagtggcaccatctcggctcactgcaacctccgcctcccgggttcaagcgattctcctgcctcaccttcccgagtagctgggattacaggcatacaccaccacgcccggctagttttttgtatttttagtagagatggggtggtttcaccatgttgtccaggctggtctcaaactcctaacctcaggtgatctgaggtcccaaagtgctgggattacaggcgtgagctcccatgcccggccatgtttaacttttaagtactgttaaaattgttttacatggtagctacaccattttatattccccaccagcaatgcacaaggattctaatttctccaccatcttaccaacactttttatttaccatttttatattatagtcactctaaggagtgtgaaagtgtacctcatggtggttttgacttgcatttccctatgactcatgatgttgagcatcttcatggcttattggccatttgtatatcttctatggagaaactgctattcaagttctttgcccatttttgaattgggttgtttgttttttgttgttgagttgtaggattttttttttttatgttctggatttcatccgttttcagatatatattgtttgcaactttttccccattattttattttatttatttattttttttttggagacagaatcttgctctgtcgccacccagactggagtgcagtggcagaatgttggttcactgcaacctctgcctcccaggttcaagagataactcctgcctcagcctcccgagtagctaggactacaggcacacaccatcatgcctggttagtttttgtatttttagtagagacaaggtttcaccatgttggcctggcaggtctcgaactcctgacctcatgggatccacctgccttggcctcccaaagtattttttccttattctgtaggttatctttttactcttttcatagtatcctttgatgcacagaagcttttaattctgatgtattatttttactctttacttttgtttgtgcttttgtgtcataaccaagaaatcgctgccaagtccaatgtcatgaagctttttccctgtgttttcttctaagaatttttgtggcactagcccttaaattaagtctttgatccattgtgagttaatttttatatggtatgaaataagggtccaacttcattatttcatatgtgtatattcagttttcccccatcgaatgctcttggcaaccttgtcaaaaatcaaktggccatttataggagggtttattcctaggctttccattctgccccactggcatatgtgcctgtctttatgccagtcctacgctgttttgaatactgtagctttgtagtaagttttgaaatcaggaagtgtgagtcctacaaccttgttctttttaaagatcattttggctatttgggaaaaacattaattttaaaaaattactacttgtaagatctgtgtgaaatttctaccttctgaaaatatgaattcttctcgttaaaattttctgggactctatttcctgctgttcactaaagtgtgtatttatgctcttaattatagaaagagtattcaaacgaaaatgcagttgtgaagagaatgcagtctcttcaacttgattgtgtggcagtaccttcaagccggtcaaattcaggtaaattacactatggtcaaaatctattcatttatttgtttggttactcattcactccactctctaaaagactattcaggaccatatgggaaacagaagaaactataaaagtgaacacctgccttacaggaatttataataatattygagagtcaagttacatgtatttgaaatatgaagtaacagtgtgctcaccagtcatagagtgttctgaacaaaaggcctaatatatctgatggggagaagtgacagttcagaagaaggaaggggacatatgtgagagcaaagtccctgaggagctcggagtgacttacagccagggtacaagcagagaggctggtctcaggtcaagtagggatacttttttcactgtaacaaaagggatggcagagtataggatactgaagccgcttagctacctgatctgtggctaattacttaacctcttctaaacttcactcatcaaatcataattgctcctcctctcatagggctcttcaagaatgaaagaattcatgggacatgcttaggacagagctgctgcagatcttttttttttggagacagagtctgtcaccccggctggagtgcagtagtgtgatcttggctcactacaacctccgcctttcaggttcaagcgattcttctgcctcagcctcccaagcagcagggattacaggcatgcaccaccatgcccggctaatttttgtattttcagtagagatggggtttcgccatgttggccaggctggtctcgaactcctgacctcaggtgatccgtccgcctcagcctcccaacgtgctaggattacaggcgtgagccaccgcacccagccacagatcttattttccacctgaattgctccaaggagacaaccaccttctctgctccaaaccaagtcccttttttccttgatcatccctgcaacagccgcttttctcttgcttgctataattttcctagtactctcttactgccagcgaggagctcctattattatttgtaaagcttgtgggaagaggaccatctcctaaatgctttggactggtctcgtacttgttttctgtgtgttactttgagatacagattcatgacggcgctcagattttattttactttttaatgtttcatgacacccattctaatgttgatcatttcttctcagccacagaacagcctggttcactgcacagttcccagggacttgggatgggtcctgtggaggagtcctggtttgctccttccctggagcacccacaagaagagaatgagcccagcctgcagagtaaactccaagacgaagccaactaccatctttatggcagccgcatggacaggcagacgaaacagcagcccagacagaatgtggcttacaacagagaggaggaaaggagacgcagggtctcccatgacccttttgcacagcaaagaccttacgagaattttcagaatacagagggaaaaggcactgyttattccagtgcagccagtcatggtaatgcagtgcaccagccctcagggctcaccagccaacctcaagtactgtatcagaacaatggattatatagctcacatggctttggaacaagaccactggatccaggaacagcaggtcccagagtttggtacaggccaattccaagtcatatgcctagtctgcataatatcccagtgcctgagaccaactatctaggaaatacacccaccatgccattcagctccttgccaccaacaggtaaatgggtcttcgatagtcacaakcttgtctttttttatttttcagaaaatacagcaaccaagcagctctattatagattgtgggttataatggggacagagggcatcatcagctgccagaygcaaattgcccctgtggaatggaccctgccaaaccacttggtctgggagtatttcatctggggctaggattcatcacagatgcccgcaagcatcgggttacaggtccttgtgactggcaggcatctttgactctaacctggagtgcatagtagtcctatttcacccaatctctgataaatgggaagttatctgcttatttgcttttaccttgcttgctactttttgaaggtaagaaatcagtcttggatatttttgtttctgaccttatatagctcaaagactaccattagtgatgaaaaattttcttttaactcccatatctctatcaggtgaagtaaaaggtaggtgatagtagttactggcagtctagaatggaagtgagttaatgtaatatccagcatttttatcaaataatactcaccaacatcaccttaactacctgaacagcatctaccaatgatacccacaggtgtcctggagatcttgaaatcatctcaggtagaggaagctttcagaaccacagagcttagttacattttctttcaaaaggccaaattctccaaaaacgtcctatgcaaacatcctcgatttcttccataggttttatgataagatctgtagaatgcaaaatattggattagacattaagcagtatccaagtcatgtataatcctatgagcagaatgtccttttgtttccttcatgttggggataaaattttttattagtattgccatatcattttattcattcatgattaagtcaataaaaatttcagctggggccatggttggccaggtgtggtggcttatgcctgtaatctcagcactttgggaggctgaggtgagtggatcacttgaggccaggagttcgagaccagcctggctaacatggtaaaaccctgtctctactaaataatacaaaaattagccaggcgtggtggcgcatgcctttagccccagctactagggaggctgaggcaggagaatcacttgaaccctggagacagacgttgcagtgagctgagatcatgccactgcactccagcctgggcaacagagtgagattgtgtctcgaaaaaaaaaaaaaaattccactggctgggcacagtggctcacgcctgtaattccagcactttgggaggccgaggtgggaagatcacgaggtcaggagattgagaccatcctggctaacacggtgaaaccccgtctctactaaaaatacaaaaaaaaaaaaaaaaaagctgggcatagtggcgtgcgcctgtaatcccagctacttgggagggtgaggcaggagaatcacttgaacccgggaggcagaggttgcagtaagccgagattgcaccactgcactccagcctgggtgacagagcgagactgtcgcaaaaaaaaaaaaaaaaaaaaaaaaattccaaaactcttcccactttgtgacgtgcagttctccaggcactggagctataactgaacaaacagcctgagtcccttccctcacacagtttaaatcctagtggacagaaggcagaccctaaaccaatatttaatgtgtcattttttatcttttttctacatgagcaacccaaatacacccgtttagtgccagaaatctctttgtgttttcacctcgttctggttcctggttctgccagtgacagatgtacagggatgcagcttcttcagggttctgagatgctttcagtgggaaaggggcgcttggatctacaatagataatagaattttctgtgtttctgctcccaaagatgatcctgccaggtactaagctagtaaatgaacacgctgagtttctccttgcaaatttaaataagtcttctgcttgcttttatcatcaaaaagtcctaactctataccaaaatgtgagttttctaatttgccataccatagaagaagggtgtgtatgcagtaagtacaaaaggaaaataaatgtcttcctttcagtgaaagagctcttagacccactgctttttattcactgtgctgcttgaagtgaggttagaaaaggaaagctcactgggctaagagtcaggagacccaggtctagtcctgcttgtgccggtcactatatgggtgactttgggaaagtcatttgcctctccagagttcattctcctcaattataaatgaaaatgttacaactgaaaatctatatattatcagctctagtatgtttctagtattgcattcgtttctccacttcgtaactttcatggtttttccagtggtcagatttgggcagaaagcactgattcargaacacagatttccaagtagagaggtgcagggtaaataaacctccatgtaagcccgcggtgagcgcagactgtgagtgacgaacacggtgtcagtgtaagctggaggtggtgggccaggaggattaaacagggtaaggcagcttaccactgtgcctggcgatgcgcagagtaagtgctcagtaaacggtagctgctgttattagcactgttattatcattgtcarcaaagaacacctagacagccttgagcactggaaggcacctcagagactgtcacaggggttccttgctaggattccaaggaccccagtttcagcagcttcacgaacaccctgaattgcacacagatggcrtgtgtgtgcacatcctatatttcttacacctttcagtagagagggtccctagtttccttggcttcctcagagaaaatgtaacaaatgagcacrgtgcctggtccagagggtggcctaccttagggccaggtgtgctgacggaggtaccttgagctgatactcatttccctccctcctcagaactgtcttctcaaccaccttctctctcctacaaagatatgccaagtgctctttagggacagtaccaacacttgacaaattcagctcagcatgaatgtcattgagcccatgccccgtaccaaggcccaggctagcgagtgtaaggartacaaaaacaagtgggtgtggtcgctgcccttgggactcacattctagtggagaagtcaaacagacccagctcagatacagagcggcgcagggcagagtgctgagtctaggattacagtgcaggctcatggaaggaggtggaatttgtgctgggcctatgtcagaaactcacaagcagggagaagcacgtggggaggtcagcagtccaggcagaggcaggagcatcatgtcagcagatcggtgggaaatctggtgggactggagtctctggagtggagacagggaggaaacagtgaaaggaagatcagagacaagagggtagggcagagctgtggctagcttctgaatactgaacctgagaggtttgagtttatcaggtaaaggaggaggacccttcacagatgctgttcagagtcgtgggatcccgctgggaagtgtggctgagctttgctgtgttgttcatccacttctgttttctgacttggtgttagccacatttttttatggtaaaattcaaaaacataaaatttaccatttcaaccatttttacagtggcattatctaacattcacagtgttatgcaaccatcaccaccatctatctatataactgttttaatcttgcaaaactaaaactctgtatccattaaacaccaactccccagctcccctcccagccccggacaaccaccattctactctctgtttctgtgactctgaccagtctaggtayctcatgtgagtggaaccrtgcagcatttttctttgtggctggcttcattcacttaggaaatgtcctcaagcttcatgcatgttgtagcatgtgatgtgattcccttccttttcaaggctgactattccattgtgtagctagaccacagttgggttatccactcatctgctcatgggtgcctggcttacttccaccttttrgctattgtgaataatgctgcrrtgaacacgtgggtagaaatatttcttcaacaccctgttttagttcttttgggtatatactcagaaacrgaattgctggatcatatggtaattctatctttaatttttttgaagaatcacgatttttttttttttttttttgagacagactctcactctatcaccaggctggagtgcagtggcacgatcttggctcactctgcaagctccgcctcctgggttcaagtgattctcctgcctcagcctcctgagtagctgggattacaggcacccaccaccacgcctggctaatttttgtatttttagtagagaaggggtttyaccatgttggccaggctggtcttgaactcctgacctcaggtgatcacctgcatcagcctcccaaagtgctgggattacaggtgtgagccaccgcacctggcccactatactctttataggagcagctgcaccatttcacattcccaccagcagtgcacaagggcttcattttttccacatctttgtcaatatgtgttatttctttttttttttttaatcrtaggcatcctaatgggtatgaggtggtttagccagatttgaaagaagaaaagtttaaagggtggcataggataattaacttaatgtttggcataaagccctgcttttttgccatgctgtatttttttctcttgcttttgatctagaattacttacctgtgtgtttctctctatgcagatgaatctataaaatataccatatacaatagtactggcattcagattggagcctacaattatatggagattggtgggacgagttcatcactactagacagcacaaatacgaacttcaaagaagagccagcygctaagtaccaagctatctttggtaagataccctggaaggactcaacgcctagcaaccttgaactttcttacttgtgagaaggacatagtggaatcttaaaatttctctgataattcttcttgaaagttttcttatgttacttctgcaaaatatctttgtaatttccatataattcctttgtcatttatttatttttaatatggagataatcacagtatttaatttatggatttgttgtgaaaattaaatgagttgatatgtataaaaagcttagaacactgcctggcacatagtaagttctataaaaagtgttaaactttcatcatcatcatcatcagtattacttctcagacccagaagaaatagctgtgtcaggccctcatcgaaggagatcctgtaaaagatagaagactgtgccctccacagcacttctgtaataaaatcaagagggctatctcttatagggttctatggtgcagcccataatgctaatcccaaagtacagtctggaaaaagtcatgaggccaaaacgacttgattaagaactcagctttctaattaaccatgggattggcgctttttttttttttttctgtaaaggaaccaatagtaaatgttaggccctgctggctttgaggtctcttggaactactcacctctcttattgtagtgcaaaagcaaccacagacaatatgtacatgaatgagcacggctgtgttccaataaaagtggatttacaaatgctggcaggagtcagatttggcccacaggccatagttggccaaccyctggtctaacccatttgaaggacagcttttaaaatacctagaacagaacttgcgaatggtcaggggcacctgtgagaatctaatgaaacccaggatctaccccctacagaaatattgacaaaatttggaaaatatcttgggaagttcttggactgctgacaatctataagatatggatagagagagagccacatcacagagggctgaggaaagaagagaggtgggaaggaagaatgaaatgttttcttccttatattctgtttaatgaggtagtgtggggattaaggaattttttttgytgtggttgttgtacattttcatttgtttccttttattatttttatgaagggcgaagggaaggaaccagtagaaggagagaggttatggctattggagaagaggcaatgtcggtcggcagtggggtggagtaaaggaggggwtagggtccaaaaacagrccttgaagagtatagttacctcgtcgcttgaaagacaaggaaggctttgtaactgaatgggttcacgcctgctggacaattccttgattaagtaagaggaaagtgaactgttgggcyggggtggtggtcaggagttgagcggctttaactctggccagatgtaagcggagaatgtctaaaaggaacaaaaatggtggttttccctttacacccaggaaggtctaataccaacaggatcactggctaagattgactagaacacccaacctcgtagccacacaggggttttgttcacagagccatcagctgtggctcagggatgtgtctactaggaggaaggaatgccttattcttttttgttttgtttttgagacaacatcctgctctgtggcccaggctgaagtacaggggcacagtcatggctcactgcagcctcgaactcctgagttcaagtgatcctcctgtctcagcctcctcagtaactgggactacaggcatgtgccaccatacccagctaattaaaaaaaattttttttttggtagagacaggttcttgctgtgttgcccaggactggtctagaactcccgggttcaagtgatcctcctgccttggcctcccaaagtgttgggattataggcatgagccaccacgccaggccgggaatgccctattctaattcacataaagactccatgtgggctagcaggcatgtgaaatgtctgccagtgcatcaacagctatataactaagaagttatctttttcactgtcttctggtactcttcatttcacttgggttttttagcaattcaggaagctggaatgtttgaatgggttttagcttgataccttcttctttttcccatttggcagataataccactagtctgacggataaacacctggacccaatcagggaaaatctgggaaagcactggaaaaactgtgcccgtaaactgggcttcacacagtctcagattgatgaaattgaccatgactatgagcgagatggactgaaagaaaaggtttaccagatgctccaaaagtgggtgatgagggaaggcataaagggagccacggtggggaagctggcccaggcgctccaccagtgttccaggatcgaccttctgagcagcttgatttacgtcagccagaactaaccctggatgggctacggcagctgaagtggacgcctcacttagtggataaccccagaaagttggctgcctcagagcattcagaattctgtcctcactgataggggtwctgtgtctgcagaaattttgtttcctgtacttcatagctggagaatggggaaagaaatctgcagcaaaggggtctcactctgttgccaggctggtctcaaacttctggactcaagtgatcctcccgcctcggccttccaaagtgctgggatatcaggcactgagccactgcgcccagccaacaatccgctctgaggaaagcgtaagcaggaagacctcttaatggcatagcaccaataaaaaaatgactcctagttgtgtttggaaagggagagaagagatgtctgaggaaggtcatgttctttcagcttatggcatttcctagagttttgttgaagcaagaagaaaaactcagagaatataaaatcaacttttaaaattgtgtgctctcttcttcacgtaggctcctgttaaaaacaaagtgcagtcagwttctaagccctgttcagagacttcgtggatcacagctgcagctcaccgccacatcacaggatccgttaacgttaatacccaatactctgtcagccactgtaggctctaagaaccacgtgcagtcttcagcccattaaattatcgattattttttaatgaattgaatttatattgagtcttcaaattaactgaatggatttaaaggggtaccaaggaggggggaaacatcagaatttcccaggcagttgttgcaaggaattggtactaaccgtgactacaacaaaaattcttgattgacttttaaagttatttcctggcattctggtaccttcacccagcctgagtgccctggagagggaacaggaaatgctgatctctacccctgggtgagaccagaacctcagggctgatactgttgagtggcttcctcggtttactctgtgtactgtgaaagtattttcatattttttctgtgtgccagagtgaaaaaggacagcttctgagtgtggtaattgtgcctctagcacccagcctttcaaagcccacctgaaacctgggggtggatgaaagaactagaatagaagactgaagctgggtaggccgctcagtgtccactggcattttgctaaaccgacaaggaaggctgtgtgcttagctctccccagagggagggcgagaagggtgtggtgatggtcaatctggctgtcggaacagattctggtgtcttgggctgataacagtgttgttgattctgattgtgaatcccctcaactctagcagacacatacacacccctgaaatggggctgcagagcaggctgtctcagccttgccactgtcggcatctcggsctgggtaattctgttgtggggactgtcctgttccttgtaggatgtttagtagcatccctgcccccacctactagatgccaggggcactgttctccccagccccccgccccagttgtgacaatagtctctaaacattgtcaaatggtccaaggaaaggggaaaattgccccggttgagaagagcactgctgtaaagtaatgagcctcggctctcctgtctgcacctgtccggttactacttggccaccacgcagccttggctcctacagcccaaaagggagaatggagggaggctccaggctttgctggaggggcctgggtgagttctgtttgctccttgtaccaccatccaaatggtgttatcaaatctcttagattccaaagaggttgaataattaatgttcaaaggcaagagggcaaggcattttttaacactttttaaaataaaaatttataccacaactttaggctattgatgtgatgtgtcactgggacagatgcggattctccatggtgcctctgccactgaggccgcatttcctgagcataatccccttttaccctcccgctgccaagcaggagacgggatgctgatggtaagaacacctccctgccagtgcattttggcgctcaggatgagaggcctgcagcactgctgtccccgcgcctggctctggggccttcccttcacccccactctctcagcaccatggtgagaagaaccaagtttgcctgtgaggagttaggtacaaggcccaagctccacaagaacactgctgttaatgggcagagccaatgacgacacagaccagcaaagcagaaccgagactgtccgcacttggttcggaaacaaatactcacaccctaggttattgctggtaacggagacctccttccagctcccacagtcctgcttggtagattttctacttgttgctacaatcatcatctttgctttgggtctgtcacgtgaggttagggtttcaggaataaaatgtttaataaatcacaaaatattttaggcagtattttgatgtacattttaatgtgtggtatttatgaaagggaaagggttttctaattataataaaggcataaatagtgtaaatattcaagattttagaagcagctgatttcagagaaatcactgaaaggttaatgctactacagtgatttttacaatatgcaataatccaagtatacgaccaggtatagtggctcatgcctgtaatcccagcactttgggaggccaagctgggaggatcgcttgaggccatgagttcgagaccagtgtggacaacacagcaagaccctatctccacaaaaacattaaaaaatattagccaggtgtggtggtgtatgcctgtagtcctagcttcttggcaggctaaggtgggaggatcacttgagcccaggagtttgaggctgtggggagctgtgatcacaccgtgcctcaataataatagcaatcatcatcatcatcatcaagtatagagtcctgaaattgagagctcaaaactcccccctgccccttctcagctgtgttacccaggccttgcttcctaacctttcgccgtcattatgcaagtatagagtcctgaaattgagcagctcaaaattacttttcagctgtgttacctagggcttgcttcctaacctttcttagcctcagttgcctcatctataaatggagagtgcaatagcacagaaggctaatgtgaagattaaagaaatatgatatatcataaggtgcctggcacaaaaatggcagtttttttaaactgtacgatcttgctatatataaagaactggttgtcaggtatgttacttaaaaatagtgacaccacgctggacgcggtggcacacacctgtaatcctagcactttaggaggctgaggcgggtggatcacctgaggtcaggagtttgagaccagcctggccaacatggcaaaacctcgtctctactaaaattacaaaaattagccgggcatggtggcgggtgcttgtaatctcagctactcaggaggctgaggcaggagaattgcttgaacctgcgaggcagaggttacagtgagctgagattgcgccattgcactccagcctgggcaacaagaccaaaactccgtctcaaaaaaaaaaaattgtgacaccaataacctaaaactcagtgctaccgttttttattagcacaagggtaactggtgttgaaactgtacagacagctatttttatcatttctgagatgaaaccccaatcaacatatcaggaaaaaaggaaatactgacctcaccaaagatttctgaaagtcaaacgatattaaactcaaacattatatatgtctctttccttttatgcaggaattaatgtgatagatttatgttgagagtagaatatgaaaacttttgcatagtctgtatttaggccaaaactgcctttactactcaagaaagtccaatgggccagtgaggacactgcaggtgacagaaatttctatgagtgtaacacctacaagcactgtgctcacaggactgactgttacaccaaaaaggtctcttggaggagaagaaatgcaatatgcaaagaagctgttgtctccaattattcaagccaaggctacaacagtagccacaaatctgccagttatttccaattaaggcagaacgattgacttaaaaagcaatagttgttttttttctccactgagctttcaattagataatgtctataacctttataaagctgcaattatacagccaaaagaaaaaaaattaattgtggtaaaacatacataaaacttaccacttaaaccacttttaggtgtgtagttcagtggcagtaagtacactcacaatgtaatgcaggcatcaccaaaatccatccccaggactttttcatctctccaaactgaaactctgtccccatgaaacaccaactttccattcccccttccaccagccctcaacaacccccattctattttctgtccctataagtttgactcctctaggtaccttattatataagtggaatcacacagtatttgtctttttttgactggcttacctccctcagcatagtgtcctccaggttcatccatgtagtagcaagtgtcagaatttcgttctttgttcaggctaaaaaatgttcccttgcatgcacagacaacattttgcttatccatgtatctgtttttggacacttaaattgcctccacccttttggctattgtgaatagtgccgctgtcaacgtgagtgtaaaaacatttcttcttgtacaccctgttttaaattcttttgggttatatacccagaaaagaaaatgctggatcatataactgatttgttgaggaaccgcagtattgttcatcacatggctgcaccattttacattcccaacagcaatatacaagggcttcaatttctctacatcttcaccaacactaatttctgggggttttgctagtagccatcctaatgggcgtgaagtggtataaacaaaatttagatcccatcatctccgaaaagcaaatacacttcctagtactagtcagtactaaataggtgcacagcgtttagaactttacttgatccaacatagcagcctgcctagagccggagccccgcccactccggagtcccgcctggacgccgacgcagcgagggcgctatggctggcggcctcgcctcctggaaaggccatggtcgctgaggcgacgagcgagggcggggcagcgccgacggggacactcatcccgggagccagagccagcaccgagaggggacggtctacgcgggtgccggcggttccaggactgcgaaaccacgagccgagtttcggtcgcccatgggaaagcacccggcagggcgtggcttcggggcggggcgggcagagggcggagcaggatggagaggcgaggtgggcggagcagagggcgtggcttcggggcagagtgggccgggtaccgcgcttggtcttagcgcatgcgcgctcccggcagctacgcgacctgtgaccatggtggctgtgctgggcggccggggcgtgttgcgcctgcggctgcttctctcagcgctgaagcccgggatccacgtcccacgggccggacccgcggccgcgttcgggtaatggcggccacctcgccccggggatccccagcatcggcgcgctcgaggggcggcgggaggggcgcgtgccgacagcaggagttcccggcgcgcgggcacggggcgtgggcgcggcctggctgccctgtcgccctttgtgccgcgagaccccgatcctgggggccagccgcgcttggtgctcgagcccctcgatcgtgcatgcgcctcggtcagcctcagttcaaggagtctggagccgtggaggcttgggctatagagtgcagccccttcagtgtgcagaccagagagacccagggagatacatttgcctgtagtatggactcacccgtgacggagcacggactagaatcccaacgccctcattagtccattgctctgtccagagtccacactaagggcataaggacaataatctcttctttctcttatgtcagaaatcagcctgagcctgagtaccgctaaggctttaatcacgggtcccgagagccctaagtcttctctttgcttgctgatctcgtaccttaatgtgcaaaagaatcacgttgggaactgaaaattcagaatcctgggcctcactcccagaggatctgatctacatgtgtggagatgcccaggaatctgctttattctcttttgtcctcccacctgtccccccatttcaggtaaaacaataacaaaaaaactggattaatttctgaccttctgtcttgaaaatggatactcttggtcccaagagatactgggcagaaatgtggatagagcggcatgaagcttgttttactttattctctacatacatccctacacacatgcaaacacacgtatacaacgaacgtacacagtgcatgtgcgcagttgactgttgatgggctactttcataaagtcagtactagataggtacacagcgtttagaactgtacttgatccaacatagaaacttttagtttgaaaacttgatttagaaggagaaaagagggcaaatctgaccagcttttaaaatttcatattgcaattgactagctcctttaattttagaattattataagatggtcagggctattttgatagatggaaaaacatgttaatggctacagctgtataaattaacagtgaaaatgattattttttccagtttcctgtctgcagaaaggcatcgaaataagttactgtgattgtaccaatatagttctttttttttttgagactgactctcgctcttttgcccatgctggagtgcagtgttgtgatctcgctcactgcaacctctgcctcccaggtttaagcgattctcgtggcctcagcctcccgagtagctgggattacaggtacctgccaccatgcccggctaatttttgtgtttttagtagagatggggtttcaccatgttggccaagctgatctcgaactcttgacctcaaatgatccacctgcctcagcctcccaaagtgctgggattacaggcgtgagccaccgctctcggcctaccagtatagttctgataggttatttaatggttgaggaaggccccatccatctagttgcattgcagatcattcttcctaaaatatctctgaagaaacaggtttttctggattttgtacggccgttttataaatgcagctgcaagttgatatgacatataatctgggaaaacaagcagtggtattagttaatcctgaaatgcagctgtagctcagtgtcagtaggtaaaaggattcgtgtaaaaactttgcttcagaatagccagtgcccaacctacaactgacttttgttccaaaaacttgtttgtaagtctgctgtttggaactttgacccttatttcaaaatccgtaaggtgatttattcctgggtcaggtcaagaaaagccttttctacctgaaattggatattatgtgcagttataaatattaataattcacataacctaacaatcttcctaaaaaatattttccaagttcaaccttgggatgccctgccagagaatcagagactgtccttctgctgacgcttgccaccacgctgtatctggcagtcagagtgtggccccggtgcctgagccctcttaggactctgttcagccatgaggttagagaggaatcatggcctctggagttctaatggccccgtggccacttcctagctctgtgagtgtgggcagattgttcaacctctctgagcctcctgccttgcagcgtttttgtgaggatttgaaacaataaatgtaaaagcctggggatataataaacatgaagtaattagtaggcacaatgggaatatttatataatagtacaatatataagagatgtaaaaataattcatcaagattcatgcaaat

SEQ ID NO: 97737 - DNA, 15888 bp, Homo sapiens
  misc_feature (1)...(15888): n = A,T,C or G
agatgttccctattgttatttttgtacgacagggctgttaggcggagacggaggttgcagtgagcccaaattgcgccaccgcactccagcctgggtgacagaccaagactccatctcaaaaaaaaaaaaaaaaaaaagtacttcgatattctcttatagctacaaaaaacaaaaggcacgtcctattttgagcgcatctcccgcctagtatttcatgaatttgtggggttggttggtgctcccgctgcaaaggccgtccgatcttgagacagaggctcaggccttgccggcgacgggcagggacgggcggtggcggcctccagggggaacccgggtcttggggcggggcggggcggggcggggcgggcagggcctccggggggcacagccccgccctccccctgcgccgcggcccctggaccccggtgcctctcccgcccgcaggaggccccgccccgccgcgccgcgctctcaccgcggggagggggcgaagctcagcctttcccgaactaccgtttgcctagagcgtgaaacggagcgggtcgcgcgccccggcgctccggacggaaggagaaggcagcgtggcggccccaccccgagtccctggcagcccagacctggcgaagggtgaagaagcctggctccagaactaggtggtcagggggtcaggtagtaggaagccacggagccggctctcccgggtgcctcgcgcctcccggcgccgcccagcgccctctgccctggacctgcagactcgacgtctgggtgggggcaagagtgttccgatggcgcctcggctcgcgcttagcgatcctgcgctcgctcactctgcagcgccagcctcgggattaggggagaggagtgtagtgcggagctgtatgcagaagagcgtgcggccagcggagaccgcagtctcgccgcatgggagcctcgcaagtggctctggagttgagtcctgattccagaagagctccagggagggaggggaaggagggagaaaaaaagggagggagggagggagtggggggaggacgggattaacccgttataatagctaatatttatataacactgtggggcaggtggtattgtgagtgctttcacatattcattcagtctttatcacaaccccaggaagcgggtactattattactgtcactttacagatgaggcaactaaggcagagagaggttaagtaacttgccgaggtcacacagctaagaagtgacagtgaggatttgcacccagtccatcaactctaggccctgtgcttttcaacagtcagggaacgcggcaggagggcactgagtcctctaaacggccttagtcatgggaagcagagatgagtttgctctgtagataattcggtatgctctggacacctcagattatggggagaatgacagttgggagtaggttacatatttttgagaatttgtgagattatgtctaagtcatagcagaagaagatatagtatttcttcactcttaatgttgaaggcaaaaaaaaaaaagttataaaggaacaaaaacacctaaacagcccatgaataggaaaaacacaaaggaatataatacatcaagcatttaaaaaaatctcgagaacaggggatacacttgtgctctttagtactttctaagtgtttctaattttataatcaggaaatatgtatataagatatatgtatatataattgctgtgtacattgtatgtatttaaaaaaaacttggggggttatagcttaatgagaatttgacatcaagaataacatctttgagaccagcctggccaacatggtgaaacgctgcctctactaaaaatacaaaaattaatcaggcatggtggtgcacgcctgtaatcccaggtactcggcaggctaaagcgagaggatcgcttgagcctgggaggcagaggttgcaatgagcgaagatcatgccactgcactccagcctagtcgagactccatttcaaaaaaaaacaaaaaatgacatcttcagttttgaaaggccccagatcgacacttgtaatatgaatgtcacattctggggcatggcccattccagaaagtggctaaaaatcttctatatatttactctgtattattatagtcatctgatgcaaaaaaaaaaaaaaattgtaaactttggtggggttgatattttaaaattaaatttaattggagttcagacttttattttaggtaaccttttgaaaaggttacatccccttaaatgctttgaacaaaattcttccatcttcataaagagatgcttttatttaaaaaatagcagacaggggctgcactggatgagtttcatgggaaagagaagttggagcggagagtgtggctagttctctgagggcacaaacaggatgcaagactgtaccatacaaatttagacaattgtattgctgggatggtccttgggttttcatcattctgcagaggaaactagtgtttttgaagttccaggactctcttacttggaccaactaaatctatttcaactagatcacgactgtcacccttagagatggcatcagtgaacagtaacgatatcatcataacaccacatattcacagggtacgtttcactagaacattctcaccaggacccttctcgttgggccctctgaagcagcaggcgggaagggcaggcaaaagggtaagagcttatgtccttttgtgaaagacagatgtggctcagcctcctacctggaacacattctctagtctgaattttgtcattacacctgcccttccccgccccccgcccctcaccccgccaatgatgccttcagggtaggggtggctcagacactgcgagtggcatcctgtctaaagcaggaagtgacttgaggctggaggaggttggtcctcttccccttccccatccccggcccacccaacagccggtggagctgctcctctttagacactgaaaaatacatgaaaggggagagattgctccttaaaaacctattctagggaaggggacaattagcaggctctatttcctcctgttattatctgcatcggtgctgtacaaggtcgagttgcttagtgacagcgaggtggggttggggatatctacacttgccgcgagggaggggagagcaggaactcacggcctcagatgagtcaccttaggcagggcaggcattatttaaaactccgcgtgtgagtttctctgattatatactaacacacatcacgggcggcaccgagggaggagcgcgtcagagagaagtaggctgggcgtgaactgccaggcaggagaaggccgacttgggcagaacattcactgccagcgatccagagcagacaatcaggtacctggcctgcgcccgtgaacactgccatggatttattttctgtgcgctcactaatgtccagttcacgcacagtgcctcccagctccccaacgtaagaaaaacccatttccagagaagctcagagaggtgcagtgacttgctggaggactgagctaggaacagcagagtgggcacatgctccacaggccgggaaacgcccagctgctaggggtccccgtgtccctagtgctgtccctttcaggtctcatcctctgctcctatttggcctcagatttcacgctgaattaaaacacaaaggccaagaagcaattatctctggaaaaatcttttcagaactgtgtaatgagtgaaggtaccccaaggagagccattctctggagaggatctggaaggctccggctgtggtgaagagccaagatgtgagagttggggtgggggtggggagaaggtggaggtcaagccctgggtacctgggagtagcatccgagggacaggttgtccactgggggcccagcagcagggagaggggagagaggaggagaaattctaggaaatctgtccccaccctgagaagaggcactaggcacctgcctacctacatctgggaggatgctgggcgcttcctaaagctggggtgattaagacctaacttggcctaagaggctactcacagacatctggctttagtttccacctccgatacagaccaactattgaggtggcaggtagggtgcacattaggaatgacagcatcatcttgggttttttgttgttgttttttattgagacgcagtctggctctgtcgcctgggctggagtgcagtggcgccatctcggctcactgcaagctccgcctcccgggttcacgccattctcctgcctcagcctcccgagtagctgggactatagatgcctgccaccaggctcggctaatttttttgtatttttagtagagacggggtttcaccgtgttagccaggatggtctcgatctcctgacctcgtgatccacccgcctaagcctcccaaagtgctgggattacaggcgtgagccaccgcgcccagcccatcaccttgggttttaccaaggcatttttactccataaactcaatgtgctttcatatatggcttctcatctcctaccacaaagccagctccaaggcacctgtaattatcatcattatatagttggaatgtgctgggaaccaaaggcagtccccaagcccctgttacctagtccaccgtgcagggccatctttgtgaataattaagtcaggtccttaccacagcccacccaagcctttaaaactcacctgggctttttatttatacaaaggctttagattccttcccttcctagctttgtggctggtcaggtctttcaacctcgctttcggagctatgaaattggggtagtaataatgcttaccagaagccggtggtagtcaacaaaaatatgcgtaagtgagcagcaaatggaaaccaagtatgtaattttacattttctaatttcaaaacaagtcatttaacacaatgtatccaaaacactattattttgatagaccatcaatatttaagaatcagtaatgaaatatttcacattattttaacttactgagcccataaaagccagtgtgttcttcacacttaacagcccatctcagttcagattacctacgtttcaatgctcggcagccaccgtgcctagggtctaccgaactggccagcctagctccgacagcttctgtgaggatcaggcgacctaaggggtgtaaggggcagggccatcagctgacacatcaacgtggcagatatattcctcctgtctttcctctctgacacacacacacacacacacacacacacacacacacccgcagaattttccacatttaaaaggcctttacaaggacgcaggagcccaaagcggacatgtgacaaatccagccctttgatagcccccccaacccccgcccccgaccaagccatcttcctcccctgcaggggcgaaaggccgcccaccccgccatcctggcattcctttcaggcagctgcccgtcggctccccgcggccccccactcctctccacgctgcccaccccacccccacaaacggcgtccaggaccctgcccaggatgcgggaaacctttgccacccgctggagagcccactgcaaatgggtcttcaatttccggccccctactccaaagggtactcgacgcctcttcccgtccttaggaggcgaggaccctgttccgaggcagcccctccccctggttccggggcccccggtccccagcccccctcgggggtccagagtgggcggctcggggtggggatcgcggcgtgagcggaggacccagcgccaggggtcgcccgtgcccgtggatcgggcagggggctgcggctgggcccgaggcccgggcaccgcactcaccgccggaccgcgaggccggccgcccaccctagacccagcggcagcagcaatagggcgagcgcccccacacctcgcaccgcgccccggctccccctcgcggtgccgcagtcccagccgcaccgcccccgcggccacagccccgcccgtcatgacgtcaccgggcagggcgggtccccggatataaaagactgagctgggggggcggcggcaggtctctgcgcagcccagcccgccggtccacgccgcgcaccgctccgagggccagcgccacccgctccgcagccggcaccatgcgcgagatcgtgcacatccaggcgggccagtgcggcaaccagatcggcgccaaggtgggctcaccgccacggaggggcccggggttgggaccgagggtgcgggctggggccggggcgggggctggaggccgcggcggccccgggctggccgggtggcacattccgcggcgaggccgccgggcggggtccgggaggctgcatgacccgccaggatgcccgcagcgccgcagctgtgtgtgcgtttaatcggggscctttcgatttccctgggacacagcccttctgcgggacgcggytggcattcccctgggtgtatttgtctcagaaacttgggtcggggstacggtcatatttattgcgctagcttcatgtgaatttaatttgtatatttttctctacggtttgaatgaaaacatgcagtgtcactggactggcagatgtaacagaggcgtccctttgggtcgtacaggcaagggtgttagataaattcccttgctcgggcactgtcttgacatgatgacatacaacgcgatagtcttgctgccagtccccgaggcggcaggtgactgcgctgggtgggggctgcaattaccgaccgctgtgtgggaggcagcagcgggtctggtgcatgggtgggggcgggcgccagtacaaggacgtggtctctttgagaaccgccatgttgcccacccagcctccccgccgcaaattcacaatgcagccagcgccctcacgatggccagctccttccactgccgcccaggtgccctcccaggctcctgctgcccttcgcccagtccctccggtggtcagtgccagcatgtagatcggtggcttaaacctgcactgttgcaggagtgcctgggatctgtgccaagagagcttgatccctggaggcagccacagagtgggtccccctgtccttggtcctgccacgacccatcaatcatcccggatgcaatggcattcagccctgcctggggtgacacagcctccctgtaccccttctccacttctctactctccccaccctctccctagaagggcatctgctgnnnnnnnnnnnnnnnnnnnntgtcccctcctcctccagggcccctcccagcctttcagtctatccccataatatggccgatgctctgcggattttcaagcccctcagcagcggctgctgcaggaaataggaggtgcagctctttgctctctgtctagcacttactaactgtctgaccacaaaagcccctgttccaaggacatgggaggaggacaaggccatccttagtgacattcaggatgcagagccatggtgtggttcttttttcatttcagttttgggaggtcatcagcgatgagcatgggatcgaccccacaggcagttaccatggagacagtgayttgcagctggagagaatcaacgtgtactacaatgaggctgctggtgagtagcgggatgtgtgtgcccaggaatccttgctttccatgatgtgggagatgaaacgtcccaggaacatgcacgtgacaaaggcatgcttcttgcatattcatttcaaatgccaactgctggaaaaacatgttttatggtttcctaagattcctgcctgtttgccacggctaagcacactcaggacctcctttttcttaaaagcagaaaatctcctgttctccttttgtctcagatgctggaattgaatgctgctgtgagtccctccccaagcacasgcctgagtyagttcttatttcctgcaggtaacaaatatgtacctcgggcsatcctggtggatctggagccwggcacsatggaytckgtyaggtctggacccttcggccagatcttcagaccagacaacttcgtgttcggtatgtagtcatgatcactgggaactggccaaatgacacaccttcttcctaacagccctgcaaagcacagttcttagtgttcagtgccaaggtgacactgtgtccacggcagccctgagtcctggcctagctccatgcagtccatgggtggtcatggctcacagatcaacgccagcctgcagagggctgctgcagccctcccattgcagagcagcctcagactggaaggaagaaagagcaaggaaaagcttcaagccaggcttcataggctataggcaacttgaaaggacttcaaagagccaggggccaaaagcacaggttatgaccagagctagacagatgctgaggccaccttctctgctggtcacactgccttcaccttgcctgtttaattgtagttgagtataaagagaatgcctcttaaaaatgtatgtatttcagaaccaattaagttttctaaccctatcctcttcctcaatcaatagcctcagatgagctaaacttacttcttactttattatgatccccagtgtttttgaggtcactgacatagaaaaatatttcttcaggtaaaagaagagtattcaaaagagaagaatctgccagtctaagaccagtcctaccttctcctccatagtcaaaatgacagattttgaaattccttatgttttagtgtctaatgttcactttccctctggcaggccagagtggagccgggaataactgggccaagggccactacacagagggagccgagctggtcgactcggtcctggaygtggtgagraaggagtcagagagctgtgactgtctccagggcttccagctgacccactctctggggggcggcacggggtccgggatgggcaccctgctcatcagcaagatccgggaagagtacccagaccgcatcatgaacaccttcagcgtcatgccctcacccaaggtgtcagacacggtggtggagccctacaacgccaccctctckgtccaccagctggtggaaaacacagatgaaacctactscattgayaacgaggccctgtatgacatctgcttccgcaccctgaagctgaccacccccacctacggggacctcaaccacctggtgtcggccaccatgagcggggtcaccacctgcctgcgcttcccgggccagctgaacgcagacctgcgcaagctggcggtgaacatggtgcccttccctcgcctgcacttcttcatgcccggcttcgcgcccctgaccagccggggcagccagcagtaccgggcgctcacggtgcccgagctcacccagcagatgttcgactccaagaacatgatggccgcctgcgacccgcgccacggccgctacctgacggtggctgccatcttccggggccgcatgtccatgaaggaggtggacgagcagatgctcaacgtgcagaacaagaacagcagctacttcgtggagtggatccccaacaacgtgaagacggccgtgtgcgacatcccgccccgcggcctgaagatgtcggccaccttcatcggcaacagcacggccatccaggagctgttcaagcgcatctccgagcagttcacggccatgttccggcgcaaggccttcctgcactggtacacgggcgagggcatggacgagatggagttcaccgaggccgagagcaacatgaacgacctggtgtccgagtaccagcagtaccaggacgccacggccgacgaasaaggggagttcgaggaggaggagggygaggacgaggcttaaaaacttctcagatcaatcgtgcatccttagtgaacttctgttgtcctcaagcatggtctttctacttgtaaactatggtgctcagttttgcctctgttagaaattcmcmctgttgatgtaatgatgtggaactcctctaaaaattacagtattgtctgtgaaggtatctatactaataaaaaagcatgtgtagaaaaccttgtggtctgtgttctcacttcaaataatttttattctttctctaaatgcttaagtataaagtgtcaaggtttaacttgctactgtttttattgtggtaatcaaagtttaattttaatagcaatgtaggatttctgctttagtgttttaattaataacattcctgtccttttagtacagagtgatgaaaatacatattttgttcacctttactggcccaaagtattcatctctcaaaagtgaaccaggagagggatatggggtaaagcaaacctgcccctatctgctgctgttctggacatcctctgatcttagaattgaggacctcgggcacggactctccctacttctctttgaatatgatagataaacacaaataaaaacacaagtgaagcttgaacctctcagataaaaggtacagtacaaattcaagatgtcttaaaatctccaacattaacactacacattctccacctaaaatttatttgaaaataaattatggcaggaattcacctgttaagacaatggtataacttgtcacaacttcatcttagaaaatcggatttaattttcatagctattgaagttagaggctttattccttttttatttttttttatgtttttatttttttttaagacaaggtcttactctgttgcccaggttggagtgcagtgatgcaattacagctcactgcagctttgaattgggctcaagtgatcctcccacctcagcttcctgagcacctgggaccacagatgtgtgccacttcgcctggctaattttgaaaaactcttttttgtagagccggagtctccctatattgcacaagctggtcttgaactcctgggctcaggcaattctcccacctcagcctcccaaagtgctgagattatagctgtgagccaccgtgcccagcctgaagctagaggctgttttcaatatgtcattattctcatttggttaggataagattgaagggaggggtagaaagtttcaaaggcggagagtttcaaaggcatcatgttaacaggcagcaacacgatcaagccccacacgaaggaaccaccaagactggagtgtgcattctcattgtaggaagtcttctgctaacttgttgaattcatctgcaaaacgcaaatgcaggttgtgtttgccttctggcatcaaatgcagcctaaaaaaggaattaaaaatactttgggtcaatggcccaccacttaagaacaaacccctcactctccccaacatttcacaaacatctaaagtgaaaaattaacacatttcccccatgaccactatcgaggagaaaaatgtaacccatcaatctcctaagaatatagtcagacacgtgaaactcttggagtttatgactacccttgaggttgactataaggcaatgacttaacagtagcagacacacattatatttggaactgaatcaagtaacaaatggtttgactggaaaacggactgagagtgggggaggtgatctggtggttactctagaaaaatccattttaatgaagctgattttaagagagaaggttggtaagaagataaaaataagaaatgttcagaatgcactgggatggggcaggtgagtttcttggcgtgttgatgtagtgggcaagtgcaaagcagaattcacagccatccccagcctgctgctcaaggttccaaatcacccttccatttttggattactgaacaaatacatctgaatacaagccgccagacaaatggctgtgagggtggtgagcccatgccagcagccctgtgctccaggagccgctgctgcagctgtcacggctcagcattgtagcaaacacactgtcctcgtaaggcttcttcctttcaacaggattgtgatcaaatgggacagatttacagtttcctgaacaaatgcagccttctctttgttctacatttgacttattagctacaaaagtatagaaacagtaaaagtggtaaagcttctaggatgaaagcctaagttcaagccactttgtctacaatgataattagacattaaaaggacaatattagggcagaatgcgttatcatgttccctaattttttgagtttcaatactggggggctgacagctcagaacctcagtaggtgcgagggaggaactgtggggcagggagctgtgcttggaagatgctgggcctcttccaactcagccaccacattgggggtgggaatggggtaccaagagaatcaacttgaaaggaagacatattgttgggacctttccgagggccttggaacattagtaatgctattactaacaatcacgacattctaaattcaactttaacactattcagaaaagaaggatgagttgcacccaccccagagataggatcccagttgcctacacaaggaacagggcttgcagggacactcaaggcctttgttttcaggaaacaggaaagaacgaattgccaaggatgctgcgaggtcatagaaggtcacgtataggctaaattgcatcccctaatctgcactaagctggactgggaggcagggaatccccagcctgccacatgtgaagtctttctctgtagacagtccagcctatctggctatgatttgttggtttcccataaggaaggaaggagaacctcgctgtgaatcgtttctttttagccgttcagcactgtctgcactcttcctaatctctagatcttggggaaataaaaatgaggttcccttcattaaaatatgggagacctgctctgaatgctggatggatgaatggatgaatagacagatggacagacagatagaagagagtatgaagacaactcttctccttgatatcttttaagggtcatttcaagctcctcagcagcccttgcctcctttaggtctgacacaggtttcactgcacagaaactctgttgtgtgttcctctttggaaacaggaccacaatagatgggcatgaatattagctgtcaaggcaagacaggagctctagattctcacccaagtaacaaaaagatctaatcacatgctctgtggagagcacttttcaaacaataacattctccgaaaaattagtaggaaacccccaactgctaagcacatggctcagttggaaacgaaggggcctcagaggatgaacacgagttcctctgccagggcaggttcctcactgcatgtggcaccttcagaaagagacatggttccagatagtccaaggaactagaagctgtctaaccccaaggtaaatgtatgggtcactttacctctgttgatacagctcttttaggtcaaaatgccataggtgagatgctggcctcacgatgctacctttcctgccccgcctggagcccttttcatctttagctgaactttcatctgtaactcaaggagttacagacagtaacaaggccacaagtaacctgctgtggcgtgccttcaccttggatcaatgtaacaaaacttgatctatgaatccatgaagttgtcagtgagtctgtaatccgcagagtgccagtacgtacttttgtgtttactggaacccaaagcaggccgctggatctttgcacaggatctcttccagtgtgaaactgggcagcaacatggcatatcacttcttcaggcattccttctgacgccatccaaacctggttgccaatagcccctttttattcagaaactaaatattttcctttttcattctgcttcttctagaaagccccacctaagaaaaaggtactagactgggcacggtggctcacgcctgtaatcccagcattttgggaggccgaggcaggtggatcacttgaggtcaggagttcgagaccagcctggtcaatgtggtgaaactccatctctaccaaaaacacaaaaattagccggcgtggtgatgcgcgcctataatcccagctactcgggaggctgaggcagaatcacttgaacccagtaggcggaggttgcagtgagccgagatcccgccactgcactccagcccgggcaatagagcaaggctctatctcacaacaaacaaacaaacaaacaaaaaggtaatggtcaaaccacaagctccttgctgctgatgaagttgggggctgccctggctggccaggctctcctctggttagggctgaccaggcatttggggatggtgggggcgacagctcactgagcagctccatttctcaaaagcaaccatgtctcaagcattagacacaagcattagaagcaaaactgccccggaggctactttctgggcagtgtggcggcttgaagtgggctgctagaggaccctcgggctgcttgggttggtgcttttaagtggtgtgtggaggacaaagcctttccaaatctgctgtgactgtggggacctagtcgggccctggactgcaggaaagctttcttcctgtgacatttggatgtaaactggaggcatcatcgtgggaggaaaacactggctttacggggccaggacagttttgtctaaccagcacagagtccatactgacaggctacatccatctccctgagtcacaattcctcatctggaaaatgcggacagtaatagaatctaccccatagaatcattctgaggatgaatgagatagtagattcaacgtatgcagcatagggtctgcgggtacgtggtaagcttaataaatgtctgctgttattttattagtatatttgtattgcactttacaatgtgcagaattcctgaaggtgttaatctgtgcagcatattaaacaatgactgactcaggggagcacaattaatctacatttgttggctaacacaacacctccaactggaggtttcttctcttaagagaggttttaatataatcttgcatgtaagatttgtctggaaaggttcagaccacactgtttttgaaatattaatacaaaagactcaacttgataagcactggctaattctgtgtgcagtaaatcctgtaacgagcccacaagcagcgtgtggagctgatggttttcccttccacctgagcagcagctgggaggagctgaaagcagcacctgggaagaggagggctgggatgccagtggtggggaactgtcacctggggcagtagcagaggagctggcaaaccactgcgtccaggctggaggcagtccagaacggaagctgcagccctggctgcctgcagcgtctacctccccaccagaacctggcttcacttttctatggagctgaaaatgaaccattatcactggtgtgaatcttttccacctaagccaattcatttcactccacctagtggtaaggctcccactggcctgcctgggaggactagggccatcttaccactggtggccagacccaaacagccaaggaagctgcagaaagaggcccttccttcccttctgtggtccagacagaggagagtaactagcccactgcacagacatcccaggcctgatccctcgctgccagcctgccagcacaccctctggtgaacccaacacaaggcccagacctctgtagagatggcatccatcagcccttcaccctgtgactgtacactttgtgtcaacttgactgggctacagggtgcccagatatttggtcaaacattatttctgagtgtgttcatgagggtgtttctggatgggttagcatttgaatccactgactgaataaaggcagaggccctccccagtgtggtgggtcttgtccaatctgctaaaagcctgagtagaacaagaaggctgagaacagggaattccttggccttcagtctgcgatattggctttttcctacctttggactcaggctgaaacattggctcttcctgggtctcaagcctcctggctttcacactagaaccacaccatctcctctcctggctgtcaggccttcagacttagactggaatcacacctttagctctcctgggtctccagctggccaactcactctgcagaccttgggacttgtcagcttccatactccatgaaccaattccctaaaatgaatctcttttttct

SEQ ID NO: 97738 - DNA, 13094 bp, Homo sapiens
accaaagaggtatacagatggcaaataagcacatgaaaatcatttgttgcctgtggctggggtagggataggtactgaaggtaaatgggtacaaggggactttttagttgacgaaaattcactatattttgcttacagtggaagttaaacaggtttatacattagtcaaaattcatcgaactggactttaagttgtgtgcatttgtttgtgtatgcattctaactcaatatacttaactataaaaaaagaatgaaaacaaaatttactcaagaaagaaagtaacaggccaagataacttccctagtgaattctaataaatatttaaggacgacataagttttaaaaaaaatcaatcttactcaaactaaagcataaaaaagaggaaatacttcacagttcattttataaagtcaacataactttgaggcctaaacctgacaaggacattacaaaaaagtaaaattacaggccgatctgtctcatgaacatagatgcaaaattcctaaacaaaatattagcaaactgaattcagcacgaaatagaatgaataaaacatcacaaccaaaccgaaattatttcaggaatgtaagattattttttcattcaaaaattaagcaacataatttagcacattaacaaaagaatggagaaaaatcaagtgatcatcaaaatcaatgcaggaaagcatttgacaaaattcaacaccaatttaggattttaaaaatttaggcaattttggccaggcgcagtggctcatacctgtaatcccagcactctgggggaggctgaggcgggcagatcacatgaggccaggagtttgagaccagcctggccaatgtggcaaaaccctgtctctactaaaaatacaaaaattagccatgcttggtggtgcacgtctataatcccagttacttgggaggctgaggcataagaatcgcttgaacctgggaggtgcaggtaggagtgagctgagatcctgccactaaatctcagaaagctattttgtaaatactgacaaggtgattccaaaatttacagtcatgtgctacataacaatgtttgggtcaagagaccactcacatatgaagatggtcccataagattataatgaagctgaaaaatcctgcaacctagggatgtcatagctgacagaaggtcaagtgcaaagcattactcacatgtttgtggaggtgctggtataaataaacctactgtgctgccagctgtataaaagtctagcatatacaattatgtacagtacatacttgataataaacaactacgttactggcttattattttattgtactacattttatattgttattttagagtactcctacttacatataaaaaaaaagttaactgttaaatagcctcaggcaggtctttcaggaggtattccagaagaaggcatgttaggagataacagctccatgtccgttactgccccgaagaccttccagtgggacatgatgtggaggcggaagggattgatactgataatcctggctctgtgtaggcctagtaagtaatgtgtttgcttctgtctcaatttttaacaaaagtttaaaaacttaaaaatattttttaacagaaaaaagcgtataggccaggcgcggtggctcacacctgtaatcctagcacttttgaaggccgaggcgggtggatcacttgagatcaggagttcaagttagagatggtgaaaccccatctccactaaaatacaaaaaattagccgggcgtggtggtgcatgcctgcaatcccagctactcgagaggctgaggcaggcgaattgcttgaacccaggaggtagaggttgcagcgagccaagatagcgccattgcactccagcctgggcaatagagtgagactccgtctcaaaaaaaaaaaaaaaaaaaaaaagaaaagggccgggtgcagtggctcacgcctgtaatccctcgggcagatcatgaagtcgggaaatcgagatcacggtgaaaccccatctctactaaaaatacaaaaaaaattcggtgacgggcacctgtagtcccagctactcgggatgctgaggcaggagaacggcgtgaacccggaaggcggagcttgcagtgagccgagatcgcgccactgcactccagcctgggcaacagagcgagactccgtctcaaaaaaaaaaaagaaaaaagaaaagaaaagagcttatagaataaggatacaaagtaaaaagccagatgtggcagctcacacctgcaatcctagcacttggggagattgaggcaggaggactgtttgagcccaggcgtgtgaaactggcctggccagcgcaggaagaacttgtctctacaaaaaatacaaaaattagctgggtgtggtggcgtgcacctgtggtcccagctactcaagaggctgaggtgggaggatcactggagctagagaggtcaaggctgcagtgacccatgatcgcgtcactgtactccagcctggatgacagagcaagaccctgtctcaaaaaaaaaaaaaaaagaaaaaaagaaaaaaatttgtacagctatacatgtttgtgattaagctaagtgtgattacaaaagagtaaaaagtttcaaaaaattaaaaagtttataaaatgaaaagttacaataagccaaggttaattattgaagatagttttttaaaataaatttcgtgtgtatccttagtatttataaagtctacagtagtgtacagtaatgaactgagccttcacattcacccaccactcactcaatgactcaccgaaagcaacttccagtcctgcaagttctattcacagtaagtgccccatgtagataggtgtatcgtttgtcttttataccagatatatctttcagtgccagaaagtaagaaaatgctcaacacacacacacacacagacacacacacactgagggagtaaaagggacacaagagccacctgaaagagctcccacagctaaagttgtaacaaatagagcaaaaaaaaaaaaaaaaaaaaagaaagaaagaaaagccaaattataagctaaagtacaaaataagtatctatgagtctacactgatatatgtaagtgattgaataaattaatatgtagaggagaagaggtaagttttttgtgcagaagaattccaaataatttatgtggataatacccctggttcaaggaggtagaacattactttctatcacttaaatatgggctacacacagtgacttccttccagagagcagagtctggaaatgggaagtgaggagaggagtaacttatagtggagaaaccagatgaaaacaaggtcatcatcaaggttaacataaacagtgatgtcatgttgatcacatgtacctttaatatgatataatgaaaatggccctttatctttgtggtcttcctgtcccaaacccataatccatgaaattgtgagaaaaacatcagataaactccatttaagggaatttctataaaatacctgaccagtactcctcaaactggaatgtcatcaaaaaaaaaaaaaaaaaaaagaaagtctgaaaaactgttacagccaagaggagcctaaggagacaggacaactaagcataatgtgagatcggggattgattcctcaaatacaaaaggacactaggtaaaaaccaaggaaatctgaatatactacagactttagttaataacaatgtattgatattgactcaattgtaacaaatgtactataagatgttaataatgaggaactaggtgtgggggtatacgagaatactgtactcttttaatttgtccataaatctggaactgttctaaaaaataaggccaactaagaaaaaattaggattctgcttctacccataagtataggacttccctaccttccatttaataattagaaaattgaacaaaatatgaccatggaaaaaggcagtacaggactctgatccacaagagaagaaaaacaaatgaagtaagctctacaatcacaatgcttttcttcctagaagcagtttctagtcaatgcacaggaaggacaaacgagcagagccttgtggcttagctgagctgaggagatgatataggagacccaagaagctgagtcagctgaaatttgtgaggtgcagtaatatagaagagggagtcatgaagaactgcagaaatcagagtagatactccctcccttgagctttggctgaatataatttgagtgtgcataaggtaaaactacacaaagcctggcaaagaataaaagccaggaagctatatggctgacagatattcaagttccttccggccagaactgaatacttggggcactaagaaaagatcccagaagcctcagtagaaaggctttacaacatttagagcaaaggctatcctagatgcaccctaacaaaatttaaaaagaagcttcataaacatgaagctgatccacaataacttaaatgcctgctaaaaaaaaaacctttaataatctttttcaagaaaaacaataaagttcaaacattcaaaaacataatatttataatgtctggcatttgattaaaaacttattaggtaatgtgaagcagcagcaaaatgtgaacattaaaagagggaaaaaatcagtcaatattatcagacccagaaatgacaagagaagatggaattaacagacaaagcattttagggctgagtatggtaggtcacacctgtaatcccagcaatttgggaggctgaggcagaaggattcccttctgccaggagttcaagaccagcctgagcaataatgcgagaacccatctctacaaaaaattttttaaattagctgagtatgatggcaaatgcctgcagtcccagctactcaggaggctgaggccagaggatcacttgagcccagcagttcaaggttacagaagctatgatcgtatcactgcactccagcctgggcaacagagagtgatccaataaaaaaaaaaaaagtacaatggtagacttacactcaaacatattaataactacattattacaaatagtcaaatagtctactccaattaaaaggagattatgagactggatagcaaaagcaagacataactatttgctatctaaaagaaattaattttaaatataaagacaaagtttagaagttaaaggatataaaaagaataccacataaacactaatcataagaaagctggagtggtgatattaaccaaagtaaacttcacaacaagtgacattacctggggtaaaaagcaacatttcataataaaaaggactcaattcattatgaagaaataacaatcccaaatgtgtatgtaacaaataatagagctccaaaatacatgaagcaaaaactgacagaactaaaaggagaaataaatttataatgatacttggagacttcaatactccatcagtaattaataggataggtagacaaaaattcagctaaggatacataaaacttgagcaacactatcaaccaattttttcatttatagaacactccaccacaggacaacagaacacatattctttttaagtacatgtggaacattcactaacacagaccgtattctgggccatcgaaaagtctcaataaatttaaacaaaactaaaataatataaaatatgttctatgaccacaatggaattaaactagaaatcaataatggagaattatctggaaaattcccaaacagttgaaattaaacatacgtctagacaacccatgggtaaagaagaaatcaaaaggaaaattagaaaatacatttatttgagtgaaaatacaatatatcaaaatttgtaggctacagctaagcagtgcttaggaaatgtttagcttttaaatgcttattgtagaaaaggaaaaacgtttcatattaatgatctagaattccatcttaagaaagtataaatggcagcataaattaaacctaaagtaagcaaaaggaagagaaaaagtgacagaaccttgccatctgctccttccgttcttgggcagcaccagtcatgtccctgagacatcatggtaaaagtgaagcccagagtaaatggaattggctatattgggtgcctggtaatcagggctgcttttaactctagcaaagtagatgctgttaccatcaatgaccccttcactgacctcaactacatggtctacatgttccagtatgattccacccatggccaagttccacggcatcgtcaaggctgaaaacaggaagcttgacatcaatggaaatcccatcaccatcttccaggagcgagatcccaccaaaatcaaacaggatgacgctggtgctgattatgttatggagtccactggcatcttcactaccgtggagaaggctggggctcacttagagggtggagccaaaagggtcattacctctgccccctctgctgatgcccccatgttcgtgatgggcatgagccataagaagtataaaaacctcaagatcatcagcaatgtctcctgtaccaccaactgcttagctccctggtcaagatcatccataacaactctggcatcatgggaggaatcaggatcacagtccatgccatcactgccatctagaagactgtggatggcccctctgggaaactgtggtgtgatggctatggggctctccagaacatcatccctgcatctatctactggtgctgccaaggctgtgggcaaggtcatccccaagtcgaacaggaagctcaatggcgtggcctttcatgtccccactgccaacatgttagtcatgaacctgacctgctctctggagaaaccagccaaatatgatgacatcaaggtggtaaagcagcatcagagggggccctcaagggcatctggggctacaatgagcaccagattgtctcctccaactttaacagtgacaccaactcttccaccttcagtgctggggctggcattgccctaatgaccactttgtcaagctcatttcccagcatgacaatgaatttggctacagcaacagggtggtgggtttcatggtccacatggcctccaaagagtaagatcccctggaccaccagccccagcaagagcatgagaggaagagagaagtgttcaattgttggggagtccctgccacactcagtcctccaaacacactgagaatctcccctcctcacagtttgtacaccagaccccctgaagaaggagggatctcagggaccctgacaatcaaatgaatatttaatgtactaagtttgctatatagtttttatttttctataaaagaggacaaagatagtgacctcatagtatgattgagcctatttgaacagataaaaaaaattatgtgtgctgccgaagcaagcacagaataaaaaatttttagtctgtaattctttccttaaaaatggaaagccagattttaaaaacttttttaaattataaaaacaatatgtttgtaataaacttcaatatagaattggataaagtgaaaattttaagttctcaccctgcttcttcatttacttcaattccatgacctagaaataaccacttttagcagtttattggatatctgccaggacttttttccatggcagtcttttctttcacactgttgaatatcgatagataatccatttaatcctcagtgcttcattcatttctttatgaatcccaatctcagcaccacaatacttagcaaataataagtgttttttttaacaattatttcttactttatytgactatgcctagtggtaaaggtatatgaatacatagcatgtcatgatttatatgtgtagcagtcatgagaatatacccctctaatctttttttttttttttttttgagacggagtctcactctgtcgtccaggctggagtgcagtgacgtgatctcgggtcactgcaacctccgcctcctggattcaagcgattctcctgccttagcctcctgagtaactgggactacaggcacatgccactgcgcctggttaattttttgtatttttagtagagacagggtttcaccgagttagccaggatggtctcaatctcctgacctcatgatccgcccgcctcggcctcccaaagtgctgggattacaggcgtgagccaccgcaccgggcctacccctctaatctttgactgcataatgactgatagcttcagctacagcactcggaaatttattccacctaggtcacaaggccatctcaccagaagctacttcctgacaatgactgaggccagcaaggacaataaggcaggtctagccctagaaaacaggcgcttctctgatgggtgcctttggcatgggaactttccaataatggccttgcccaacttttcttggaactccactgcagtctaagatgcttctatctaacttccttctctttctccttcactcagagtcaaatcagcgttgcagtctagcagctctgttttctctggctttctccctatgttctctcacatacatttagcctaatacatttcttgaaagtctaatcccatctttgtgtctacttctcagaagacttgaacacagcatgtcagccatttccattttagtaaaattagaagcatctgaggcttaaacaattactctgaccttaaaacagaaacttagaaaacattcctacttaattaggacacatgcctcaggtttaaaaataatgctgtagatggtatggtgtattaaaaatctttgccaaatttgttattttccaacatgccaaaaactattttctccttttgattaagtttaatttcaactgttaatgctgcttctggctctatcaagatgccctaatttccgccttgctgctgctttagtacactgctattcaatacttcctaatgttagctgaactagattcactactccaggcagaataatggcctggattatgcagagaagctctagagaaggaaattttagtaggactaatttttaaagtattcttgctctaagaatgtatttatttatttatttgctttaattccacataactgagtaaggattaaatccagagtggtgaatctaaatttttggagtaatcactattgtccatgtcacttcttatcaaatactttagagaacataactttgtaaaagcaaagttaaccttctcttgagaattttgtgacatccattgactatagctttcataggactggactttctgaagttaagtgccatggatactctattatccgacaaaatttggactaatagttgtttagttaattgaaaaaaatgaggaattaaaaaagctatttttgtatactataattttactctaacttaagaagaaatatgcatttaattcacaaatcttttatcataaggcccatcttttttttaacatgggtttgctgatataagcctcattttcacaaaaacaatacatatatacactatgatacctagtttgattttaattttttttgagacagggtcttgttctgttcccaaggctggaatgcaatggcactcactggctcattgcaacctcaaacacctaggctcaaatgatcctcccacctcagcctcccgattagctgagactacaggtgcacaccaccatgcccagctaaatttttttgtagagatggggtcttgctttgttgcttaggctggtctcaaactccctggttcaagtgatcctctcgtctcagcctcccagagtgctgggataacaggtgtgaatcactgcacctgttcacaacagcaattttttaagtgcctttcccttatttaatccccccaaagcactcatccgagttttcactggaacaataacttttctctttcatattttatgtatcattgacttatattcattgtcatcaaaataataaattcaaatggcatacgcaggtttgggaacaaacccaagtgactcttgaaaggcactttagacttgcaggtccctgtggcattacttgtctctgcttttttgttgcctcatacaaaaacaggccacttaaccacatttaggccatagtttgccccctgatataagacaagctagaacaggcaacatatgtgccagtcttacagatatctatcacacacttatagcaactaacatttacttttgaaagcttacaatatgccaggtactatgctaagtgcttcatgtgcattatctgattcaatcttcacagccacccatgctataatttctactactattccttttacagataaaaatattgaaacttggagagattaagtaacttctcaacaattaataagtggtggaattttaaaaataagcggtgggatcataatctaaacacaaaaagaccaacttctcaattactaaatcataccacttctgaaaaaacttttagctttttcaaggacatacaaaacaatgatcttcggacacagtgccaatttactaaatattcagagagatattaaaggaagatttgacatcttaaccaaatgaatgaatgtctaatggtatattatcaggcattgataagaaaggtattctggaagatataccagattttgagtgtcacaaagctcaagttagaaatgatggggccaggtgcagtggctcacacctgtaatcctagcactttgggaggctgaggtgggcagattactcgaggtcaggagtttgagaccagcctggccaacatggtgaaaccctgtctctactaaaaagcacaaaaatgagccaagcgtggtggtgtgcgcctgtaaacccagctactcgggagggtgagacgtgagaatcccttgaacccggggggcagaggttgcagtgagctaagattacgccactgcactccagcctcggcaaaagagcaagactttgtcttaggaaaaaaaaaaaaaggaatgactgctctgctttttcaacgaggcagcataagagaattttaattatggaacatagaagtgcaacaaattatcttaaaaatataacattcaacttctttcataaaacattaaaataataaattacattaaaaaatgggaagtcagcagccaggtgcggtagctcacgactgtaatcccagcactttgggaggccgaggtgggcggatcacaaggtcaggagatcgagaccatcctggcaaacacagtgaaaccctgtctctactaaaaaatacaaaaaattagccaggcgtggtggcagatgcctgtagtcccaggtacttgggaggctgaggcaggagaatggtgtgaacccgggaggcggagcttgcagtgagccgagatcccagatggtattcatatggcaactgagagcatttcaggcaggaagataatgttacagaggtccacaacaaggggtaatgtgcagtagcatcccaggatacaatattcagaaaagtagtaacataactaatggaatccatgaaggctaatcaggtagtaagcccaatgagtgctcagtaacaactgtaatttaattctcacaatcacattatgagatggagactgttataatccccatctctgataaggatgctgaaacgcagaatgaatggttaagtgacttactcaaattcacacagctaataatggtggacatggaattaaaacgcatgcagattgtccccacagtccacacactcttaaccactctgttagaaatgatttctttggcttagttgtgccaccacaagcaagtgaatggcatcagactgtctttcagcatagaaagtgttccggggattgggctgaggatcatggtaaagaatggacagagcaactggagagactaccttggaagacctgtgttatgaggggtgttactgaggaagtaacttgaccatgaaatattagcttaatagaagaccataccaatttgggcacattaaactagcaaactaaggttttaaaaatgttgatacctaaactgaataaaattccagtcataaatcctggtcctttgtaagtacttgtattgatcttttaatatrtaagtatgtataattaaaaaattaaagtagccatattacaaaaggatttttagccacaccactagaagaatgctgacaatgatcatctagaacaagaagtaattgagaaagttccaatgttgggctttagatgaatatgtattatctgaactactgacacaatattccttaaactacataataaaattaatatgtactataaacagaaagatgtttgagtctggactaggaaggtaaccttataatttaaaattggctattctaacttacataagggcaagaaaaaagtaggaaaacttattgtctttctagttaatatgaatttcttttttactgctaggtgaacaaaataaaccagaaatgtgagcaagagctgtcctagaatacaaacctaatattctaggtccagctcctaaaacacagtcctgttagttcattgtcaggcagcacacagggagaggccaaatataggcactgtttgaggacatattggaaatggtcacagggtcctgccttccctgtatgacagcaatagctatagggctctataactttggtaggatgcccacatggtctcatgaaaaacgtggacacaaaataaaattaatttttaaaatacaattgtgttggttaaaaaaaaaaaaaaagaaaacaagacagagagacacacacctacacccacaccatgatttaggaaatatacccatgatacggaaaatataatgttcaatctacattatattctgaattttgcaacctttaatgcagatttcacaaaaattaggaaaatacgtatatgtatatttacaaagtacacagtcccatagagaaaagttcaaattttgaatagtaaatagctagttcagactagcaatccttgggttgtattgctgtcaactggcaaaaccagcgtgatttctaagagtacaaatattactactatttggcttggtggattacagtaacctaaacccactgctaatttcattaagggctgtgcacccctgaacctagaagattaccacttgccactgcaaatactctggctctttctgttcagtagcgccagaataacttcttatcaaccttctatttgaaacacaaagaggaggaagaactggctgggttcctaagttttctggttcagattctagtccatagtgagacccagctgcacttctttcccttg

SEQ ID NO: 97739 - DNA, 12477 bp, Homo sapiens
ccattcccctgcctcagcctcccgagtagctgggactataggcgcccgccaccatgcccggctaattttttttgtatttttagtagagatgcggtttcaccatgttagctaggatagtctcgatctcctgtcctcgtgatccacccgcctcggcctcccaaagtgctggcattacaggcgtgagccactgtgcccggccatctatttcattcttatcagaaagttaactgagctgtttttcacctcttgaggtgcacatattctatcaacactgtctgccttcacctactgatgatggaggaaaagagggggaaaggcactctgggtggcccagcaggttgccctggctttctgtgtcattttccgagtatgtggttggctgacgcatgtgtaggaagggacatgatggggcctttggtgtctgaattctccgaacccttacttccttctgtagggggaacaggttctgcttgcaatgggaagtgcagcagctcacccaagcttcaccctaatgccagaaagccccacaccctgggtctaccacgatcccacactcctgggctctccactcacaggagtgctgtgttattccagcaggcttcgctttgcttacaaaatacaaagacaaaatcgggaatttcaggatagtggcagcttctgagtgccagttccatggcacatgccaggcaggcaggcagcccagggtgtgcttaataaaccctgagggcaccttctagattcaggaggccacggcagatgtgactggagcctggtatgagggcagcccaggccactggctgcctggggccctggagtgcttgggggcagtgagggggtgccctcctccaggggccctgggacgtggaggtcaggaaggaggtcaggaagggacgtgaaggctctgctgcccttgcctgggtcgccttgtgtgtgagtcacttcacctctgccccagcttccccatctgcaaaaggggggagaagctgggagtgaagcggcctcaccatgtggtttggagcaccaggtgaagaatgtaagtaaagcacttggcatggggtgggcatggagtcagggctctcccttgggggtggcgttgatcccccgtgagccacaggtaggtccggcaagtggagccaggttcctgaggccgtgcctgcaggttggccctgtgtgacgaggttgacggcatctccagtgttgggccgctggccgcctgcccagcatgtgttcctggctctgcctcctgctgccgcctccgctgcgccttctgagtgtcacaccaggaggcagcaggggctggcagcacctccgctcctgctgccgtgcctggaatttggggccatggccctggccggttctccatcctgcctgtttgcatagagctcgttccctggcctggcatcttgggattttccagtgattcctttccatacttgaagcagacatggggatgcaggggatggtcatgtctgcgttgttggtcactgaacattttaaaggtggcaacacaattgcctttaaagtgatatggcatgaaaaaaatcgttatttatatttggcatggccaaagagtaaaaactcaagggatggttgctgaggagcattcaggaggcctggggtggcatcagggaccaagtgtccgtttgatttcacagacccgtaagtgttcagtgtcttgagcgaactgtgaagaggagaccctggcctctgatttcaaaggcgccagcgttttaccggggccggtgcagataatggaagaaaggtgttttgccagggacttttccggggtatgcagtggggctggtgaggggtctgccttagcaggaagcccttgcctttgctgtaaagaaactagcaagcgacaaaacgaaagcatcaaagagccaacaggatgcggcccgagccctccctggcacgtcgccccgagccgcgcggggaagagtgaccttagggcccgcctcgcgcacacaggccaggcacaggttgaaagttcaaggcattttgttttttcacctgtttcctacagttctaagaaacttctgaagaattaatgtgtaactatatcagacactcggcgttttctccagggaaaataatgttacagtgggggagggaggggaagtggctacttgatgagacacaagaaggtttccataaagtaagaaaaaccctctctaggggaaacgtgcacaacatcgcatgtgactcttactccatctccaccatgtagaatggctgcgtttgctcagggctggcacagtgtggggctgctggtggtcacagaaggactagagcagcagttggtgtccttgaaaccagtgtacagccgtgatcaccatgcccttcgtgagtctggtgggcccaggatctgctggggccaattttgacacgaggtattgaatgacaaaagcaaattaatgcagcaaatgtaaagatagagataagctctttgccatgccaccttctggaccaggagtttatgattctgatactatttctccctggccagtggcagagcccctctggcaggggcctgagcttcatgctacccaagtctaaatcattttacttttttctaacaaagtcttaacttgccaactggcagtatgcattgttactggcttgatatatcatgtggagaaaacagatgctttgacatgatgacatacagattttactaacatttcctcctgtcatgaaattttcatataaagatgaatattttcttgaggcaccatttataaaggtggtttttatgttagaagctggtgttggccaggcgtgctggctcatgcctgcaatctagcactttgggaggccgaggtgggcggatcacaaggtcaagagtttgagaccagcctggccaatatggtgaaaccccatctctactaaaaatacaaaaattagccaggcgtggtggtgggcacctatagtcccagctactcaggaggctgaggcaggagaactgcttgaacctgggaggcggaggttgcagtgagccgagatcgtgccactgcactccagcctgggtgacagagcgacactctgtctcaaaaaaaaaaaaaaaaaaaaaaaaaaaaaaaagctggtgtctttttaaaatccttttgtaaattagtttaagaagagttaaacactagccctttccttgttcggttcacctggtctgcgtatgcatgcttttaaacgtgtaccaggcatatgaagtggttgtgatttgtaaactatcatcataaactcttaaatcctgccttttacactcttgccaccaggtggctaagaaaaaagaaatcaagaaaaaaatctaacagttatgcaaaggactcgtaatcactttcaagttctgcttcagtggtgaaatatgaaactatagacggactgcgtttcaagaaggagaactgctgaataagtgacaggcatttcaggcagcgcccgaccagatggacagctcatgagtcttcttattttctcaaatattggcaatgggaaaccagattttgctgatctaaagcttttggagactctctgagcctgttccacctccatgctgtcccctggatgccgctattgtccggaccagttagctttgggacagaggttcagctttggcctcttggatttccagagtggaggatgcctgaatcctgaccacagcagcaggccgcccttatccttaacacatcagcatcagggaacgacatctgcagagatgttcagtgccctcagaattggctctaggaacccaaagtaaaattctccaaactgatgttaaggtctcatgcatgtcattctttgattctgtgtattaacagtaagatgctatgaggaaatccgtgcacgagggatgacagcgtggcaggctggaacacgctttttagatttactttcgtggactggatctgttaagagtaaggccagcgtcctagggcacaaaccgtgctctccccaacgtttccacagcgtcatgaaggacgatcttgtcccatgaaacaaaccctacccgtcttcttgctgggggggtcagcggctgctctgcttctcctgtgcacccggggttgctcttcagttctctaacttagtaagttggactggcagcctcttggttgtacaccattttattcttgattcgcttttctgattcaaagtgaacctgagtgccttaatcctctaaggggaattaattgcttgtttcagtgcttaactctgatcctggctcagtccccatggggacaagtttcttcctgttaggatctgtgtgtgttgttcaaaacacaatcagaaaggtaatgaagtttttcttatgacagaagccagaaatgcaggctattttcttttctattgcataagtagtgttctcaaactaactttatgttatgaaggatgctattgaactcaatacataaaatgtagaaaattttagttggtcattctagcaggctggattatttcctagaaatgaaggttaacttttattgcctggttttattttacagaaataagctatcatcttctgcagaagacaattactgaactgattttccagagttggaattaaccttctgtggcctaatcaccttcatttctacgtaatatcaccctcccaagcatttttcttggttttggaaaatcattaaggccacaaccactactcgatatgcctgatgccctctcccacttataatgtgttcatttttatttttgagaagactatagctagtagatatttctagaagatgttgataaaggatggagttaagtggagacctgaggagggagcagggataaggaagggccaaggggaagagggaattcacattcatcaggtgctcacgcctgcacagtcggcagtcagtggagggtaactctttggggtaaataggaggaaatggaagctcaagaacttgaaatcacttgcccaaagtcccacaggtgctcagggatggaggcaggaactcaagtcaggcctgttatggcacagtggattgtttgatacttgccctgcactctgtccctaaatgcccatctacagaattctgaggttgcctttcctgatgctggccctgcaagggctgggctcacactgtgtctgatgcagcagggctgacttgggggcaattacttcacattaaggtagagaccaagagaaatacttgttttaatctggaaaaactcagatggcttgcctacagccgtttcttaccattactcattaaaccaagcccttacattttatctgagaccctgactctaaccctgtgccatggaaaaacaaacaaacaaacaaaaaactagcatggtgagagggggcagggttgaagacacagtaacatgtggctctcagaaggtggcatccccttctgcagtggcagtgtcacccctcccagcccggcccaggggcctggtgcacccaaagaggagcccgacattttctcagccagaatgaatcacaggcacattctgctgcggttctgagaggcatctggccagtgttatagacttttcatgtgtcctgttggttgtgatcctcacagcagcccttggagatgggctgaacatgagagacaaggaacaagagtacaaggagataagaagctcaaaaaacaacaaacaaaacccaaagctagcagaaggaaaggaacagtaatgattagagcagagataaacaaaaagagaattttaaacaacagagaaaatcagttaaaccaagagttggctgtttgagaagactaacaaaattgacagacctttaacttaaataaaaagagagaaaagatctaaataactaaaaccagaaatggacgagaaaacatcacgtcctacagaacaacacatcttgcagaaataaaaaggccaagagaatattatgaacaattatgccaacaaattgtctaacctagatgaaatggacaaattcctagaaagacacaacctactgagactgaacagacctacaactagtaaagagactgaagcagcagtcaaaaatctcccccaaaagaaaagcccactctctctccggtccgtgcctccaagatgacaaagaaaagaaggaacaatggtcgtgccaaaaagggccgcggccacgtgcagcctattcrctgcactaactgtgcccgatgcgtgcccaaggacaacgccattaagaaattcgtcattcgaaacatagtggaggccrcagcagtcagggacatttctgaagcgagcgtcttcgatgcctatgtgcttcccaagctgtatgtgaagctacattactgtgtgagttgtgcaattcacagcaaagtagtcaggaatcgatctcgtgaagcccgcaaggaccgaacacccccacctcgatttagaccttgckggtgctgccccacgtcccccaccaaagcccatgtaaggagctgagttcttaaagactgaagacaggctattctctggagaaaaataaaatggaaattgtacttaaaaaaaaaaaaaaaaaagcccaggaccagatggcttcactggtaaattctaccaaacatttacagaattcacaccagtcctcctgaaactcttctaaagaatgaagaagaaggaacatttcagtgttgagcatcaccctgatactaaggccaaagacactccaagaaagaaaactacagactaatattcttgatgaagatcgatgccaaaatcctaaacaacacactagcaaacagaattcaacaacacattaaaaggattatatgcaatggccaagtgggatttattcctggaatgcaaggatgtttcaatataagaaaatcaatcaatgtaatacactacattaacagaatgaaggaaaaaacacacaatcacttcaattgatacagaaaaagcatttgacaagattcaacacaacttcatgatttaaaaacagtcaacaaaggaacagaaggaaattacctcaacatcataaaggcagtatatgaaaagcccacagctaacatgatactcagtgatgccagaatgaaagcttttcttctgagatcaggaacaagaaaaggatgctgctttcatcagttctgttgaacatagttctgggagtcctagctggagcaatcaggcaagaaaaagaaatttaaaaggcatccaagtcagaggtaagaagtaaaattaactctatttgtaaacaatatggtcctgtatagaaaatgtaaacatttcaccttaaaacttttagaactaataagcaaattcagtgaagttgcaggagacaaaattcacacaaataattattgcatttttatacactaacaataagcaatctgaaaagacaaactattccatttatgatagcatcaaaaagaataaaatacttaggaataaacttaaccaagcaggcaagatgtgtacactgaaaagtacaacacattgctgaaagcaattaaagaggacataaataaatggaaagacatcccatgttcatggattggaagacaatattgttcagatgtcaatacttcctaaagtgatctacagattaatgcagtcctttaatgcagaaagaggaaaacccaatccaaaaatgtatatggaaatatcaaaggaccttaaatagacaatgtgatcttggaaaagaacaatgttggaggtctcatacttcctgacttcaaaacttatcataaagttactgtaatcaaaatagcatagaacaggaattcctccttatctgtggttttgctttccatggttattgtttaatgggtacaaagtttcagttttgcaagatgaaaaggttctggagacctttttcacaactcaaatatacttaacactactgaactgaacacttgaaaatagttatgataaattttatgttatgtgtattttatcacaatttttaaaactccacaaattaaaaaacaggaaatacagagaaggatttggtttatcagataaaatttaaaacaagtagggaacaaaaagcatagggaagtgtagggtgctttgcaaaccatctctgccattgcagagcctgagtcctccaccatacttgacagggtcacctcccttgggccttggggtcagtgcaagtgacagagccagagaggcttttggagtccagcaggcccaggctcagttcctgctgctgcctctcaccagcttcgggccagagccctcatcttagtttcttcatctgttaaatgaaggtaataccacctactttacagagttgagagcattaaataaactgagatgacacaggctacttagtgcggggcccagtacacccaggtgaacctcggtcgtcggtaagcaaggtcccagaagtcctccctgggaattagccttcttcagaaacactatcctccaactctcttctcctcttacctctgtcctaagcctgcttgtccactcttggatgaaatatttttcttcctttgcagttgaatccccggaatagtgaaaacaatgaccattgcgtgctgagtacctgctctgtcctggcatcttacaactctgttccaaagtctgtgctgcttccataggactgttctcacttctttccattttgcaagttctcagcctggcggcagtctccctgcccgagtggatggtgccaccacctcttactgaaggagcggtttctgagggagagtgcctgtgctgtgcagctgtctcccgcgaggcgccctttgacaagtgtgtcttctgtctcccctcaatgacactgtggcttcatggagtctcattgcatgcccagcacttagcacagggcatccctgcatggctgcgttgttccctgcatggctgcatttaggctttccttttcctgcaagtgctgcctcgtctttcctttctctcgtctcagcagcaggaagaacaagttctttctctgcctccccgctgcctggctccttcagctatcaccagccatcccctctacccagccctcactctggtgccacaattgctactttcctggcttcttcacggggacctgacatacccttgagtctcctgtacctgaagaaaacctccttgccatccttctaagcaagcagtttctgtcttgtcgcttcctttctggctcacatcaagtctctcagaggaaggggctagggctggcggtgcagcaagggagaagacagggaggacaggccctgtgtccagcttcctcctaatgctactcaaacgacccacaaggacagtggaggaaagcgggcgacacgcttctggaagacggaaaacagaagtgagtgacagcagacttaacctagagacacccaaaacttaagctcctgcacagtgagaggctgacaagtagtcagctgagcagtgtctgcaacgctggaggagtccagaaccgcaggccacagaggcaaggacaggccaagacacggaaaggctgggagtgtgcacaaggtgcagggagaccccactgcttcccctcacacctggcagaggatggcgggttcctttctggagagcctgacaagaacacctccgctggggacacaggcctagctgagtggtggtgaggtggcaccctgaaaacaagcattgggggaaagtgcagagctcccagcgccgctccccagagtcccgtgtgaggcctgccacctgacagctcagcctcacttccaaagagtggctcagctttcccagccaagatcacatgtgaagaaaatctcttgaaacacagataccaaaacagagagaaaagagggagttaggagaaatggaggcaatgaagggaatgaagaaaacttaaaaaatatatatatattgagcctgtgaatgaacaagaagttgaaaaaaaaaacacacaacaagaaaaatatattggaaataaatatcatggcaaaaaaatttttaatagaagaaatgcaagataaagcagaatataatatagacctggaggaaaggagaaaatataaaaacattggaggctgaagtcaggacctccactgccggaatattgggagagccagaaagagaacagagaggaaggaggggtaagaaaatgcccccgtgatccaggataaggagcattcagatcaaaattccagcacaatcaatgaaaacagagtctacatcatcagaaaattctagaatctgagggataaaaggaagcccttaagagcctccagggaagagctcgagtcacacacacaggggacctggatcacagcacactgacttctctgcaagaactcggaaagttagaagacaatgaagaaatgtctttaaagttctgagggaaatgatttctagaatcctctacgcagccatgttattaaccaaaagtgggagagaatacacttcagcaaaatgtggccaacatcccagccagaggacgggacaggaatgagggtggcctggatggcagcgacacagagagcccagactagagctggcagggaggaccttccagcggatggtcaggacccgggttctggccatgctctcagaaactgcgaggctgaattacaatcctagaaactaagcgaaatgcaaaacaaacaaaaaaaacaaacttgaagcaatttttaatttcaaggaaaacataaagttgtccaagaaaggaaatgtaatcatagtatgctctgtgtcttagccaagagccgtgtttgcatggttctaatgccgaaatagatctgggtctgacccaaaactatgatgagtctgttgggaggatggcgggatgtggtaggagagccaagggtcaggcttctacagtgatgacagcagcggcacacgctacatgtcagcagatcacacaggaccacgtgtgttggtacccaccgcggtctctgaggcaggctgctactgtgacttcagtttacagttgaggaagctgaggcacagagaggttatatgatctgcctaaagtcacacagttaaagtctgtgctttagaaccactatgctcacccactttttgagtagaagggcaagatatgatttaagacatcaagaagtagcagcgtaagtaacaatatggagataaatgctgaacacaacagttaaaagccttaaaagtgttgcctccagggagtggaaaggggtaggaaacttcatttttcttacaaagcaatctattgacattttggacacatgccattttaaaaaactgcatcagggaaagccaggcaggcacctggcagtggagagctggtctgcagtgtgactacggccctgcccggctggctggtcctagatcgccaccagcctgggactcggcttcctcacctgcaggtgctggaccaaacagtttccaagttctcttctggcccttcatgttccagcaacaaacaagaccagtgatttagagagcacgtgtgctataacgacaaccagacagagtgatgtgacagactgagtaggccctgcctactactcctgcaccctccaggtcaggcgctggtcggggcaggagccacctggatgaggggagagagggtgcaggagatgaggtgggagagttaagtctgcagcaggagattgacaaggaccctctgggtggtgcactgggggcaggatccaggggaacaaagacaacagggatgcaggcaggcattggaggaggagagcaggttgggagacgtggcaggggaagtgctgatgggtctcgctgggggctgggatgcaggtgtggggagggacatgaatccttccaaatgctgagtccccaaggcagctgcacagcaggatccaaaccatcatcgccccccaggtgctcgtcttttgggatagctccttgcccgctgttgtagacagctgcttccatccagtgccctctccagacaccagcgctgctctcagctggtgccttttgtcattttcacgtacaccccagcagccgagtcctggcaattttaggcctgagcacttgcctcttctcttcctcagtaccgtcctaccccaggttctccttaattcacatctcaactttcctatcccagcatgccccccaggtctaatctgtgtccccacactgggaagggtgtcccagggctatcacatggccaggcccacagggcgcacgtatctggctagccttgtgtttttcccacggccacacctttcctagtgcaatgtgcctgaaatctggggaatactgttgttgcacaggctggtgatagaaccaagaggcagcagacgtgcctcttgagcaaaatgaggcctagaaccccccagagcagctcttgtttgctgagaagaaaacagaagtcccatgagttcagtgtgacttcttcagtttcttcagggtccacttgtccacatgattggtggcaagtgtggtgtccggggccatttctggcgggtcacgagccgctgctgtttcctggatagccgcatttgttttcctgcacctgcagtcccgtctgcaaagcccatctcaacgagtcgccccacaggctgtcacctcatggcgggggcacacagggcagcggagcgaggggccggggagagcggcccccacccctttaatgttcatttccatttttgtttgagtcacttt

SEQ ID NO: 97740 - DNA, 22051 bp, Homo sapiens
tcaatggtttcttagtcagggtggtgccaccccctgctctggggggcatttgtcaatgtgtaggtagggccagttctggtggtacagggatgggggtggcactgctggcttccagggatggggctggctatgtcggtggtcctgtaccatagagagctgcccagaatgtcagtgtgagggaaacactgggccagtggcctcttcaggccgcagtctttccagcatgcatttgatgtagtcacttccttgtgcatgtccagaactctgagccagggaacccacttctttccacctgaccattgaggagccgccttatagtcccattttgcagatttgggaactgaggcccaggaggggcagagtggcttgtacataagcctatgccactgggaaatggcagaggcgggacccctcccccgccggcccacgttcactgcacatggcccccagggcttcactccgcatgattctctccccgacagagcgtcacggggttcggacgtcagatgatcgagaaaaccaagcagctggtggagtctaagtacacagtggagaatggctacagcaccagtgccaaggtcgggggctgcccaccgctgccctgagatgggcccagggcaggtggggggatggaagccgggccggacccccatgtccccgtgcctcctggtcacaccctgcccactctcctgttgcatccttgggtcccgttggcattagccacctgccaccccccgacaccagtagttgacagaagggaccctgcttctcacatacacacatccccaccgcccgcaggtggtgtatggtgacactgactccgtcatgtgccgattcggcgtgtcctcggtggctgaggcgatggccctggggcgggaggccgcggactgggtgtcaggtcacttcccgtcgcccatccggctggagtttgagaaggtgcgtggctgggtcaggggctctgcatttaggtgccctcatcagggtactcagggtgtcccgttctttgggttcacaaaagccacagtgtgaagggatgttgctgcttagattctcctgaggctggggccttggtttgggaagcctccaaggccttgggctttgttaccctggatggcatctgttctttgaaaaccctgtcgctgtccctggttttgaggtgtcacagtgtccctggttttgaggtttcccagtacctgtcagatgtggagctgccctccacgcagggaccctgatgggggtgcaccttagatctgtgcaccattgcccctggccctctgagtgcggcacacttggtcccaggaaaccttgcaccatattttcttttgaagagtctgggtctcgctctgtcgcccaggctggagtgcagtggcgagttcacagctcactgcagcctccaactcctgggctccggcgatcctcccgccttggcctcctgagccgccacgcccagttctcacactgtactgtttccccgtggcttaacgctctctcgtgccaggccttggacttggagcctcgcagagtggggaggtctctgcctcagggctcacccagccgtagtttctcctctctttcatgggatgcttcatcgactcgcctgtctggatctcatgttttagggactatctggatttatcccagtctctgtttcagattggggtctctggtgtgggggctctggcattgccgaggggcctcaggagccacttccagccatacagtgtctcggtccatcccaccaggctcagggcacggctcccatgtcctcaaactgcgtctgggaccctgtctaccttcagtttctggggggcgtctccagattggggcttggcctcctcaggctcagggtcttggccatggctccctcccaggtctacttcccatacctgcttatcagcaagaagcgctacgcgggcctgctcttctcctcccggcccgacgcccacgaccgcatggactgcaagggcctggaggccgtgcgcagggacaactgccccctcgtggccaacctggtcactgcctcactgcgccgcctgctcatcgaccggtgtgtggggcctcctccctcagactcagggggctgggccccaaacccctcctccctcagacccaggagtctaggccccagcccctcctccctcagacccacgggtccaggcccccagccccctcctcctcagatcccggggtcagggcccccagccccttcctctcttagatacaagagtccagacccccagcccctcctcctctgggaacacaggtgtcaggcccagctcttcctcggtggtgaagcagtggaaagagtcggcttgggcagctgtgggttcaggccctgcctctgccactctgcagcctatggtaggaagggcccctctctgccctgagcctcagccctaagagctcatcctggtctccagccctgagacccgtggaggcaccagcctggccctcagtgccttttggtgacgctgtgcggcccgctctcctacagagaccctgagggcgcggtggctcacgcacaggacgtcatctcggacctgctgtgcaaccgcatcgatatctcccagctggtcatcaccaaggagctgacccgcgcggcctccgactatgccggcaagcaggcccacgtggagctggccgagaggtcctgcgcggggcgggtggcctggccagaaataaccccctccttcctgccagctgggcccacttcctacaccctcgcccccacccccgccacccacctgccctcacccacccgccaccccgtctccacgcaggatgaggaagcgggaccccgggagtgcgcccagcctgggcgaccgcgtcccctacgtgatcatcagtgccgccaagggtgtggccgcctacatgaagtcggaggtcaggcccacctggctgcctgctcccgcccagccccctcgctctcacttctgctttccgagatgggcgggcctgcgggaagggtggggcctccgcgtgcctgtgggccctgcagaaccgccccccatggcagcctgggtgtggcctcggcccctctggaggtcccccctctattctgacccctcccttgcttccctatggaaggatccgagtctctaccctgtgcatacaagcctcccagctcgggtgttcccttggattcataatcctgcagctctaccaccacccccagtacccacatcttagccccatgacctctgacctcctgaccccttcctcatccttgcttccccttgtgaactctgacccttccgtggtgacctgagagccctacagactctgtggcccagagactccgtgacctccgaccccatcccagacccaggccccccccatgtcacagcccgcaggcaggcctaggccctaagccccaggccccatgaccaccccgtgtccaccccggtgccctttccctggctgcccgggtgtgactgccatgtggccgcaggacccgctgttcgtgctggagcacagcctgcccattgacacgcagtactacctggagcagcagctggccaagcccctcctgcgcatcttcgagcccatcctgggcgagggccgtgccgaggctgtgctactgcgtacgggggcaccaggggactgggggcaccctgggggggcagaggagatcaccggcccaccacctgcctcctctcctgcagggggggaccacacgcgctgcaagacggtgctcacgggcaaggtgggcggcctcctggccttcgccaaacgccgcaactgctgcattggctgccgcacagtgctcagccaccagggtgagcggccctggccactgggcccccactggccctcaacctgctctgccgtcaccccagatcctagacacccaccccatcggctggcactgccacccagtgggcccagggcccctgggtgggtggcccctgtctccaccccccacagagggtcctcggcccccaccccgggagttccccaggggagttttcccagcacacttgctccgttgttctccagcctctggggactttcagaagctgggattggcagtgggcagggatggggtggcccagttcctggctgggccccagcacttgggctgacccgcctccccacaggagccgtgtgtgagttctgccagccccgggagtctgagctgtatcagaaggaggtgagagggccgggaggtgaggaggggccaggtggggaggcgggggcgccctgctcagccgctgccgtccccaggtatcccatctgaatgccctggaggagcgcttctcgcgcctctggacgcagtgccagcgctgccagggcagcctgcacgaggacgtcatctgcaccaggtgtgtgccatgtcccgaccctgggctgccccgccccttcccagctcccaggcctgtgggttgtggacccaacctctgactccaaggcctctcctgagcatcctccccgcccatccccttccagctgtgagctgtcctgagcctcagtgtccttgtctgaaaaatgggcccatcccagccccccagagggggtgggtgcttagggaggcagcgcccggcacccagtgttgcccgggaaacggctgtcctcccgacacacccagccagcctggccccctccccagggcggggccgggctttccccagggaacgggtaggcggggtgggttcccacgccaggtgacaggtgatatacggccagccatggccctgcacctcgccaggcacccgctgttatcggctccccccccccaccccccccgtgcctgctgagcaaacagcccgctgcgggagggggcgggtgggctgggcagcaggcggggaccaaagtcctgggaacagcccccacccctctcccaggctgggcactgggccttggctggtcctgaccctgcccctgcccccacccgcagccgggactgccccatcttctacatgcgcaagaaggtgcggaaggacctggaagaccaggagcagctcctgcggcgcttcggaccccctggacctgaggcctggtgaccttgcaagcatcccatggggcgggggcgggaccagggagaattaataaagttctggacttttgctatatggtgctttgtggtctctgggggacactgtctggtttcataagccctggccttggctgggaccctcctgaggcccgcaccgcccctcatcctcagcaaaagcccccggactcccacctgtgctgcctggttcatgtgggccaagcctgcctcagtttcctctctggccctgaaggaacccttataccagcgcttctctgccctgcttagggcccccaggtgtctggccccggcccagccctccctggtgatgaccctggggaccctggtggctgccccgccctccaggtgctgacctgtttcctccaggccctggggcagccccaggcgcaccggggcttccactcctcagcccggccaaggggacccccccatcccccgccggaccacacacccacgatgtttccacgtcggggtcctggcaatgggctttgggtctgggtttccccccagcgactcccatctctatccccgcagcctctaactgccgtcagatgccctcggccctcccgtcacctcacacatcccccggggagagtcttgtgcttgcccctcggcccccagcccgcccctgctggaattcggctcctgggtccagatcctccgtttcctgattctcctcttcagtgaaccccagcccttcctcgatgttttcagggttcccccaaatccagctcctgtcccatctccagccctcaaggtcagccccccaaacccagccccacggggatccccaaatccagacagcccctggcccgccatccctgccatgtgacaaaggggttgtgcaatccagccccctcccctgaccccctccctgaggggatttttgaggagggccgagcttgtggccagcgggcaccctcctccccccggcaggggctgggccaagatataaatagggttggcggctgcagcgggcggcaaacagcccgcccggcaccaccatgctcgccctggaggctgcacagtaagtgaggcccccaaacctgcacccggggtccccacctgcactgcccctctgtggggcctcacccatgggcagtggtttctctgctcctcacggccggtgggtgggagtggaggggaggggtcyrccctgtctcttgccccttctggttctgttccctcttcacttcggactctccatccccccagttcctatctttcctggtccccaaagatctcatttccccagaacacttgctagcgtgccctcctgcgggcgtcctccgtggctctcactctgtccatcctcctgtctccccgagttcccgtatctgttcgctctgtatctggcatctcccagctctcaacattctgcctgttgctctctgtctctctgcctgtctctgtgtctctgtctccagttctcgctctccctgccttttggtctccttctgcctcaccctcactctcagtgcctccatctggggctccaggaatcctccccgcctctgtgcgtgaatgtccctttgcacacctttctctgtgtcccacctctccttgagcctcctcatctgagtcttctccgggcttccccctctctacccagacatctctccatccttctcctctggtccaagctggactcaactgactcgccaccaaggccgcacttgacccaggccccctctccatccccacacctcctttccgggactttctctccctcactttccctgcccctccccaccagggtgtctatgcaaattctggggaggagggggacatttgcctcccccccaccccccacttcctgtcccagcagggggtagtgggggagtccggtgaatgtggtggggctggtccctcacacagggctgcggtggtcacagctgctgccrcctccccatcagcccccaaccactttgagattcaggtggctggaggcagcctcagcatgcccctgtgtctctccccctccaggctcgacgggccacacttcagctgtctggtgagttggggcccctgggggccagggaggggtggcccacagtgacctccctcagagaagtcatttgcttcctgcctcagtttcccctcccacctcttcctgtcactttgtttctgagctcccccttggtatctcctgctaccccgcatccgtatttttgatgtctctctccccctctcaggcttgaatccacttccttgtggctttgtatctctctctgcccatcccatattcagacaatgtattttcatgttcctttccttctttttgttcgtatttttaaaaattgtgttctctaacagttcagatacggaatactatacccaacacccttgaacccacaayccagtctgagtaatcaaatcttactgatgtggttgaaagaaagcccctgtttatgcccctccacattcacaccccagccatgttttttttgtttgtttttgtttgtttgttttttaattgaagtgtaactaacaagtcagtaaagtgacaaatcttgtgtttttgcattatctatacaccgtgtagccacaagccagatcaagataccgaacatttcaatctctgaaatattccttcctgtcccttctcagtcaatacctttctctgatattttccgccaccaatttgtaatttgttttgcctgctcttttttttgttttgctttttgagaaggagtctcgctctgtcrcycaggctggagtgcagtggcagcgtcttggctcactgcaagctccacctccygggttcaagcaattctcctgcctcagcctcccaagtagctgggattacaggcatgtgccaccatgcccagctaatttttgtatttttagtagaggcagggtttcaccatgttatcygggctggtttcaaactcctgagctcaagtgatcctcccacctcagcctcccaaattgctgggattacaggcgtgagccaccgcacccagctgcctgcttttgaactttatgtaaagtgagtcatacagcatgtcccttttggggtctggcttccctcactcaacatgaagtgtgtgtcagtgtttgtcctttttccttgctgtatagtactctatctatgatcagcccacaccacagtctgtttatcccttcttctgttgatgacacytgggctgtttccagttggagactcataataaagctgctgggatgattctggaacaaggctattttgtgcacatccattttcagttctcttgattaaatgccaaggagtgagactgccaggtcctaggcatggtgtggatctagctttagtttttcctagactcgagttcttgaagcaacaacacatgattcatggggcgaatcaacatatggagatttatttatttatttatttattgagacagagttttgctctgtcgccgggctggagtacagtggtgcgatctcggctcactgcaacctcagcctcctgggttcaagcgattctcctgcctcagcctcccaagtagctgggactacaggtgcgcaccaccatgcctggctaatttttgtatttttagtagagacggggtttcaccatgttggccaggctggtatcgatctcctgacctcatgatctgcctgccttggccttccaaagtgctgggattacaggcatgagccaccatgcccggcctatttatttttcgagacagagtctcactctgtcacccaggctggagtgcagtggcgcgatctcagctcactgcaacctccacctcccaggttcaagcgattctcctgcctcggcctccagagtagctgggattacagacatctgccaccaggcccagctaatttttgtattttcagtagagatggggyttccccatgttgtgcaggctggtctcgaactcctgacctcaggtgattcactggcctcagcctcccaaagtgctaggattacaggcgtgcgccaccacgcctagctaatttttgtatttttagtagagacgggatttcaccatgttggctagactggtcttgaactcctgacctcaggtgatctgcccgcctyggccccccaaagtgttgggatgacaggcgtgagccaccacgcctggcctggaggtgtatttaaaaagcattgacccctgcctctgttaagtgaaacacttccatttccccttgcccttcacctccggagcccccaggcaggcaaggctgggggagtwcttccaccccttctccaggcgccctgattcgctgactgtgtgccagtgaggggccagggttcttgggagcccaccgtcttagcaggagctggctgctgtgtgcccctattgggttgtgtctctactctctgtatctctgtctctttgtccctgtctctgatgcctagtctctgtgtttctttgttgctctaatctctccagcatcccctcttctctcccatgtctgtgttggagtctccccaagggtccagggtgggggttgggagtccccaaggcctgggatgacccctcttccctcctgcaccccgtatcagtacccagatggcgtcttctatgacctggacagctgcaagcattccagctaccctgattcagagggggctcctggtgagtgaccccagccctgtgcccttcctgccttggggcccatttcacagataggggagctgaggcccaggggaggtcatttcctagcacaacaggataaaggtggcccgggsctatagccctcctcccctttcctctcctacccatccgctcctccatgcaaatcctggggtcagagatttgcacagcctacaatggcctctctgtgctgggggcttcgactgcgaggaggcctccgtgagacatcccagcttctgactcagtgcccttcccccagactccctgtgggactggactgtggccccacctgtcccagccaccccytatgaagccttcgacccggcagcagccgcttttagccacccccaggctgcccagctctgctacgaaccccccacctacagccctgcagggaacctcgaactggcccccagcctggaggccccggggcctggcctcccyscataccccacggagaacttcgctagccaggtgagtggtaaggggacagttaaaatcaagcccaaaccaggtgtggtggtgcacgcctgtaatcccagctgcttgagaggctgaggtgggaggaggattgcttgagcccagaaggtcgaggcaatccactgcactccagtctgggcaacagagcaagaccctgtctcaaaaaaaaaaaaaaaaaagaaaaagaaaagaaaactcaagctcagtcatttggttgaggtttgctgggtgccgggcactgcattgagactgcacatagtaagcyctgcagcggcctcccaggttacgttccgttgttgcccctctgaacaagtgagtcaagagaggtagtgacaggaagccagggacagggcagactcgcattacctgtgttgggccggctttgaggaggtacctcaggtgtcccctggccacagcrtggtgatctgaacaaaggccaaartctaggctgtcaacaaagagggagaccagagccaggagggccaccgccttggcctgagaggaggaagtggagggagacaaggggtccctggacatgcaggtgaccctgaccttccgcagaccctggttcccccggcatatgccccgtaccccagccctgtgctatcagaggaggaagacttaccgttggacagccctgccctggaggtctcggacagcgagtcggatgaggccctcgtggctggccccgaggggaagggatccgaggcaggtatgcgggagtggctggggtgggggagatgccagctggagatggtgggggggctgagagcaccatggcttcctgggcctctacatatactccagcactctgggcagctcccagatccgcaccacctgctggctgtgtgaccttgggtaagtgcctctacctctctgtgcccaggtttcctgtctgtgcgatggggatggaggtgatagtgtctaccctcctgaggtcgttggggggactaaatgggatagtaagtgtaaatgggacagcagtgccaggcacagagtgagcacttcaataagtcaacctcttcaccatcattcccgacaccacagcaacagaaatgataatgctatcaacccccaacggttcaacccttgccccctgcccgtgtgcccaacatcctttatgctcaaccccaagaaagctgagatcgttccttcctttctgtgtctgggcctcggtttctcgtctgtaaagtgggcatcactgtcatcctccccatctcacggggttatgatggagattcaatgagctcataactgtaaagtgccttgygaagcacctggcactacatgctccacggtgcattgtaaaaatcaacacacaggctgggtgtggtggctcacgcctgtaatcccagcactttgggaggctgaggcggtcagatcaactgaggtcaggagttcgagaccagcctggccaacatggcaaaaccccgtctctactaaaaacacaaaaattaggctgggcatggtggctcatgcctttaatcccagcactttgagaggctgaggaggatggatcacgaggtcaagagatcgagaccatcctggccaacatggtgaaacctcacatttactaaaaatacaaaaattagctaggcgtggtggtgtgcacctgtagtcccagctactcgggaggctgaggcagaagaatcgcttgaacccaggaggcagaggttgcagtaagccgagatcttgccactgcagtccagcctggcgacagagtaagactctgtcttaaaaaaaaagaaaaaagaaagaaaaaaaaattaatggggcatggtggtacatgcctgtaatcccagctactcaggaggctgaggcaggagagttgctggaacccaggaggcaaaggttgcagtgagctgagattgcaccactggactccagcctgggtgacagagcaagactccgtctcaaaaacaaacaaacaaaaccacagcctcatttaaaaaattttaattaattaattaatttattttttgagacagagtctcgctctgttacccaggctggagtgcagtggcacgatctcggcccactgcaacctccaccttctgggttcaagcaatcctcctgcctcagcctccgcagtagctgggatcacaggcacccacaccatacccagctattttttgtatttttagtagagatggggtttcaccatctggccaggctggtctcaaactcctgacctcaggtgatccgcccgtctcggcctcacaaagtgctgggattacaggcgtgagccactgtgcccagccacacagcctcatttgtggctgagagacttcagctcagagaggttaattaagtcacctattttaacttaggacatttaagatggagaggatctctccaatgactaggaaagacacaagatggaaataaagattttatttatttttattcayttatttgagacggtctccatctgtcacccaggctgaagcgcagtggcgcaatctcggctcactactgcctcaaactcctgggctcaatcgatcctcctgcctcagcctcctgagtagctaggaccacaggcgtacaccaccacacctgactaatttttaaaatttttgtagaggtgaggtctcgctatgttgcccaggctgaactcccaactcctgagcctatgtgctcctcccacctcagcctcccaaagtgctgaagttacaggcatgagccaccacacccagccagaaataaattattttatggcttataggtcctggggcatacatggcacgcctggaggccacacacaccaggtcagggagcgcaggcagggagggagagagagagggaccagtggactgacgcctttattgggtccaaggcgtcggccaaacaggtttcctgagggggttttaattggtgggttcaggccaggcacagtggctcatgcctataatcccagcactttgggaggctgaggctggtagatcacctaaygtcaggagttcaagaccagcctagccaacatggtgaaaccccgtctctactaaaaatacaaaaattagctgggcctggtggtgcacgcctgtaatcccagctacttgggaggctgaggcaggagaatcgcttgaatccaggaggcagagtttgcagtgagctgagatcatgccactgcactccagcctgggcaacagagcaagactccagctcaaaataaataaataaataaatacttggtgggttgaaagcaagcaggatcaagttccaggaggtcacgctgtgcctgagagggggtcactgaggcatctgcacagtccatgcagggccgtcaagtaggctgtccatggctctcccacagggaggtggtcaccaggagtcagttgcataagagagatatctgggtcagccacactgaggaactcggggagggagatgtagaactgccaaggaggacagccctgcttccagcatgagaatgtccaacttttatttagttttattttattttattttgagagggagtttcgctcttgttgcccaggctgagtgcaatgatatgatttcagctcactgcaacctctgcctcctgggctaaagtgattctcctgcctcagcctcccaagtagctgggattacaggcatgagccaagcacacccagctaatttttgtatttttagtagaaaccgggtttcatcatgttggccaggcttgtctcgaactcctgacctcaagtgatctgcccaccttggcctcccaaagtgctgggatcacaggcatggcccaccgcgcccagcctccaacttatactttcgatgaatgccgaggcagcctaaaattataagaattcaatccgggtgcagtggctcacacctgtaatcccagcattttgggaggccgaggtgggaggatcacctgaggccaggagttcaagaccagcctgggcaacatagtaagacaccatctctacaaaaaataaaacaattagctaggcatgatggtgcatacttgtagtcccagctactggggaggctggggcaggaggattgcttaggcccaggaggtcgaggctgcagtgagctgtgattgctcctctgcactccatcctgggtgacagaacgagaccctgccttgaaaaaaaagaaattaagatgtcactaygtcaccaccccaaggtcacactgctgtaaaatggcagagatgggattcttgtagccagtgccctgctttgaaactcccagttattggccgggcrcagtggctcatgcctgtaatcccagcactttgggaggtcgaggtgggcggatcacctgaggccaggagttcgagaccagcctggccaacatggcgaaaccccgtctctactaaaaatataaaaataagccgggcatggtggcagacgtctgtagtcccaggtactcgggaggctgaggcaggagaattgctcgaacccaggaggcagaggctgcagtaagccgagattgcgccattgcactccagcctgggccgcagagcaagaccccgtctcaaaaacaaactaaaccctaggagcccaggagtcaggtgccctggcctctcccgggaccctgtcccgctttgggctgagaggctgggagaccaggagctggagagatagccaggccaatgcaactgcctccagatctgttcgcctctccgttataatcctttaagcggcgctgtcaacccatttcacagattctttcatccactagctcaacaaatatggaatattacgtgctggccgcagggcggaaggcaggacagatgtaaatctcgaaaattaaagcacagaacgcggagggggcctggggctgacagcttcgggcagggggagtggcttgcccccccccccccccgtggtgaggggcgcagagccaggtgtatgtaacagccacttccctcaccccacttttcagatccaggagatggaggccggggtggaagtctcggaggagggtggatggggaaggcggggccttagggacccctcacctaacgcgtgcccccgaccccaccgcagggactcgcaagaagctgcgcctgtaccagttcctgctggggctactgacgcgcggggacatgcgtgagtgcgtgtggtgggtggagccaggcgccggcgtcttccagttctcctccaagcacaaggaactcctggcgcgccgctggggccagcagaaggggaaccgcaagcgcatgacctaccagaagctggcgcgcgccctccgaaactacgccaagaccggcgagatccgcaaggtcaagcgcaagctcacctaccagttcgacagcgcgctgctgcctgcagtccgccgggcctgagcacacccgaggctcccacctgcggagccgctgggggacctcacgtcccagccaggatccccctggaagaaaaagggcgtccccacactctaggtgataggacttacgcatccccaccttttggggtaaggggagtgctgccctgccataatccccaagcccagcccgggcctgtctgggattccccacttgtgcctggggtccctctgggatttctttgtcatgtacagactccctgggatcctcatgttttgggtgacaggacctatggaccactatactcggggaggcagggtagcagtkcttccagartcccaagagcttctctgggattttcttgtgatatmtgattccccagtgaggcctgggacstttttaagatcgctgtgtgtctgtaaaccctgaatctcatctggggtgggggccctgctggcaaccctgagccctgtccaaggttccctcttgtcagatctgagatttcctagttatgtctggggccctctgggagctgttatcatctcagatctcttcgcccatctatggctgtgttgtcacatctgtcccctcatttttgagatcccccaattctctggaactattctgctgcccctttttatgtgtctggagttccccaatcacatctagggctcctccaagatccttttgtcatgtctgaaatcactcttgagaggtctggggtggaggatggggagtcagtgaaatgtgtcatgtctgggccctgtcagggacacccttgttatatctgggatcctccaatcacatctgagacctcctaggctctccatctgatatgccctttcagggaccccacaaagactgagttctcatggggatcctacccttcctagtgccactccctatggccatgctgaagaccactctggccacgcgactgattttgggtgatcatggcagctccccacccatgtcatttctaaccagaagtctcaaggtcgtcacccccctgccccccaaccgaggccccggtcgctggtggtggtctctttagtgcactgtagcacttggtggtggaggtgtgagggatccacattaacagcaggccatcagctgggcaatggctcacacctgtaatcccagcactttgggaggcgaggcagggggaatggcttgaacccaggcattcaagaccagcctgggcaacataatgagacctcgtctctacaaaacataacaaaaacaattagccgagcgtgggggtgaacacctgtggtcccagctgctcaggaggctgaggtgggaggatctcttgagcccaggaagtaggaggctgtagtgagctgtaatcgtgccactgcactccagcctgggcgacagagtgagacaccgtcttaaaaacaaaaacaaggccgggcacggtggctcatgcctgttgtcccagcactttgggaggccgaggcaggcggatcacgaggtcgagagatcgagaccatcctggccaacatggtgaaaccctgtctctactaaaaatacagaaattagctgggcgtggtggcacgtgcctgtagtcccagctactcgggaggctgaggcaagagaatcgcttgaacgtgggaggcagaggttgcagtgagcctagattgtgccactgcactccagcctgggggacagagcgagactccgtctgaaaataaaaacaacaaaaacagcagaccattcaaaatagggagactttgcataatccagatttctgccttcacttaaaactttggacggtctggagagagtcggccagttttcggtggggggtggggagctggaacaggacagtagcctttcctaatgaggcatttgttctccaatctgccccagtcgctgccatccctggctatctcaccctagcagcttctcaagcctgttggctttagaccactgtataaacccagctggaactgaagcctgggtggactatggagccctggttgggacccccagggagtcaaaggctgcgggccaagaggccagaggtccttgagcctgggtgggcaggtggatctagggtgcatgacttgctgcttcccaaccttagtttgtcccttctgtgaaaaagggagagaaggaggaggaagatctcaaaaagactttccagcccagtgcggtggctcacgcctgtaatcccagcactttgggaggccgatgcaggtggatcacctgaggtaggagttcaagaccagcctgaccaacatagtgaagccccttctctactaaaaatacaaaattagctgggcgtggtggcatgtgcctgtactcccagctacttgggaggctgaggcaggagaatcgcttgaacctgggaggcggaggttgtagtgagctgagatcacaccactgcacaccagcctgggcgacaagagcgaaactccgtctcaaaaaaaaaaaactgttgcagccccgttgagcctttgacaccgcctgaaatccaccccactcccaggaggaggaggaggaaggaatgccaatgacctagagacacgagaagtccatgtggaggcacacagcagctgatggcagagcccaggctgggacctgcccttaagagaatgagtgggaagggggagggaggaagggcaggtaaaacgtcctccccagggccccctgcaacggggaaggtactttttacaaaagctatcattgtcaccctaaatgtggaataaaataagatgcatcgacgtagacaaacctcctgggaccttttgtcagggactgcaatcctgcccctccactgaggccgctggctctcagagacaccgtgacatcacgggtgatgatgagaggagttcaaagagagaattatatgctggcgcggtggctctgtaatcccaacactttggggggccaaggcaggaggatcgcttgagtacaggagtttgaaaccagcctgggcaagatagtgagatccccttcccacccgtctacaaaaaaaataaaaaattagcggggtgtggtggcgtatgcctgtaattccagctactccgaactactgaggtgggagggtcacttgagcacaggaagttgaggctgcagtgagccgtgatcgtgcccctgcactccagacacggcgagaccctgtctcaaaaacaaacaaacaaatcacaaagacaccatacagcaaaacctatctgaaccttaatgccgagaaataagaggcttgacgcgcaggcacagagggttccgtttatgtcttcctctattcctgccaactgaagttctccacctcctccccgcttccccttccgtctgggtgtctgtccccttccctctgaattgagccctcgggctggcagcgagggacgcgaggcttcaggtggccgcggcactgcaggcctgggcccctccccaacttagcggggctcgcgggagcgcagtggcagtctgcctggcaacccgtgacatcacatggaactgacgccggattggctggacgctccccggaggcggagaaatttccggctcgtagggggttttggaaaaggaggagggggaagatgaacaggaaaaaaaagcggagggacttgttttcctcacaccgggtccctcacgctgcgttactagccaggcagtcccccagccttaaccctaagtccccaacaccctttccctccttcctccccacaacacctggtgtccccaagccccgcccctccccaggccccgccccctcggctccccgccgcgtccagagccaccccattcagaaagtcacaggtccccctgccgggaagggcgccaacgtccgggcagccctccagggccttcccagcctcccacccgcccccaccggggacgcccaccccctacccgcgtccggtgcctgccgtgcccgctccgggaagagtcgcggggagcggtcccaggaggggcggcggccagtccggggtcccagatggccggggccccagctctttgggtttgcccacgcccggggcgcgaaactccggagtcccagagccgcggcgccctccccggaggcgcagggacctcctccccccgccgccgtcctgcctacgctaggaaaccggaccctccctcccggctccggtttcccgaaaactcctgacttgcagatgctaagaatggcttcctagaccctgtccctcccctccctgcttcatgccagagctctggcccgcagcccttacccccttgagaccctcagtctcttcctcttccttctcccgggacccaggcgtccaggcgctcgtcctttctagggaacccaagaatctgggaccccagttgcttctgctcccagactcaggggtccaagcacccagtcccctcctccctgagattctggagtccgagccccagccccctcctccctcagacccaggtgtccgagccccagcccctcctccctggggacctggctctcagccatctccctaggtccagctgttatttctcgccctttagaacatgcgggcggaatgtggggcggccctgtggtctgatgtctcccggagccttctgggagtctcaggactcattaaaaggctccccttaggggcccacctgtcctccctagggcctagcgggacgcggctgcggtcagaggagcaggaggaggtcccccgacatgcctgaggcaaaaccaggtggcgccaggaccccctccctgtgtggggatggggctcttcttttctggatggggatttgggacccctctgtttgtagggttgggagaaggaggaaccttcgctgtgtgaggaggaggctccctttgctgtgcgggatgggggttcccgcatcagtttagggtgagggtctcgactctgcatggggaagagggtcccttccctttgtgacaggagtttccttccttgtatgagatggggtgggtctcatatctgtgtggggtgagggatccccttcactcggcagggagggtgtttctttttctataagtgattgggggggcatctctggtggagatgggattctctggttgtaaattgggttccttttgcttgatggggatgggggtctgtgtgtgtagactgggtttttttgtttgtttttgttttttggtttttggttttttttttgagatggagtctcgctctgcccccggggctggactgcagtggtgcgatctcggctcactacaacatccgcctcctgagttcaaacaattctcctgcctggggtagctgggattacaggcctgcgccaccatgcctggctatttttgtatttttaatagagacgggtttcgccatgttgaccaggctggtctcaaacccccaacctcaggtgatccacccgcctcagcctcccaaagtgctgggatgacaggcatgagccgccgagcccggccagactgggaggtctttgcatgtgactggattctccacatccggggatggcatcctctgggcagggtctgggccacttctctgagtgaagactcagagggagccaggtgcaggggctcacgcctgtcatcccagcactctgggataccgaggcaggaggattgcttgaggccaggagttcaagaccagcctgggcaacatggcgagaccttgtctctacaaaaaattaaaaatcagccaggtgtggtggtgcatgcctgtagtcccagatacttaggaggcagttgaggctgcagtgagctgtgatcacgtcactgcactccagcctgggtgacagagtgagaccccgtctctaaaaaacaagcaacagcaacaacaaaaatggcccagtgcggtggctcatacctgtagtcccagcaccttgggaggccaaggtgggtggatcacctgagcccagcagttcaaggccagcctggccaacatggcaaaaccccgtcactacaaaaaatactaaattagctgggcttgtgggggtgtgcctgtagtcccagctactcaggagtctgaggtgagaggatcacttgagcccaggagacggaggttgcagtgagcccaaatcttgccactgcactccagcctgggagacggagcgagaccctgctgggaaaaaacagaaacaaaaacaaaaaatagattccaagggaccttctctgtaggatatggggtgattgtgggtataaagattagtggttcccatctgcatggagtcacaggggaagtctctgtattaaggatgggggagcctcatttctgtgggcactgaggcttccccgtgtaggaattagcggggcttcttcatgcagggaatggggtcctttttgcggggtttggggaccttctttgaatggggaacactttctgtggagatgaggctttctctctatgaggaactcaccgcaggaatcatgcaccgctgggcggaccccctcctgggatgtctggtccgctggcatcaggccaagcaggctgtggggtgggtccagcccctactgtagctgcagacccagccggcaaggaacagcaggcagggcaggggaaggatgctgcggtcagcaccaggtgtccagtttccagcccagaggatgagctaattataccctcggacccaaaaggtcagggcgtggtggctgggcggatggggcagggcctgctgggggtaagggaaacccgatcccacagactctcagatctgagataaatttatacctagggtgggggcctggactcttgggtctgagggagg

SEQ ID NO: 97741 - DNA, 22459 bp, Homo sapiens
ctgagttcaagcgattgtcctgtctcagcctcccaagtagctgggattataggcgcatgccagctagtttttgtatttttagtaaagacagggtttcatcatattggtcaggctggtctcgaactcctgacctcaggtgatccacctgcctcggcctcccaaagtgctgggattacaggcatgagccaccgcacccagcctacacccagctaatttttgtatttttagaagagacagggtttcaccatgttgtctagcctggtctcaaactcctgacctcaggtgatcttcctgcttcagcctcccaaaatgctgggattagacatgagccaccatgcctggccatgttaggtatttattgtagtctttgcagacaaggcttgtttgtacctgtcctttttggggaggctttccaggtattcaaaagtacttgggtgttgtgatctaagccatgtctgcattagggggctccccaagcccattaatgctgtggttcttgcaaactcatagaggtactatcttagtggtcttagataagatccagaagatttatctggattaccaggcagagactcttgctctcttcccttgctttctctcaaacagagtcagtctctctctcccctctctctctctctctctctctctctctctgtctctgtctctctctctctgctgagctacctggagctgggagtggggtgacacaaacaccccatgcctactatcactgggattgcgctgggtcctgcccatggcctcctgtaaccacgacctacctgcctactgcttatgtttgctcaaggcccttgggctctaaaactagcaggttccaaaggcagccatgcttgcatccttcccttcagggcatcaagttacctcaggtcccaggtgggtccagagatacagtcagtgagccagggactggagtcaaaacccttagaaatcggctggatgcggtaactcatgcctgtaatcccagcactttaggaggctgaggcaggcggatcacttgaggtcaggagttcgaggccagtctggccaacatggtgaaaccctgtctctactaaaaatacaaaaattagccaggcgtggtggtcagcgcctgtaatcccagctactcggaaggccgaggcaggagaatcacttgaacctgggaggcggaagttgcagtgagccaagatcgcgctgctacactccagtctgggcgacagagcaagactccctctcaaaaaaaaaaaaaaaaaaaaaagaaacaaaagaaaggctaggtgcggtgggggtgcgtttgggaggctgggggtgtcatcccagccctttggaaggctgaggcaggaggatcgcttgcgcctgggagttggagaccagcctgggcaacaaagggagaccctgtctgtacaaaaaaaatgtaaaaattatctgggcgtaatggcacactcctgtagtcccagctactggggaaggtgaggctggaggataacttgagcctaggaggctgaagctgcagtgagccgtcatcacgccactgcactccatcccaggtgacagagtgagacactgtctcaacagaaataaataaatacataaataatggtaaagatccactttgtgcactccttgctctgggggattttcctgaagcagccgaacgtgtccctgataactgtcaccacccccctttgttttctcagtcagagcactcgatctgggccccttcaactcgccccgcacgctttccgtctgcagcaccccatccaactgcacccaagcgcccttaagtagtttgagaggccgtgcctgcaaattcccaattggccacaaggtggaggtgtgggcctgttttcccagccaagattccccagccgccacccgtttctagagctggacccctggaacaccaggctctctccagctttcctgcttccgccctagcagttcccaccgcctggaatgccgacttgctcgctctctgcaccccacgggaaaaggagcagaacaggcttcctccctgactcccctgcccaagcgtactgggagatctcctgccgaacacggcccggccaatgggacctggatctccccatgtcttgtctctcagggggttgtgaccgagtgggcctccaccatcagaggagcacagtttccagaatcgcccaacacaatctttcccgaatcccctcaggaagtgattaggtaaaggattgccagatttttaaacccgtcattttatttactaaccttgtaagaaaggaattatcgcccacattttaccgggttggggaggggctgctgcggtgcagcaagattaagaggaggcagcccaggtgcacttggaggggaattgaacctggttcttgaagctgcagacaccaagtaatcagcccagatgcctcgcatcgtctttgccaggattacttttgcccctgttccattggtgggaatctgtcacgtggttgctcctggctgcaaggacgacccggaaatgtagtccagttgtgtgtccaagagtgggggacctttgggtgactctcagccactgtgggccacatcagaccccacaaggcctcaagttcggacctgcgttccctctatgatcttatatcgcaccttcccgaggtctcgcattagtgttttttttttgttttgtttttttttgaggcagaatctcgctctgttcaggctggagtgcagtggctgtgatctcggctcactgcaacctccgaacccccaggttcaagcgattctcctgccaatttttgtaattttagtagggacggagttttgccatgttggccatgctggtctcgaactcctgacctcaggtgatctgcccgccttggcctcccaaagtgttgggattacaggcatgagccactgcacctggcctactcaaaatattaaacataggccgggcatggtggcttacacgtgtcatcccagcacgttggcaggctgaggtgggaggattgcttgagcccaggagttccagaccagcctggggaacatagtgagtctgtctctacaaaagaattacctgggcttgctagcgcatgcttgtagtcccagctactctggagactgagatggcaggatcacttagcccaggaggtcgtggctgcagtgagctgtgactacgccaccccactccagcctaggtagcagagtgagacactgtctcaaaacaaaacaaaacaaaaagttaaacatagagttactgcatgacccagcaatcccactccaaggtgaaatgaaacatatgtctacacaaaaacttgtacatgaatgttcatagcagcgttgcagccaagaatagaaacatcccacctgtccattaactggcgaatgggtaggtaaaaggtggtatatccataccatggactattactgtgccataaacagaaatgaagtactgatacattctacaaagtagatgaacctagaaaacgttatgcccagtgagagatgccagtcacaaagagctacatattccaacgatccatttataggaaatgtctagaataggaaaattccataaagtcatataattttttctttttttgaaacagagccttgctttgtcacccaggctggagagcagtggtaccattatggctcactgcaacctcaacctcctgggcacaagtgatcctcccatctcagcctcctgagtagctgggacaagaggcattcgctaccctgcatggcttagtttttaattttttgtagagatgggggtgggggtgtctccctatgttgcccagattggtctcaaactcctgggctcaaacaatcctccagcattggcctcccgaagtgctggggttacaggcatgagccacctcactcagccagatatagattaatggctgcctcaagctggaagaaaagggtgggagaattgggtataactgttttttgtttgtttgagatggagtctaggtctgttgccaggctggagggtagtggcgtgatctaggctcactgcaacctctgcctcctgggttcaagcgattctcctgcctcagcctcctgagtagctgggatttcaggtgcctgccaccatactcggctaatttttgtatttttgtagcgacggggtttcgccttgttggctaggatggtctcaatctcttgaccttgtgatctgccctccttggccttccaaagtgctgggattacaggtgtgagccaccgtggccaacgggtatatctgcttatgggaatggggtttctttgtggactgaccaaaatgttctaaaattggttatggtggtggttgcacaacccgtgaacttgctaaaaaccattaaattgtacttgaaagtgctgaattgtttggtgtgtgaaccaaatctcaataaagctattaccaaaaaaattagagaatattgggttacttacaaatgagaaccttggtccacagctaccttcagacaacaaaactgccagtgaccgagtgcttctgtatgccaggcactgcgcttccgggatcctcatacccttcataagaaataagaacaagaggccgggcacggcagcacacgcctgtaattcctgcactttgagaggccgaggtgggtggattgcctgaggtcgggagttcgagaccagcctggccaacatgatgaaaccctgtctctattaaaaatacaaaaaattagccgggcgtggtggcaggtgcctgtagtcccagctagtcaggaggctgaggcaggagaatggcgtgaacccggcaggcagaggttgcagtgagccgagatcacgccactgtactagagtaaactctgtctcaaataaataaataaataaataaataagaacaaagccgggcgtggtggctcatgcctgtaatcccagcactttgggaggctgagatgagtggatcacttgatgtcaggagtttgaaaccagcctgcccaacatggtgaaaccccgtctctactaaaaacacaaaaattagccgggcatggtggtgcgcacccgtgatcccagctactcaggaggctgaggcaggagaataacttgaacccgggaggcagaagttgcagtgaaccaagattgggccactgcactctagcctgggtgacaagagcaaaactcaaagaaaaaaggaagaacgatttatcctatttaccagtaggtcaaccgagactgagtgcaatgtgactcgtcccaaaagtgttgtaattcctcttcagcctatttcaggactcttgcacttttctaacagtggaaacttagaactactttaacagccacaagaatcaatacaggctggatgagaggctcatgcctgtaatcccggcaccttgggaggccaaggtgggcagatcgcctgagtccatgagttcaagaacagcctaggcaacgtggcgaaaccccatctctaacaaaaatgtaaaaacttagctgggtgtggtggctcatgcctgcggtcccacatactctggaggctgaggtgggaggatcacctgagcccaggaggtcagggctgcaataagccaagatggcaccactgcactccagcctgggcgacagagtgagatcttatcttaaaaaaataaataaataaataaatataaatacagttccaccatatcaggcacctcatttgaaacccaccctgtttatgcttttacctcatttagtcataagagtaaggcaacaaggtcatactcttgatcccggtgggctaggggaagtccccatatgctggtgtgggacctccaccccagccaatgtccaggctcttgacaccatctcgggaaggaacttgaggacaagtgggaaaatactgaaagtacaaagatgtattgcaaagtgaaaagtacacactcaacaaagaggagtacaggtggactccagagagagtctcctgcagggggggtttggggctgctaccttaatgggtttctctctttttgttttgagacagtcttgctctgtccccaggctggagtgcagtggcacgatcttggctcactgcaacctccgcctcacgggttccagcgattctcctgcctcagtctcctgagtagctgggactacaggtatgtactatggatttctttaatcaaggagtggaatattcatgaagattcctagaaaaaggagatttttgagaactgtggtgccacccacttttacaccaaatatgggtgttcctgtaaccgtcctggtgctggtgggtgtgtgtttatgttaatgagcatataacgaggtcctaggtgagacctaggtcatatgtagggccttgttgggtccaatgtgtcttagccaggttggtccacacctagggttttcaagagtcttatcagcccccacctgctgcaactatttcaacagtttccttttgctagtcatgtgaaactgctgcctggaattttctattctcctgtgactaccctgtgttattcctgtctcgctttttttttttttttttttttttgagatagagtttcagtctgtcggtaggctggagtgcagtggcgcgatctcggctcactgcaacctctgactccttggttcaagagattctcctgcctcagcctcccaagtagttgggattacaggcacgtgccaccacgcccagctaatttttgtatttttagttgagatggggtttcaccatgttggccaggatggtctccatctcctgacatcgtgatctgcctgcctcagccttccaaaatgctgggattactggcatgaaccactgtgcctagcctcctgtctcactctttttaatttttttatttttatttatttgtttatttatttatttattttgagacggagtcttactctgttgccaggctggartgcagtggcgcgttctcggctcactgcaacctccgcctcctgggttcaagtgattcttctgtctcagcctcccaagtagctgggattacaggcacgtaccaccacgcctggctattttttttgtattttttttagtagagatggggtttcatggtgttggtcaggctggtcttgaactcctgaccttgtgatccacctgccttggcctcccaaagtgctgggattacaggcgtgagccaccgtgccctgcctttatttttttatttttgagatgcagttttgctcctgctgcccagggtggaatgcaatggcaagatyttggctcaccacaacctctgtctcccgggttcaattctcctgcctcagcctcctgagtagctgggattacaggtgcccgccaccatgcccggctaattttatatttttagtagagaccaggtttcagcaagttggtcaggctagtctcgaactcctgatctcaggtgatccacctgccttggcctcccaaagtgctgggattacaggcatgagccaccatgcccggctttctcactcctgtttgcaatttacaggcaaggaaactgaggcacggggaggttaaggaactgggctcagtgttacacaggaaggaagtgacagagacaccaggttctgccatttccaacrctcatgttaatcacttgtttcgcttctaacatccctaggtggaaaattccacaatctcaaacgatgggcctgagtagacataataagttacagaagagcatggatcacatagtcccatttcttttttataaaggcatacacatatgtcagaggcattccaaccacagcgattctgtcttgaataggagcttggtaaaataaggctgagacctactgggctgcgttcccaggaggttaaggcattcttagtcacaggatgagataggataggaggttggcacaagatacgggtcacaaagagcttgctgataaaacagcatatgcagtaaagaagtcagccagatcccagcaaaaccaagatggcgatgagagtgacctctagccgtcctcatggctcattatacactaattataacgcattagcatgctaaaagtcacacccaccagcacgatgacagcttacaaatgccatggcaacgtcaggaagttcccctatatggtctaaacgggggaggaaccctcaattctgagaattgcctacccttttcctggaaaactcatgaataatccacccgttgtttagtatataatcaagaaataactataagtataatcacagtgaacagcccaagccgctgctctacctggagtagccattcttttattcctttatttttattgcattttatttttgagacggagtttcgctcttgttacccagactggagtgcaatggcgcaatctcggctcaccgcaacctcggctcaccgcaacctccgcctcctgggttcaagcgattctcctgcctcagcctctcccgagtagctgggatyacaggcgcccgccaccatgcctggctaattttgtatttttagtagagacggagtttctccatgttggycaggctgrtctcaaactccygacctcaggtgatctgcccacctcggcctcmcaaagtgctgggattacaggcgtgagccaccgcgcccggtccgagactgagcttttttaattcttccaatcaccaagttattgaaaccatttttgcaaaattttaacaatgagaaaattctgacatctcaaatctggccaggcacagcggctcacgcctgtaatcccaacactctggaaggccgaggtaggtggattgcctgaggtcaggagttcgataccagcctggcaaacatggtgaaaccccatctctactaaaaatagaaaaattagccggccgtggtggtgggcacctgtaatcccagctacaagggaggctgaggcaggagaatcgcttgaacccaggaggcggaagttgcagttagctgagatcgcggcactgcactccagcctgggcaacagagtgagactccatctcaaaaaaaaaaaagtaaaaataagcccggtgccgcagctcacgcctgtaatcccagcactttgggaggccgaggcaggcggatcatttgaagtcaggagttcgagaccagcctcgccaacatggcgaaaccctgtctctactaaaaatacaaaaaaatgagccgggcgtggtggcacatgcctgtaatcccagttacttgggagggtgaggcaagagaatctcttgaacccaggacgcagaggctggagtgagctgagatcacaccactgcactccagtctggggtgacagagtgagacctctccaaataaataaataaaaataaataaaactaacaagcagcacgactccaaaatcagaaaacttgtaacgaccaaaaaagtgcaaacgtgccttaaatcagtcatgtgcgacaagcagctatagctagggtttggccgcaggctcagagaagcgcatgaatgagctaaagccacaaagcgcggggctggaggtttggctcccaagaagcgaggaaatgggttcggaactcttctgccaagtcccagtagatctacccggtaaacttccggtgagtttccaacttccgtgcggggcagcagcttcggctggtcctaagcggaccggaagttcgtcaagtttcacgctccgcccctcttccggacgtgacgcaagggcggggttgccggaagaagtggcgaagttacttttgagggtatttgagtagcggcggtgtgtcaggggctaaagaggaggacgaagaaaagcagagcaagggaacccaggtaggtgcacccgagagtggggagacgcaggaggagccccgaacccggggcttctcggcgctccccgcgtactccgctctgcccccttctctccttccatttcctcccctcggtaattcgcgcctcccgcggctgtttccagggcaacaggagtagttcactccgcgagaggccgtccacgagacccccgcgcgcagccatgagcccssccccccgctgttgcttggagaggggcgggacctggagagaggtgcgagggcggagcatgaatggaggaggcggggcggggcatgatgggaggtgatggggcgggacctgcagcgcggtgcgggggcggggcatgaagggaggaggcggggctgggggcggggcatgatgggaggagatgtggcggggcctggagcgaggttgtgggggtgcagtaggaagggaggaggcggggcgggggcggggcatgatgggaggggatggggacctggagcgaggttgtgggggtgaggcttggagggagggatgcatatggggcggggcaaggtgttgggaggcccatgatgggggctttaggggctgaacctggaaggttgagggcggagcatagtaggaggaggtggggtcagaatgagaaatagggatgcttggggyagaagtgaggtagagtcttaagaagaggaggtggggggaaactacatggcatggaggccgygaaggcagagcatgattaaaggagaatgggccctacctagaaaaagcaggtggattggacctgagggggcggggcctacagcaggggcggggcttaagaccaagctgaaggctggcgtggaacagaagggggcaggtcttgttagaaggatggggagggtttgtaggctggcaggaaccagggttgtggctkagagtagggtctytggagagatggaaaaaaaagggaaagccctgtcaggacctgtaactgacctaacctaacccttcttagccccacaaggctctcaatcccctgtattctacaggctgctccgtgaccccaccatgtcctctcctaccacgagttccctggatacccccctgcctggtgagtgactctcttccccacccagcccttatcacacacgagcagaagctcactgtacctctcccggattccaccctcttccaggaaatggcccccctcagcctggcgccccttcttcttcacccactgtaaaggaggagggtccggagccgtggcccgggggtccggaccctgatgtcccaggcactgatgaggccagctcagcctgcagcacagactggggtgagacagggccctggagttgatgtgggggcttggggaggggtttaggaagggagaaagaaatagaaatgggaatgggaggccctgatctttgctttttgttcttgctttctccttaacatatacatctttctaaattgcaatttccctgaatgtgagcagcaactcctctctccctccatcctctggctctttgccyggggatctcctgtgggcccatctctctggttcctgtttctccttgtggctttctcatggcctctacctacccaccccagtcatcccagatcccgaagaggaaccagagcgcaagcgaaagaagggcccagccccgaagatgctgggccacgagctttgccgtgtctgtggggacaaggcctccggcttccactacaacgtgctcagctgcgaaggctgcaagggcttcttccggcgcagtgtggtccgtggtggggccmggcgctatgcctgccggggtggcggaacctgccagatggacgctttcatgcggcgcaagtgccagcagtgccggctgcgcaagtgcaaggaggcagggatgagggagcagtgtgagtgcagcgggagggggcggtgccggcctggccccccgcctagccctggggttctgctgaggcctgcatccccctacaggcgtcctttctgaagaacagatccggaagaagaagattcggaaacarcagcagcaggagtcacagtcacagtcgcagtcacctgtggggccgcagggcagcagcagytcagcctctgggcctggggcttcccctggtggatctgaggcaggcagccagggctccggggaaggcgagggtgtccagctaacagcggctcaagaactaatgatccagcagttggtggcggcccarctgcagtgcaacaaacgctccttctccgaccagcccaaagtcacggtactgccccctccacaaccttgartgtgacggtcccaatggggtagagccagctgggccatcacccagggtgtgggagaatgaggctccagagggcaggggctttgggaagaggrtcycccagggtgcaggcttggcctcaaggtggccrcccagacttaggctcacaaagacctgggagtgaccctggtctcctgtgtcccagccctggcccctgggcgcagacccccagtcccgagatgcccgccagcaacgctttgcccacttcacggagctggccatcatctcagtccaggagatcgtggacttcgctaagcaagtgcctggtttcctgcagctgggccgggaggaccagatcgccctcctgaaggcatccactatcgaggtaatggtccatctgcccacaaggaaccccagagatagctccaggacagatgctgggagcagagttaaggaagaccagtgcttgccsttgtaggatgacattccacggcgaatagagtcttctatgagccaaggagagaaaggaaaaagggtctgaggctgagaaaattgaggatcaggcyagaggcgctattgcagagaaaagttgccaaaaaggcttttcagaggagttagcatttgaatcaaagtagggataacatataagtattgagcacgtgctgtatgccaggctctattccaagtgttggcatatggggcaaagaacaaagcagatcaaaccccgtgccccaaaccttgtgctcacctggggaaagagtatcctaaggagatggggatgcagcatgtgcggaagcctgaagtggagaaagagctcgggctgtctcacgtgatggctgcacgctggtgtggctgagagaacagsggggaaggggacaagggataatcctggtgagattagacccccatttgggccaggaggggagggactagcagctgaagggtcacagggctcaagctccccctcccrctgccgcccttagatcatgctgctagagacagccaggcgctacaaccacgagacagagtgtatcaccttcttgaaggacttcacctacagcaaggacgacttccaccgtgcaggtagggcccaggggaggcttcggggaggcttggcgcccctgctggctggaagacctggggccaactcatccctgttggagtctctgtttctttatctccaaagttggggtgagggttgagccaaggtgagagtgaggtaagagtgcatgtgccacgtgtggtggtgcacgccaatagtcccagccactcgaggctgaggagggcagattgcttgaggctatagtgagccgtgattgtgygacggcattccagcctggtgacagagaagaccgtgtctctattttttaaaaaaagcatgtattgagtgccgactctgtacattgggttgcagtggaagttgagatgggaggagccctgttaccacatcaggcatcttggtgggcattaggaaaagcattccccgcccccgccaaaacgtggtctcacccaagggaggcgggctggagctcggtccattgtgaagcgggcagccttctttactgtctaggggagcactgcttcctgccctctgagagcgctaacctgcgtgggtgggcttctggaagaaggcctgggcagtgagaggcactgcctaggaaaagggtgggaggagcattgctagtgctgcagagcatgcaccagggcctcgctccctcattgtcccacaatctctgggggacctctctgtatttcccgacatctgtccaraccccaccctctccccttcctcttactccggccctttcaccacccgagacggtcccagtaacccttttagtatgagcttagcagggcagggctgcagggaagcgtttctggcagaggagattggcgattgcagaggccctgaggttggggagagctggtggtttggaggaactacagggaggcccaggcagctggagcacaaggagatggggtggagaggaggtcgggaatcccaccctaccccytcccagccgctcctctgccaccaccctggaacactgccagggtccccttgaggggccgcctgcctccacccctgcctgatggggctgctcacagcacaggcagaagggtcctgtcagcacttaaggctgcccacttccctcctccgctcagaaccctccgcggctcccgtctcactgggagaagagctagagtcctctctgtggcccacaaagccctttaggacctggcctcgctcactctctgccctcagctctcaccctctccccctgttccagccactctggcctcttactggcacccatccagcatgctgcagccaagggcctgtgtacttggagtttcctctgcccagaactagggggaccaactggtcctagtttgcccaggaccttcccagttttaacactgaaagtctcatggcctgggtagcccccgtcccaagtcatgggaacagcagacgttggtcaccctcacaatccctcatctccttcggattggtcactgctccagcgtcacccagagcgcagccttccctgcccgccttgtgtaaaatagaaccatggctcagcagggcccttcacacttctctgcactgcctggttccattgaactcacagccctctgacaggctgggcctcttcctaatgtgtttgtctatgaccggtcccctaggctctcaaatgtaagtgctggagcctggcacgtggcaggtactcagtgacatttgatgactgaatgaacaagtcagttttgggaatgagtttgggctttaccttgagcagtggaagccagcgctgggaccagcacgatgtgacmtaggttttaaaagcttccctttgcctttgtgaaggggacaagaatagggactcgggaagctgcagccaccgcccaggtgggaagggagggtggtgataggatagtagaaaatactgaagaaacaygcaccctcattcattccttcactgggcagcatgtgtggcacacctactacatgccagcactcatgggcacggggcacargtggacagaaatgacaagaacgctgtaattactgctgtgttcccagccccagagactgtgggcagcgccagggtccaggatgtggggcacggtttcgggctgaggragtcaykggctgcctcccgccccgcaggcctgcaggtggagttcatcaaccccatcttcgagttctcgcgggccatgcggcggctgggcctggacgacgctgagtacgccctgctcatcgccatcaacatcttctcggccgaccggcccaacgtgcaggagccgggccgcgtggaggcgttgcagcagccctacgtggaggcgctgctgtcctacacgcgcatcaagaggccgcaggtagggccccgcagagcctctgcgcagagccaactacgtcccgcggcccacgtggtccgttcaggctgggttctgccagccacactgccctcccctccgcagagtctttcctcaggccccaccctgctcgactgggagccaggtctagtccaagcacagaggcgggccccacgctggctcccacgcctggtcggggaggggccctcctttctgttggggtgggcctcccaaagcctggcagggcagggrctcagccagcgcccacctgcctcctccctcaggaccagctgcgcttcccgcgcatgctcatgaagctggtgagcctgcgcacgctgagctctgtgcactcggagcaggtcttcgccttgcggctccaggacaagaagctgccrcctctgctgtcggagatctgggacgtccacgagtgaggggctggccacccagccccacagccttgcctgaccaccctccagcagatagacgccggcaccccttcctcttcctagggtggaaggggccctgggccgagcctgtagacctatcggctctcatcccttgggataagccccagtccaggtccaggagsctccctccctgcccagcgagtcttccagaaggggtgaaagggttgcaggtcccgaccactgacccttcccrgctgccctccctccccagcttacacctcaagcccascacgcagtgcaccttgaacaragggaggggaggacccatggctctcccccctagccsgggagaccaggggccttcctcttcctctgcttttatttaataaaaactaaaaacagaaacaggaaaataaaatatgaatacaatccagcccggagctggagtgcaagatggagagggcgcgggcttctagggacctcagtgacactgggtgcccgaacctgattgagcaggtgggactgggtgtccccaggctgttgggaaaagggtggcacatagggtcccagtgttgggtggtgtgtcgcctgctgtgaaagttcaggacagaggcctcagcctcagggtcacctccctggacaaggtgaatcagaactcacccttgaaggataaacaggatttaagtgaatgaggggacctggacttctgtccgaacaacaagtgtttgctgaggcctcctgtgggccaggcactgggttggccattctagagatggagacattcacccaataaatgtttccagagcattaactacagttaggcacaattctaggcactggaaacatctgtgaacaagataaccatcctcctaccaagactcgggggatagggactttaatgagcgtggcactgtggtggggctagaggaaatcagggaaggtatcacaacagaggcaatcgctgggacctaaaacaagagcctgggggctgggcctccaagttgagggaacagcacgtgcaaagtttgaaaggagagacgccaggagttcggagcgaagcgacgaagttcctccaatccttcctgcccctgtgccagccctgaaggagctgaatgagcaattccaatcgagggcgaaaggggggttggatggagggatgcaacttaaaggtgtatttatttggggcggggaacagcggaagtgagagtagttaccaatgatcaccttatcctaagagtagtgtaccgggcgccccacaagtgtccctatcatgcgttgttgagtctaatttacgtatagggaaactgaagctaggatgaaggagaacagatcaagccaggactctaccgcttatcggccagcctctgcggggatcttgggcgtcaggtcaccagctggctgctgggcagcgacggggcagcgctccctacacggccccgggcgagaggcgggcggggggacgcggaggatgcgcgcgcaacacccgagggtgggaggagagagaacagaaccgcggcgcgcccagaccgcacgaggtcgtgaaggtagccgcgcggaggggcgtggcttcgggcagacaggtcatggggaggcggagttaagggaatttttcagcaagggggcgaggccacttcggaagctgagagagggggcggggcctgccctgcagtcgaacaagcggggcgtggccttgcccgcacttgggcaggcgggggcgtggcccgtctctgagcgccgcggctctgggcttgcgcgcgcgggagtcaggggtcacggcggcgtaggctgtggcgggaaacgctgtttgaagcgggtgagtagaggggaaaaagggagttcggggcagtgggcctggtagggaacggggcttgagcagccaggcacatagatctgagagacggttgcgagggcaccctttggcccgggggcgcgcaggagagggcaggggccaggggtttcctgggcgagggcgcggggacgagcaggaaaaggccggggtgggggtggaattcctcggcgggcagggggcgcatgcgccgggcaccgtggggcgggacgtggcccgggaggagctggggggactgggtggtgcacgtgcgggcttggtgtcatcctggattcgctgggtgtttgagtactctgtgccaggcacttttctggaagcaggaacaagtcagagaagtccctgtctcgggaagacagacggtagacaagtgatgagttttaatagatcagtaaagcagtgctctggggctgtgagatgctctcagaaggaaactaacgcagggtaacgtgataatgagcgaagagcctgttgctttagctggagtggtccagaatcgaccgctctgggaccctcaagtgcaaagccctgaggtggaaggagcttggcgtatttgtagcaggagccgaggggacgagagaaacacagatgaggtcggagtcatgatggggaactagatcctatagggccttgtaaaacttggtatggaatttctcctttattctaggttcagcggggagccgtgggagggtttgagcgtggaaacaacacgattcgccccatgttttgaaaaactcaccactgagtggaaattggattgtagcaggaataagaatggaaggagggagatctgttaggagggagagcgtcctgcaggcagagaatcaggctccggttacctttgcgggcggagacagggggactggctgatggactgggcgtaggagcaaggggaagagtccaggatgactcctgggtttgtggtttgagcagcaggctggatggggaaggctaagggagaagcaggttggggttgccgctctgaaggcaaagattagtgggggagtgagtgggcagggtttagagcggagccaggagtgggcagggcgatgtcagtgcctcgcctcagcccttccactgaaggaacttgttgccactgtcttctcttttttttttttttttttttgagacagagtcttgctctgtcacccaggctggaatgcagtggtgcaaactcagctcattgcaacctccgcctcccgagttcaggcgagtctcgtgcctcagcctcctgagtagctgggattacggcacccactgccatgcccagctcattttttgtatttttagtagagatggggtttcgccgtgttggccaggctggtctcgaactcctgacctcaggtgatccacttgcctcggcctcccaaagtgctgggattacaggcgtgagccaccacgcacggccgcttctcctccttcctgcacttcccccccacaggtctctcttccccctagagaggttccttccctccccctgaaatgctcttccctctcttatgtgtttctgacagctgctgtttggacaggccctctgctgagcactggggagccaatgatcattcagtttggttggggaaggacaggagatttcagtccagagtgcgctgagctatggcggagcagtgatagtctttgggagccaagagaagaacctgtgcgctcagggaagactcaccagagtggttgatattcacagggagtttcaactcacatgtctttttttttttggtttttgagacagggtcttgctctgtcgcccaggctggagtgcagtggcgcgatctcggctcactaacctccacctcccgggttcaagcgattctcatgcctcaggcttccgagtagctgggattacaggtgtgtgccaccacgcccagctaatttttgtatttttagtagagacagggttttgtcatgttgcccagactggtctcgaatccctgacctcaagtaatcctcccacctcggcctcccaaagtgctgggattacaggtgtgagccaccacacccggcctaaactcatgtcttgaagtaaccggacactgtgcagagtgatgctggagaccccaacttgggcaagatgctgactccttttctcaaggagctcacaggctgaaaggatcccagctctgcattgtgcaataacgaaagtggcacaaggcgttgtgggaaccctgaagggcagctggtcagcttggaggagctaagcctgagctgagtctctggatgcagtggagtttcatgcagcgaacactgcctaaggcctcctgggggcccaccctgtgctgggtgatgctaaggtcccagaggagagtcagtccttgctctgccatccagaggtccctggctggtaagggaggaagacacacacccaggcagtccagagacagcagtcacagaggcctaggggaaggacaaggccgaaagcatgcaggtgagcctgggcaacatagcaagaccctgtctctacaaaaaatacaaaagctaggccgggcgcggtggctaaggcctgtaatcccagcactttgggaggccgaggcgggcagatcatgaggtcaggagaccaagaccatcctggctaacacggtgaaaccccgtctctactaaaaatacaaaaaattagccgggcgtggtggtgggcgcctgcaatcccagcactttgggaggccgaggtggacggatcacttgaggtgaggagtttgagaccagtctggcagacatggtgaaactctactaaaaatacacaactagctggacatggtgggcgcctgtaatcccagctacctgcgaggctgaggcaggagaatcacttgagtccaggaggcggaggttgcagtgagcaagatcctttcccaaaaaaatatataaataaaaataaagctgtgagattgggcaagattggatgaggtcattgaggaaatgagtgtctcactcatcgagaaaactggtgtctggcctgcagcgagcacgtggtgtcattttgttgctgaatctctgttaagtgcttgctaccgaagggtcgtgagaggggcagaggacagtgtttgccaagctctcatcctgtgccagggccaatgagaggggacacacaggggcctttccttcctaatgctgctgtgcctccactaacaagagcccaggttttgcccctggtgacaccgtccctcccaccgcacccccgcagccacagccaactgaccaagggcagccagtcagctccttccttcctcctccagcttcagcactgactctgggctcccacaagcccctgcgcttcctctgtcccacccgggtctctcctcgcagatcatcactccctgtccctctctggctacttgcacaacccgaagccagagccgctaacgacgcttgcttcttcctgtaagtcacacatgtacgcggttgtcacccaaagagcacaaacgcagtcaaagtcttcctcacacaaaaccccctgcacacgctcacggctgcaccactcacaaaaggtggaagcaaccctaatgtccatccactgatgaagggatacgtcagacgtgttctagccatacagcggaaaagtactcagcaaaaaagggacacagcactgacgaaaggccgccacacacatgagcgatgaacacattcagagaaagcagccagacacaagaggctgcatattccaagatcccatttataggaaatgcccagaataggcagatccatggagacagaaagttagatgagtggctgccaggggtgggggcagatgggctgaatgcagggagagagctaaaggatttaggctttttggggtgatgagagagttctaaaattgactgtggtgatggttgcctaactctgaacatactaaataccattgaactatatatactttaaatgggtgaattgtatagtatgtgaattatagctcaataaagcagttagcaaatgaagtcttctaccctgtcccccaggaaaccagtttcttagctctccttatagaatgatgcattaaaagcaaatagatttatacatatgccctgcattacaataaaaaagacgtctacatactccctgcattacaataaaaaagacgtctacatactccctgcattaaaagcaaaaagatttctacatactcttctgcccaccttgtaaatttgttactattttcattttatatatttcccccttaatattttgaaaagtttcaaacctgcagagaaggtacaaattgagtacagtgaacagccatggccctttgcctagattcactggctgttggcatgacacctcatttgctttatgctttatccaagcacatgcatatacctgtaccttttgtcctttttttggctgaactatttgaaagttgtggtcatcatgatacttcacctctgaaaactccagcagttaactcttttttttttttttttttttttttttgagacggagtcttgctctgtcacccaggctggagtacagtggtgcgaccttggctcactgcaacctctgcctcccaggttcaagcgattctcctattgcagcttcctgagtagctgggactataggcgcgcaccaccacatctggctaatttttgtatttttagtaaagatggggtttcaccatctttgccaggctgctcttgaactcctgaccttatgatctacgtgcctctgcctcccagagtgctgggattacaggcatgagccaccgcacctggcctctttttttttttttggtacagtattttactctgtcatgcaggttgtagtgcagtggggtggtcacagctcactgcagcctcgacctccccaggctcagctgatcctcagcctctcgagtagctgggactaaaggtgtgtgccaccacaccctgctaatttttatattgtttatagagacagggtgtcaccatgttgcctaggctgatctcaaactcctgggttcaagcaatccccctgcctcggcctccaaatgtcct

SEQ ID NO: 97742 - DNA, 20055 bp, Homo sapiens
cttgacctcctgggctcaaatgatccttctacctcagcctcctgagtagctgggatcacaggcacatgccactacacctggctaactttttttatttttagtagagacgaggtcatgctacattgcgcaggctggtcttgaactcctaggttcaagcaatcctctcaccttggccttccaaagtgctaggattacaagtgtgagccaccaaggctaaggctagcctccatccacctcttgatatacgcaagacagtgattctccaaagactcctcaccttgtttcaagctgagtcaacaaaaatcctctcacgtactaccatgaatgtagctgggaaacactgccctaagcagtagaaaagtttggggagaggggggcagttgtttatcaacccatcaacaactacttatctgccattccagtgcttccacaaattcttagagatcaacaatatcctgcgtcttatttttaacatatttctgggtagggcaataaggagcagaagtcactgggagtaaccatggtagacgtaactgggagcatggtgggtttcaggaaatgtaagatccctcttttccttatcaatccttccttcataagcactttctatttcctccagtctgacacttcctgcattataatcagtgtttctataggacttcgtaattttcaaaggcttttgaattccatcttatttaaccttcatcaccacctttataaacaaagcatatcctagtagcccatccctgcggatgaaaaagcctaaatccgtagactgaatgaagatagggaaagagaccctattacagttactggtgtcaataataaatagcacaggtagaagaatgcttccagtgtgccattccttgtaggctgtcttctagctgtttcattgtgcaggcagagtgcgcatcctacacttctcaatgctggcaataatagaagtaatactacttatcaaatggatgtttaaccaaagttgggagataactatcagactttaaagctctcttcctaaaaagaccataatttaatatagcagttttcataagaaagatgttaactgcaacactccccaattattatcttctaaaatacattataagaggacataaagaggactgttaaataatcaagaatgaattcactatttctaaaaatgctttaccagcctggacaacccagtgagaccccatctctgcaaaaaattttaaaaattagctggacatggtggcacatgcctataatcccagcactctgggaagccgtgatgggaggactgtttgagtccaggagtttgagaacagcctgggcaacactgtgaaaccccatctttataaaaaataaaaataagctagctaggcatggtggtgcacactcgtggtcccagctactcaggagactgaggtaggaggattgcttaagcctgagaggtcgaggttgcggtgagctgtgatcgtgccactgtactccagcctgggtgacacagcctgaccctgcttcagaaaaacaaagacaaaaaagaacaaacaccagaggtatgtgtcctgcggtaaagtgcagggatggtggcggtggatttagatgcggtgggaacatctaaggaaaactgggctctgctgcagctctactcccaacaaattttgatgatcctcaggcaagacacaaagacatgctataaactgaaatttgttaccatatacttttttttttttttaaagacagagtctcgctctgtcactcaggttggagtgcactggcacgatctcggctcactgcaacctccgcctcccaggtacaagcgattctcccacctcagcctccccagtagctgggattacaggtgtgtgccaccatgcccagctaatttttgaattatttattcctttttttcttttcttttttttttttgagacagcgtcttcctctgttgcccaggctggaaggcagtggtacaatctcggctcactgcaacctccacctcctgggttcaagtgattcttctgcctcagcttcctgagtagctgggattacaggtgcccaccaccatgcccggctaatttttgtatttttagtagagacggggtttcaccatgttgaccaggctggtctcaaactcctgacctcaggtgatccacctgtctcggccttccaaagtgctgggattatgagccaccatgcctggcctactttttgtatttttagtagagactggctttcaccatgttggccaggctggcctcgaactcctgacctcaagagatccacctgcttcggcgtcccaaagtgctgggattacatgcctgagccaccgtacctggcttgttaccatatacttttatagcacagtacttcacattgattaaagaactctcatactaactgtgtcatttaacatacacaaccaccaagcaaaggagacaggacaaacagtagcatcccatttccaaggctgagtgcagtaatggaaaaaataagagtttttatgaataagacaatctgagttcaaatcccaggcatcttgttcaacttttcagaggctttgtttcatcctaagtaaagtgtagacagtacatacacctcatggtcttttagaatgagtcaaggattgagtactgcacgtatacagtactcaatgtttccttccatcattccacagaaggaagggctacaagttcacacacctactctgactttaaagctccaagcagattatctttcaactcccatgctcaacctttccgtgctcagattcaagaatgtaactcagcatctctttaaaaggtgtttaaaagattagtcactgagatactctactaaaagttttttgttcaagtagatttgtgaaatgtcactctcttgaaatctcacaaagtgtgtatgtgtgtatatatatgtatgataccgaaggttctgagaagtcttgcaataaagaaatctatttgaactcattctaactagcatttcccaaaagtgcatttaatggaatccttttttacataattaccataaacatccacacagacctaactttcttttaaacatacttttaggaaaaatggttttgataaattcatgtctaacaaattataataatagattagattataatagattaacaatattaataacaatagatattattataggacagggcacaagaaattatcctttaaacaagatccctaaatcattcttttgcagcctgcattgaaattgcacattgcctagcgtcaaattcagaaaaatttatttaggcaactaagacatttttatttttggatttcagaataagtctgccacagacacaaagattccaagaagtggctcataatgtcatctagcagaagacacacttggggaaaaaggtgggggaggggtattatgttttgttgcaaaattgattttgtatgaggtttcttactccccaaatctaccttcagaaaacggtagtatctaatgatctaatgccacatcactacctctcctgtccttatccttggtctcctgatgaccgcagaaagcaagagagagccagagtggaacgagtgagctgttaactataaattacaaaaatgaggactccttttttctctgaaaaccaagaaagcggttactctgtcacaatccaaaaaaaaggaaattaatcaatcatcagtatttgtcctgaaattttccgcagaggtctctggtgtgattaaaaacgtgggggaaggtcaggcgcggtggctcgcgcctataatcccagcactttgggaggccgacacgggaggattacctgaggtcagaccagcctggtcaactaaaaatacaaaaattagccgggcgtggtggtgcgcgtctgtaatctcagctactcggaaggctgaggcaccagaatcgcttgaaccccggaagcagaggttgcaccactgtattccagcctgggagacagaacaagactctgtctcaaacaaaacaaaacaaaacaaaacaaaacaaaacaaaacaaaacaaaacgtggggaagaggccgggtgccatggttcacgcctgtaattccagcactttgggaggctgaggtgggtgaatcacttgaggtcaggagtttgagaccagcctggtgaaaccctcttctactaaaaatataaaaattagctgggtgtggtggcacatgtctgtaatcccagctactggagaggctgcgacagaagaatcgcttgaagctgggaggcagaggttgcagtgagctgagctcacaccactgcactccagcctgggcaacagagcgagactccgcctcaaaacaaaaacaaaaaccgtggagaaaatgctaaactcgatttcttctgaacctatgctaagatgtcaaggtactgtgattcttctaaaagaattttaaaggttgttatgtttggtgtcctaaaagtgtacatggattttatattataacctacatcaagaaactcattcaggccaggcgccttggctcatgcctgtaatctcagcactttgggaggccaagaattccagactagcctgggcaatatggcgaaaccccgtctctacaaaaaatacaaaaattagccaggcatggtggctctcccttcagtcccaactactcgagaggctggggcaggaggatgccctaagcccaaggaggtagaggctgcagtgagctgtgattgcaccactccactccactccagcctgggaacagagtgagactctcaaagaaaaaaaaaaaaagccttattcacagataattttttttaaaaatggaaactaaaatagaatttaaaacccaagctgctcagtttcttggaagatggatttttcctacttggtaatatactttgtatatctcgactattattgtgcatgcaagcacctctaagaagtacttgtatctgcaatgaattcttaaacctcagggagccaaataaaaagacaaggcccgaggaattctttcaaaaattaaagtaacatttcatatttgcttattctaacagacaaagaataaagaaggaatccgctaagttgcaagctgaggtgcagacaagtgctggttcacagtgacatcctagaaggaatgctctggataagagcttcaagcttctgtggttttctgaggaaagtgaacggaatctagacgtgtcctatagctcaaaaaatcagcgctatggaccacagcgcctaacagagtaaaataatacactgtgcagtttggccactaacagcaagagtgggaaggggcgaagaggaaccttgattgcccgacaccagggccacctgaaaagtcatcttgacacttcagtctttccattttgagatcggaagctttaaggaccattaaatcgctgccgctgccacaccaggcccgacggagcagaaaggctgcgctcacctgcggaagcgaccgggtgcacacctgccgggtggcgaggcccgcaccgtcacaccccgccccggcttacctgcccttcggtgatttttagcgtcaacttccatcccttcccacccatctggatccaaccaagcgcaagggcgggggagggagaagctagtgtcgcgaggaaaagcatccccgcaacccaccgcaggctttctctccttcctccccattccacacaagaggcaaagccacaccgcctctcctaaccctcgtctccaatgcaaggcctgaaatacttagaaaaaataataactgtttttaaggaaaagtaacatccccgctcccttccgcccctcaccttcacgaaagcaatcggggttgtggtaccttcgatatctaacaggatcacggtgacttcggcggggaccgaaagcacgaccatttccctaccggatgctacgggactcggcctgctgttggggagggcggagggcggcgccggctgcggctgcggcccccggtaccgtcttgggcttccggcggccccgcgcgatctcggagccagcgaccaagtgcagcccgccgcgcgtggggagaggacacttctgcacacctggaactggaaaaggcggccgcccaggagccctgaactcgtgagcaggacggggcaggagcccgagaccacgtgggcaggaaaaggggcggcccttgacgggttcggcggggcggggagggtgaaggcgccagcgccgattggccgccgtcaggcctcgaactggatccgtcaaaatgggcctcgcgtgggcgggaacaaagaagcgaacgcgggagcagggtgcgcgagagcgcgccctccgcagacaggttgagcgagcgggagaggcccggggcacgtgcagaaaggagccccgcgagtggcgcgccggggatgtgagtgccccttgccctctactgaatccagccccctccccgcccaccgcctccgcctttgcatagatacagtcatctggccagcccccgcccctcctcccggcgtcagcccgccagaggccgcgcggggcccgggcttcggccgatcagcccgggaggccccgccgcgcccccttggcccgcgcgcccgtggtcacagtggaagaggcgcccgcgctgcgctgcccggaggagccgtcgcgcgcccgcttcctgttcggctggttcctgccagctcgaggacaaaacacgcgtgcgcgcggcgggcgagcgcgctcgccgcctcagtcgccagcgccgggcgcagtccgcctttttccggagcagactggccgcggtgctagtcggtagcagcggccgccgcagcggctccgcactggcgaaccgagggcagaaaaaggcggggttgacggctttttggtaggagtgggctggaccggacgccagagacaaaggctcccaaggcaagagggactgtggccctgcgtcggctctgctcggractgctgaccccaggaatttacgccycttcgtttttctcttctgattcttctcttctcccaagcccgcgtcccctcacgcgtggcctctctccttgccgggagggccgcgatggaggtcccgcccaggctttcccatgtgccgccgccattgttcccctccgctcccgctactttagcctcccgcagcctytcccattggcggccgcggccgccgcggcagctagccccgctccycccttcgctcgctcccagctccgcccggcagggggcgcgccgggcccagcgccacgtcaccgcccagcagccctcccgattggcgggcggggcggctataaagggagggcgcaggcggcgcccggatctcttccgccgccattttaaatccagctccatacaacgctccgccgccgctgctgccgcgacccggactgcgcgccagcacccccctgccgacagctccgtcactatggaggatatgaacgagtacagcaatatagaggaattcgcagagggatccaagatcaacgcgagcaagaatcagcaggatgacgggtaccgcacgcttcttcccccgctccccctcccccagcgcgccgcacgcgcccttcgttcctcgtgagccgcgcgctgcccccattctttctcagagtcgattccccgcgtgccttctgggccccactagattggagggaagaggaaagtaagagatcgagggggtgactggagagacccgggaagagtgggggaagggcggaggggttggaggaggagggcggcggcgtctgtgtcccgagcgcgcaggcgccgcgtgggacccgggggggaggggccggcctcccagcgctgcacgctgcagctgccgccgcctcttcattgtgtctctgttaccactckgcgcggttttcctgggaagagttttagaggactgagttggggcacaagcaggcgactggtacccagattcacaaaacgtgttatgattgatgagttctctgggtggaacgttggcttgacagctgagaacgaagatggacctaagtaagataagatgtgagggattcatctaggaagttgtgccttctacctaaaggaatctgggcagaacctttactgtattttattggtctcttttgagctttgctttatgtagtgcggacagtgagctgtccgctggtttgagtaacttcgttgggatattgggatttttgtgtgacatagattaaatgtaaacatgaattaaattgcctacacttagggggtaaatgtccctgtttttatttcacgatttaattccagaactgaaggatcatttgagttattgttaattttttttaaaaacacttttatttctagtaaaatgtttattggaggcttgagctgggatacaagcaaaaaagatctgacagagtacttgtctcgatttggggaagttgtagactgcacaattaaaacagatccagtcactgggagatcaagaggatttggatttgtgcttttcaaagatgctgctagtgttgataaggtaggaactatgttttgcattgtgctgcttttgtggtgttttgcamatttttctgggggttatatggtgctgtyagattaaataaatctgtcttgtaggttttggaactgaaagaacacaaactggatggcaaattgatagatcccaaaagggccaaagctttaaaagggaaagaacctcccaaaaaggtttttgtgggtggattgagcccggatacttctgaagaacaaattaaagaatattttggagcctttggagaggtgtgtgattatgtttacacatgttaagcttgatgtgtttataaaatgttcaatccttgtccgatttatgcagggcagattcatgtttcctgtaagagtagaattaaatgactgctcaagtcgcttccagtgactgtaccttgatttcattgctgctctgatggaaacccaactatctaatttagctaaaacatgggcacttaaatgtggtcagtgtttggacttgttaactagtggcatctttgggtacaaaataatattaatttctctcartgcttcaaatatacaacaaatcactgtaggctgatgttgatcataaagcagtgatgtctgtatagaagtcacccgataagaataacatgtttaagttgaagcctgaaaaggcctttggcattctgacactgtaacgttttacaattatgggatgacgttgagtgtgcatctcgatttcagattgaaaatattgaacttcccatggatacaaaaacaaatgaaagaagaggattttgttttatcacrtatactgatgaagagccagtaaaaaaattgttagaaagcagataccatcaaattggttctgggaaggtaaagccatttaagcactttaaatgaaaatttaaataattgaaataatttcttgatgtggagaaaaataaaatgatttaattttagaacttcggtaaaaattatactttcatgttttttgtttatagtgtgaaatcaaagttgcacaacccaaagaggtatataggcagcaacagcaacaacaaaaaggtggaagaggtgctgcagctggtggacgaggtggtacgaggggtcgtggccgaggtgagacttaattcttgaaatatgactccgtggtttatttaagctgtatactgctgaatatgagtagtcctgtaccaaagcaaaactttaaacttaaaaccattccagcggaggggggactgttcagcttagtggaggttgtgtgtggtggttttttgttgtgagctcactggtttcaaaaaactgttaaaagtgtggccactttgacaattagtgtcatcactgataggaaaagtgtaccattacatgatacaccgtggtgtgataggttytcttgggcaggagtccttgttttaaacagaacagtgtacctgtcttcggctttaatggaaaattgaatgattttccattmagtttaggaagtttgatactggcacaattggactttctgcctccttttttataacagctggaaaaatagtttttcaagcagatagcaatatatatgtccattctgccctttaagatttgcagagtgagagacaagaacgcatcattttatgttagaattgggggtcagaagttgtttcctaacaatcattgtgcattgtttcaggtcagggccaaaactggaaccaaggatttwataactattatgatcaaggatatggaaattacaatagtgcctatggtggtgatcaaaactatagtggctatggcggatatgattatactgggtataactatgggaactatggatatggacagggatatgcagactacagtggtaagaatatttaacttaattttataaagcagtggtattaaaattcattgttaacatacaatcctgttctgaaattgtgtgtatgggctttccattaaagtgttcggagttaagtgtttgaggcatgttacaatcataggatgattatactaacatagactggtggttataaatgaactaggatgtatgatttatgagtagcatctaatgggtgctaaaatatcttaatactttttatttagcatgcaaagatttgtagatttaatagtttgtgtttgtaaagaaagttttgtagaaaactatcttaatgagaattctgtgttttcaaaataggccaacagagcacttatggcaaggcatctcgagggggtggcaatcaccaaaacaattaccagccatactaaaggagaacattggagaaaacaggtgtgtataagagtacaggaaaacagtagaaatgtctaatttaatttaaagatcaatagacaaatgaaacgtaaaaacaaaatactatgtagcctgtttttactaaattgttgattttttaattgctttatgagcctgttttgcctaaagtgtctatagatctttaactttaaagtcttatctcactttctttagtattgcagaaaaacttaagagtttttctgtttgcttttgtgtaccaggtggtctagaggaataattaaacattttagaactattaacaggtaaagtactgaaatgggtacaacttaaggaaaacaagaatgttgtcttctaactctgacattataccttgtttgtacccgccagcgggaacttcattgcaggccgtgtgtcaccctgaccacgtctatctctgggggtcgcacgttgcgggcagagcgcaaggcatacaccagaaaacgctgtcctgtggtatggtctcttccaacttcatgtaccagcgtaaagattaaagtggaaaacttcagactttggcttcatttttaatctttttggagattaagtgtctaaacttaacttaaatggttttttacaggagttaaagtacataaatgcctttttacagcttaatcattttggtcttctgtttagtgttgtatttcaattgtggagcctcattttaagtgttcattcttttaagatttaatgcttgctttttctttttatagctaatagtgaaatctacaaaccaaaacaagaacttttaaatctgggatataaattaaagrtcatatgcacagatcaatttatgttcttgtaataaacttattaraaattggtgtttgtgatagcattttacttgggttactagagatgcttctagtagaccttaatctagcatagttgaacctctgaatatgggaaggttgtattcccagattctttcctgaatagatttgaatttaatgtcatttgggaactccagggtgagtttattgactacycaaactgtattttaccaataaatatgcatatgatctttaattattgaagaaaataaagtgaggacttaaaacaattcatgaaagtggacctttaaaagcttgtcagagttgcacaaatctaactggtattttgtttttktttttaggaggagatgttaaagtaacccatcttgcaggacgacattgaagattggtcttctgttgatctaagatgattattttgtaaaagactttctagtgtacaagacaccattgtgtccaactgtatatagctgccaattagttttctttgtttttactttgtcctttgctatctgtgttatgactcaatgtggatttgtttatacacattttatttgtatcatttcatgttaaacctcaaataaatgcttccttatgtgattgcttttctgcgtcaggtactacatagctctgtaaaaaatgtaatttaaaataagcaataattaaggcacagttgattttgtagagtattggtccatacagagaaactgtggtcctttataaatagccagccagcgtcaccctcttcyccaatttgtaggtgtattttatgctcttaaggcttcatcttctccctgtaactgagatttctaccacacctttgaacaatgttctttcccttctggttatctgaagactgtcctgaaaggaagacataagtgttgtgattagtagaagctttctagtagaccatatttcttctggattgtaataaaattgttagtagctccttttactttgttcctgtctctggaaagccatttttgaattgctgattactttggctttaatcagtggtcacctagaaaaagctttgtaatcataacacaatgagtaattcttgataaaagytcagatacaaaaggagcrctgtaaaactggtaggagctatggtttaagagcattggaagtagttacaactcaaggattttggtagaaaggtatgagtttggtcgaaaaattaaaatagtggcaaaataagatttagttgtgttttctcagagccgccacaagaytgaacaaaatgttttctgtttgggcatcctgaggaagttgtattagctgttaatgctctgtgagtttagaaaaagtcttgatagtaaatctagtttttgacacagtgcatgaactaagtagttaaatatttacatattcagaaaggaatagtggaaaaggtatcttggttatgacaaagtcattacaaatgtgactaagtcattacaaatgtgactgagtcattacagtggaccctcygggtgcattgaaaagaatccgttttatatccaggtttcagaggacctggaataataawaagctttggattttgcattcagtgtagttggattttgggaccttggcctcagtgttatttactgggattggcatacgtgttcacaggcagagtagttgatctcacrcaacgggtgatctcacaaaactggtaagtttcttatgctcatgagccctcccyttttttttttaatttggtgcctgcaactttcttaacaatgattctacttcctgggctatcacattataatgctcttggcctcttttttgctgctgttttgctattcttaaacttaggccaagtaccaatgttggctgttagaagggattctgttcattcaacatgcaaytttagggaatggaagkaagttcatttttaagttgtgttgtcagtaggtgcggtgtctagggtagtgaatcctgtaagttcaaatttatgattaggtgacgagttgacattgagattgtccttttccctgatcaaaaaatgaataaagcctttttaaacaaaatccaaacttttaatcaagtcttgatatgtatgactgagaaaaaatacactacatctagagatgattgagatgttttgcaaagaattgaagggggagtgagaattggtttttcttgcaggggctttgaactctagatttaattcagatttcagggtctatcagttcaccaactgatgcaaatttgaacagatactctaaggytaagtgtcctaggttggatgaactgaagctactatcaagatctcgttcccaaggattaatttagaacaaagtaattggacaagtttattggggaggggatagaaatgaattctaaagtacctataacaaatactctgtgtatgttttttacatcgtatttgccttttacattgtttagaccaaattctgtgtgatgttatcctcgggaagaggatagaaattaattctaaagtacctataacaaatgctcggtttgtatatgtttttatacatcgtatttgccttttgcattgttcagaccaaattctgtgtgatgttatcctaacaaaacaccttagtaatttctttggttaacatgttaatctgtaatctcacttttataagatgaggactrttaaaatgagatgtctgttgggatgctagcgtggataagcagagcttattccattactcttcagtggatctttattttcataatggcagagatcctcactaatcttcacaaaacttaatacaagggcatatctgaacaattaagctactttccagtaccaagatttgatttaatgtcaatcaggatgctaggctgcgtgctgtagatcatgcctgtaatcccaagcactttgggaggccaaggcaagtacattacttgagtccagcctgggcaacatggcaaaaccccgtctctacaaaaactacgaaaattagctcgatgtgatggtgcacacctgtagtcccagctacttgggctgaggcgggacgattgcttgaaccagggaggtgaagtgtgcagtgagtcatgtttgcgccagtgcactccaccctgggcgacaaagtgagaccctgtctcaaaaaatcacaggatgctaaacttcaccaattaaaaagttgactaagctggccgcacgcagtggctcatccctgtaatcctagtactttgggaggccgaggcaggtgaatggcttgagtccaggagttcaagaccatcctggccaatatgtcaaaaccccagctctactaaaaatagaaaaattagccgggcgtggtgctgtgcttaggtgagaggattgctggagcccaggaggtagaggttgtagtgagatttgtgctccagcctgggcaacagagtgagaacttgtcaaaaaaaaaaaagttgactaaggccaggtgtgttggctgcagttgagctatggtcgctccattgcactcttatctggcctaggcaacagagtgagaccctgtctttaatttttttaaaagttgattcaaaaacatgtaagtgtatgaataatttttagttatagatgtgtgtgtataccatttgaattgattcttgagtagttagaaagggtcattcatagaaaaccccctttccttaaactttcagcgaaatagagttgacatctaatctgtggtttcaactttaagcaaaaacaatctaaatttatatattttttatagtcactagaaaatattgtttataaatatataggctgttcttttaggattggttggggtcttacatttgtcttgaaatagattagatgtggaatttcagcaagatttagttaatagcaaaaaataaaaatacaccttagactttactactttttataaacggtaggaaaggatatactgatgttgtgggtattacaaggtaatgctgaacattctgaagaccttaacttctgctgctcttccctccccctccccccgccccaacaagaatgaggttggaattgtgcttttttttttttttttctttccttccctgagtcggagtttcactcttgttgcccaggctggagtgcaggctggagtgagtggagtgatctgggctcaccgtaacctcctcctcccgggttcaagcgattctcctgactcagcctcccaagtagctgggattacaggcatctgccaccatgcctggctagaatttttgtatttttagtagagacagggcttcgccatgtcggtcaggctgctctcgaactcctgacctcaggtgatccacccgcctcgacctcccaaagtcctggggttacaagcatgagccaccgtgccccgcgggaattgtgctattcttaagtgtcagtttaatctctggttttaccctttaaagacatgtaccacttcaaagagaccactcaaagagatatacccattcggagagctgtatcataatcttggagagtagtgagactaaagtgtagtttgaaaaagtatattcagccagacgcagtggctggctcatgcctgtaatcccagcactttgggaggctgaggcgcgcggatcacgaggtcaggagttttagaccaacctggccaatatggtgaaaccccatctgtaccaaaaatacaaaaaagcagggtgtggtggtgggcgagtgtaatcccagctacttgggaggctgaggcaggagaatgttgtgaacccgggaggcagaggttgcagtgagccaagatagcgccactgcactccagcctgggcgacagagtgagactccatctcaaaaaaagaaaaaaaaaaaaaaagtatattcaacataatgttgtcacttaaaatccaaataaccaaaaaggctaattttggtttcttaaagaccagcacaagctagaaaatgtgagaaactttacttgcaggcaagtttttctcatactcttccaatggtaatctccttttgggagtctgaccaaaagtgaattctcttcaaacccaaaaaaatgcatgtctataaatattttcaatgtagtttcaggaaaattagagacttagaaaactgttttaaaatgctcttgaagctgttggcttttatggtaacaaactgactaaaattgattgaatttgttgtaattgatgaggttccacaaagggagtttcttcatatgttctccaccttccacctgggtatttgtattggctggtgaacactcataggggattgttttattgatgacagggtctcactctgtcgcccaggctggagtgcagtgatgccatcacgtctcactacagcctcaacctcctgggctcaaccaatcctcccacctcagcctcccatgtagctggggccacaggcatgtgccatcatacctagctaatttttttttttttttgatttttagtagaaatgaggtcttgccatatcgcccaagttaacctttttttttttttttttttttttttttggtttatcatcttagagacagggactcactatgttgcccaggctggtctcgaactcctgggctccagtgatcctaccgtttaggcctcccaaagtgctgggattaccagcatgtgtcaccatgcccagctttagctttaatcccctgattttaaaatgaggaagtcagctaattgaatgcaccaatgctgattacattctgcagtctattaaactataaaactcctatcaggcatacttgactttaagcattaagactggtcagtaatctttttttttttttttttttttttttttttttttttttttttgagacggagtctcgctctgtcgcccaggctggagtgcagtggcgggatctcggctcactgcaagctccgcctcccgggttcacgccattctcctgcctcagcctcccaagtagctgggactacaggcgcccgccactacgcccggctaattttttgtatttttagtagagacggggtttcaccgttttagccgggatggtctcgatctcctgacctcgtgatccgcccgcctcggcctcccaaagtgctgggattacaggcgtgagccaccgcgcccggccagtaatctttaatacacttggtttctgagtgttgagctctattgtagcaaagtaggattatattacaattgatccattcttgttcctttaatggaatttgagcctggataatctggagcaactactcttcccatgaaagacatggcctatgaaattgactcactatttagattgcccttgaaccatgaaacatctggggcatatatgtttttcatagaccctgcaagcagaggaatgacaggagggtgggagcagtgggggttaagtggtattatagaataatttcaatatttcatcaccaggaaaccctttaaatttcttctctccatagacaatgtgttttgaatggctttatttgtcaaatatattgctctcattatgtaataacatttctattaatcaaagatatatagctgtcagaactacaatgtgataattcgcatcataccaagttaatttaatggcagccaaatcaagaatatttctgttaacttgtgtacattttttaatgatatgtaacgtctaacaggcttttaaaatatcaaaaacgctggctgggcatggtggctcacacctgtaatcccagcactttggaaggccaaggcgggcagaccatttgaggccaggagttcgagaccagcctggccaatatggtgaaaccctgtctctactaaaaatgcaaaaattaggtgtgatggtgcatgcctgtaatccctgctactcgggaggctgaggcaggagaatcgcatgaacctgggaggcagaggttgcagtgagccaagatcgtgccactgcactccagcccctaggcgacacagcaagactctgtctcaaaaaaaaaaaaaaaaaaaaaaatagagttttagaagtgagagtaagaggcaacatttcaagaggtaatggcttaaaattttccagaagtgacaaatgaatctacaaatataatataccctacaaattgcaattgcaattaggaaaaataaataaaaatctccacgaagatgcactatggtaaaaccaaaaaaatcaacaacaaacaaaagcagccacatctagaaccaactaccagtaatcaggaaaagaaataaaggcacatgttaaactaccatgaagatgcaaccatccaaatctaaaatgtggaaaattcataagaatatcccatttcttcaacaagtaaatgacatgaaaagaagtgggaaatgtaggtggatctaagattaaaagagacttatggtaagcaacatttattatagtaagcaagaatataaagtgcaaattaatgatcaaaaagacaaaggatccagcctgggcaatagagccagactttgtctcaaaaaagaagaaaaaagaaaaaaggataagtgtgggcaacgaatgtggagaaaagagaaccctttcacactgtgataatataaattagtacagccattatggaaaacaatatagaggctcctcaaaaaattaaaaacagggctaccatatgatccagcaatcccattattgagtatatatccaaaggaaatgaaatcaatatgtcaaacaaatatctgcactctcatgtttattgcaacattattcccaatagtcaagatatagaatcaacctaagtgtccatcatcagaagaatggataaaaaaaatatggtagggctaggcgaggtggttcacacctgtaatcccagcaccttgggaagccaaggggagtggatcacctgaggtcaggagtttgagaccagcctggccaacatggcgaaaacccaaaatagccaggtgtggtggtgtgcgcctgtagtctcagcaactcgggaggctgaggcaggagaatcacttgaaaccaggaggcggaggttgcagtgagccaagatcgtgccagtgcactccagcctggatgacgagtgaaactcaatctcaaaaaaaaaaaaaaaaaaaaagataaaagcaaaatctgtgacaacatcgatgaacctagaagacattatgttaagggaaatacaccagacacagaaagatgaatatcacatgttctcatttacatgtagaatctaaaaaagttgatttcacagaagtagttaatggaacagcagttaccagagactggggagggtagggagaaggaggggatgggaagaggatggtcaacgggtacagagttacaattaggaagaataaatgctggtatcctattttacagtagggtgactatagtcaaaaataaggtatatctcaaaatagctagaagaaaggatttttatgttcccaccataaagaaatgataaatgtttgagatgatggatatgttaattaccttgaattgatcactacacaatgtatacaggtattaatacatcatattgtatccaataaatatgtacaattattgtgtgtcaattaaaactttttaaaaattaagtacatcatttttattatgacattgtacaggttttatggaatatagagagttatttcccatgtttgaagaattcccatcctatgagtcgtgatgtaccaagagtaccacccaatatagaaatttaaaaatcactttcccaggctcccatatacccagagcatagacatgttaactcagctctatcgatcagaattctcttgcattggactttgagcctgaagggtgaa

SEQ ID NO: 97743 - DNA, 99110 bp, Homo sapiens
gaggctgaggcaggagaatcacttgaacccgggagaaggaggttgcagtgagccaagatcgcaccactgcactacagcctgggtgacagagcaagactccgtctcaaaaaaaaaaaaaaaatccaaatgtctgcagtttagttactagtattgtaccagtattatttttttagtttaacaaacataccatgatcatcatggtcaacatttaggaagctgggtgaaacaggaactccatactatctttgcaacttttcggtaaatctgaaatttttctaaaatgaaaatttattttaaaaagttaatgtgggccaggcgtgatagctcacacctataatccctgcactttgggaggctgaggtgggcagatcatctgaggccaggaattcaagaccagcctgggcaacatggtggaaccccatctccactgttatacaaatataaaaattagttgggcatggtggtgcacgcctgtagtcccagctactcgggaggctgaggcacaagcaatcgcttgaacccagaagacaggggttgtagtcagccgagattgtgctactgcattccaccctgggtggcagaccgagaccccatctcaaaaaaaacacaaacccaaaaagttaacgtgaaaaaaatccatgatccttatttttcctgatgcatttgggtgtttgtgtgtttatatatatctatcttttagagtataatttctttgaggccaaaggtataatgtgtatctctttggtataattcttaaaatattagtaaaattttcagaatttaaacattgaacaatcaagttcggtttttctgaagagccctaagtagaacagcttttcaattaaggtctctggctgctgtggaactggagggtaattggtgagagtctcctctctggggcctgtcaacccaagagtaatgacttctggccacttcagacctgaggtaatttcaaaccagcacaagtttccatttgttctctttatctagtctgctctctaagttcagttattcatgtggttcaattaccccgagatctcaagggagagaggcagggatttaagaaggaaaagaacagacacagctccatattttatgtggcatacaatatgtaggatgtatgatacttctgcacacaatggtggttcatatcagtgggatgtggtggctcacacctgtaatcctagcaccttaggaggccgaggtgggtggatcgcttgagcccaggaattcgagaccaacctgggcaacatggtgaaaccctgtctctaaaaaaaaaaaagaaagaaaggagactttataacaattaaaaaaaattccccccaaaatcatctgttcatcagtgaggatctgcagatgtctctgctttgtcccatgcatatttgtcatttttctaaaaggttgattttgcccgggcacggtggcttatgcctgtaatcccagcactttgggaggccgaggtgggcggatcatgaggtcaagagattgaaaccatcctggacaatatggtgaaaccccgtctctactaaaaatacaaaaattagctgggcgtggtggcgcatgcctgtagtcccagctactcgggaggctgaggcaggagaatcacttgaacccgggaggcggaggttgcagtgagctgagatcgcgccactgcactccagcctggcgacagagcaagactccgtctcaaaaaaaaaaaaaaaaaaaaggttgattttttctaaaatgggttaaaatttcttaaccaaaaccttagaaattagagttcttggcacatgactttgtataaagtcctatttttcattaagtggcatctgttgtcttatttgtgggttgactcatacttaaagcgactgctttccacagatttgttcatcagcaaaaaagcatacaaatgcaggaataattaccattttagaaacagtgaggatggctctatccatctataaaaactggtggggttggtgtaagacaaaattggctaataagagaaatagagctagagaaatagatagaaggaaacaaaacacccagccagaaccagttagttctctggtcatttagacaaggttttactggtacttgtgtgggtttggtagttaactgcagaaccatatgtggctcatgtgtttaataactgcaaatgtttactcttaaattcacttgcggtatctaaattatgaataattaattccacagcatgggattggggaacctcaggaaatatttttaattatctttattaaatcctaaattaaaagcatcacttcaggtgttaagaacccaggatcccatcaacttgtttacgtatttttttgaacagatgatagtggctgtgtaacaaattacccctaatttaggagctttagaaccacgaacacttatctcccagcttctgaggctgaggaatctgggagtagcttagttatagtcagatggtaggtcaggggctgcagtgatcttaaagcttgcctggggctgaattccttccaagctcactcacatagtctttggcagctccttggtgtttgttggctgctgacctgttctattggacctctccatagttttcctgagtgttctcatgacatgaaagctggcttcccccagagtgtgtgattcaagaggaaacaagcaagcaagagagcacctgagatggaggacagagtttcttgtgtcctaacctcagaagtgacatcacttcggctgcatgctagtggtcacagaccaactatggcccagtgtagaagaggaagcaggcatcattgggggccatcttggaggctgggctaccactgtggctgtcaaatctttgaggtatttatactctattggaaaactttaaaataatgacctaacagctttaattttaaatgtcagtatttatgctgaaagtttcataatttgctactactacgctaatgatgaaaaactttaaagatacacctagggggtatatagttgtttttttttttgagatggagtctccctctgtcgcccaggctggagtgcagtggcgctatctcggctcattgcaacccccacctccagggttcaagtgattctcctgcctcagcctcccaagtagcttggactacaggcacgtgccactgcgctggctaattttttgtatttttagtagagacggggtttcaccgtgttagccaggatggtcttgatctcctgacctcgtgatccgcctgcctcggcctcccaaagtgctgggattacaggtgtgagccaccacgtctggccagggggtatatagttttaaaaaattattttggtgctgagtgcagtggctcatacctgtaatcccagcactctgggaggccaggagtttgagatcagcctgaggaacatagcgagactccacttctataaaaaaaatgtaaagattagccaggtgtggtggtgcatgcctgtggtcccagctactgaggagggtgaggctggaggattgcttgagcccaggaggtcgagactgcagtgagctgtgattgtgtcacggtactccatccttggctgcagagccagaccgtctcaaaagataaaagagccgggcgcggtggctcatgcctgtaatcccagcactttggaggccaaggcgggcagatcacgaggtcaggagatccagaccagtctggccaacatggtgaaaccctgtctctactgaaaatacaaaaattagctgggcatggtggcgcacaactgtagtcccacctacttgggaggctgaggcaggagaatcccttgaacctgggaggcagaagctgcagtgagccaagatcatgccactgcactccagcctggcaacagagcaagactccgtctcaaaaaaaaaaaaaaaaaaaaaaaaagataaactaattaatctatccagtgcccctcttaccatattcctttggctctttatctcccccacgtggtgctcttttatcttaaaagtatgcacaattgataaatgaaagatgaactgcaaattggaataatttgggtcctgatttgtgaattgaaaagattacttgaaatttggaatgtccctggaaatctaggacttctggttattcaggccaggcgcggtggctcacgcttataatcctggcactttgggaggccgaggcgggtggatcacctaaggtcaggagtttgagaccagcctggccaacgtggtgaaatgccatctctactaaaaatacaaaaattagctgggcgtggtggcgggcgcctgtaatcccagttacttgggaggctgagacaggagaatcgcttaaacctaggaggtgttcagtcggttgtagtgggccaagatcacgccattgcactccagcctgggcaataagagcgaaactctttcccccaccacccccccccaaaaaaaagaaaagaaaatggatcgggattttttttttaaacggcatttactaaacagctaagtaccttctatgagcaaggcactgtacaagagctgttggggataccaaaataatacaatctacgatctactaaagttacaagccggacagtatggtgactggatgttcagaaaagaaaccagatgacattattatggtacaccaaaaaagccccccaaaaaccgtactcaactgtcacattcttatggaatacaatttttacagattgtatacaatttgcatgtgaaattctgcttactttttgactaggtatgccactaatgggtatgtttaataaagatattttatacttcagatgtacagaccaggtccggttaattttagccaacaatgtattgttgaaaaagacgctgatattttactgcggcaaaccaccattaacataaattttaaccacagtttgagtattttattaggaataagccttgaaacttgaataggactagtattcctaacaatttaccgtttcataataaaggctgtctcactcttaagtggaaaacgtattatgtcctacttttataaactttggttgaactaaataaaacagcaacatgtacccaacgtttttagactgttttattcagtaccataaacattcactaaactatacagagctaaaatcatgcaaaagattgcaaaacaaactgccttgggaaatttccagtctaagctaaatggaccaagtataggattgaattttaagaagttggtgggaagattccagctcttgtactcacaggtaaggtcctaggattctatttgttgaagtgtctgcagaccctctccctacagcaggggcgtggagcaaatgtgcattcaggaagtgcttattagtccccccaaaacctttttcgtgacgacagacggatggaggcctcagacgactccggcagtaggaccctgaaccaaatgcctgagctgcgctcgaaaggctcgtctcgcaggagctggcgagtggcacgggcttcggtggccgggctcggggctcggggctcggggcccggggccggggggggcggggggtccgtgcccagggcactctgtggctcgattcatgtccccgccctcccacctgagcacactgggcagagagcctgcggcatcgggccagtcgcgcctcctcgtccgccctgggcaggtcgctgggccccaggccgctttctacagctcctttaataaaatggacagcaggggtcctaaccagacgtgggcatcaagacaaaggaggcggccagacgcgcttgagggcctgctcgctagctcccgcccccccattccgcggtcacccggggacagaggccaggccggactgggtggagttgggactcatacgtctgcgtccaggaaggcgccgggcgagccccagctagacgtgacgggcggggccgaacacggcagcggaccagaggcccgcggcgcaccggcgtggggcggggcaagcggagcctcccgggatgccgcgcggcagccggcttccggctgtgggtggtgcgggggacagcggcggccggaagctggctgagccggcctttggtaacgccacctgcacttccgggggcgtcgagcctggmggtagaatcttcccagtaggcggcgcgggagggaaaagaggattgaggggctaggccgggcggatcccgtcctcccccgatgtgagcagttttcckaaaccccgtcaggcgaaggctgcccagagaggtggagtcggtagcggggccgggaacatgaggcagtctctcctattcctgaccagcgtggttcctttcgtgctggcgccgcgacctccggatgacccgggcttcggcccccaccagagactcggtaaagacccaggggagttggcttaggccggcgcctggagcgctcgtttgagggaagagcaggggagctgggtctatcaggtgtttgggggcggggtattggcgatggtggcgcgtccctaagttttcagtgtagaagggggtgtggctctcggagtttggggaaagaataaaggagatgggcctgtctctgagtgggaaagggctactggacgggctccatgtagtgactgagcgcctgagaggggtttgctccctagctttgtgttcggggagggtgttgggaaagcggtaaggagtagggtggctggatcttgtttggagagggagatgtggtcagggttcttgccttagtagggaacaaatctagtgttgtgtgttcctaccagagccagaaaggaagggcccaaagctccagaattcttcctggtcctcgaaggagggaactagaatttctgctgtaggaggtacttatgcagtaatctcgttgggaggcggagactggagttggagtcttaagagttgtgtttttgcgaacatcctaagcacgttcttggttatttcaattgtagcttattggaggtgcttgggagatggggggaggcggaaacctggtaagccaactcgtgatgctgccactatgaatgctttccttgcacttttaaacaaagaaattatcaagagtgacgagtttgatgaatttagaggctagaaagtagagggttcctatttcattagattttccagagagattggattttaaggatggagatgcattaagggatctgaactttggtggaagtaagtttgcgtgaacttttagtgtattttaaaatccttttatctttcaaaaattgacgtgtaagatactttaattagtaataaagtgtgaaataatgttttcccagtgtgtgaaattgtaggcttgcatggttgtactggttcccaaatttcaccatgataccatgtgtagtattttttttctttatatttagtggacagaaattgtaatggattggtatggatactaaaggtgttgagagtgttatcacttgaacagctgtcttatgattctttccgattgaaatggattacaagtgactaatgaaaggcaagggatcttgttaggaagtgctgagaagtggtaagtcagtacaaattgaaggacattttgaggtaggattgtggttaggatggagggatagggtaagggtcttcattttaaggataaatgttagtaaaaagaataaatatgtattttgagatattaaaattatatttgcaccaccctgacacaactgtttcacttatgttattaatctgttgttcgtaggtaaaaataagcatgagtcccaaggaagcatacagtttaaagagaaacattactttctagatcaattcataacatttgcagatcgtaaggttttttagaccattttttttttccaagacagagtcttgctctgttgcccaggctggagtgcagtggcgcgatctcagctcactgcaacctccgcctcccggggttcaagcagttcacctgccttagcctcctgagtagctgggattacaggcatgtgccaccacgcccagctaatttttgtattcctagtagagacggggtttcaccatgttggccaggctggtctagaactcttgacctcgtgatccgcccacctgggcctccctaagtgctgggattacaggcatgaaccaccgctcctggcccatgtgtttgttttttatttgcaaaatgcagaccayctgtgccagaagaatgcatagacttttcttttttcttttcttttctttttctttctttttttttttttttgaggcagtgttttgctcttgttgcccaggctggagtgcaatggcgtcatctcagctcaccacaacctcygcctcccgggttcaagcaattctcctgcctcagcctcccaagtagctgggattacaggcatgtgccaccacgtccggctaattttttgtatttttagtagagatggggtttctccatgttattcaggctggtctcgaactcctgacctcaggtgatcagcacacctcggcctcccaaagtgctgggattaaaggcttgagccaccaggcccggcctctttttttttttttaaacgaaatatttgaaggacacacaagtattatacgtggcattggaaatacaaagatcagacgatatccatcttcaaatggttatagcatagggaaatagacattcatttaggacacttctaaaacagcatagaggagagtgctagagtacgttatagcaagtgttatcaccaaatgaatcttagagatcaagtctagttttcaaataaaggaggaggaaaatgagtctcaggaagatgctgtcagttgtcaatgatgaacataggccttgtgggtatttttcttttgaagaatgactttttttttcagtttgtttgacagcttacaatataatttgttacttaaccttaccattagattgagttggtcaagactrgcaaatagtttcatagttgaaaaacatgctttattatttattttttatgtttattgtcctacaaatactactatattgcagtactcaatatcgattaggcatatgacaacatttttctgaaaggcaaaaaatacctaataaaatgaagcctggtttttagagtcctctatgggtcaccaaaaatgatttcaattgaactgttatgaattgcataatttaggaaagttatgagtcatatgagcttagtcatgatgatatcttgttgaagttgcagctggggtgtataagtctcactttgatttcaaaatcgttttccctttgtgttacttttaataaaagaggatgtagtgggtgggaggaaaaaatataggtcacagatgagggatgagaaagtttgtatctgaaacatgtattttcaaatttaccttgaggttattggcatggggattctccatattgcagtgctgatttcattattgacagcaccattttactcagtattttgacatctggctttctcttttgatgttaattttgcttactggctgcattcctttgaaacctaaatgcttaactgccctaactgctccaagggagatttaatgtaactctgctttatattagtctaagagataaaccatatttcaagagtagaatggagaggaattaagcagataattgtgatggggaaactggagagatccttttgactttcacaggatttcctagaacattaaatataggtttcctccaaggccaattgtggttgatttttggatccttcaccattttctatttgtgagataataagtgtatacagctggaagtgtaatgtgaagaaagtctgaaaaagattgataggaaaggaggacaggaatgggcttcattgaggtaacggaagtgaaatgaaaggcttttcatatatgggttgagcatccctaatctgaaatgctccaaaatttgaaactttttgaatgctggcatgacagcacacattacccctaacacacgattttttcactgttagtggtatattttttactgtgtagtacttatgtgtgaataggtataacaaaacgattacttattgtagcatgtaaaatcagtcaggaatgatggtgatgccagacaaccacagattatttatgtgggtggccgagacagtgacacctttgctttcgaatgcttcgttgtacacaaactttttttcatgcaaaaaaagttacttaaaaatattgtttaggccaggcgcggtggctcatgcctgtaatcccagcactttgggaggccgagctgggtggatcacgaggtcaggagatcgagaccatcctggctaacatggtgaaaccctgtctgtactaaaaatacaaaaaattagccaggtgtggtagcaggcgcctgtagtcccagctactcgggaggctgaggcaggagaatggtgtgaacctgggaggtggagcttgcagtgagccgagatcgcgccactgcactccagcctgggcgacagagcaagactccatctcaaagtaagtgaataaatgaaacataaatgaattttatatttagacttgggtcccatccccaagatacctcattatgtatatgcaaatatttcaaaatttaaaaaattctgatgaatgaaacacttctggtctcaagcattttggataagggatgctcaatctgtatctctttatttactcctaaaatcagccaaggaaatgggcatctctccgttcccccccttccttttttttttttcttkgttgttacatgagttgtactggtttcacttcatttgacagtgttctgctaatgactagacgtgtatctctgacctggactkgttctctggagttcatattcagctgcccattkggcacttcaaatataacatgtccaaaattagttaccttttttttttttttgagacagagtctcactgtcacccaggctggagcgcagtggcgcaatcttggcttactgcaacctccacttcccaggttcaagtgattctcgtgcctcagcctcacgaatagctgggattacaggtgtcccccaccacgcctggctaatttttttttttttttttttttgtatttttagtagagatggggtttcatcatattggacaggcctgtgttgaactcctgacctctggtgatccacctgcctcagcctcccaaagtgctgggattacagacgtgaaccactgccccagccagttacctattcttttgattacaagaatgagtagctggacacagtggcttacacctatagtcccagcactttgggaggctgaggccggcggatgacttgaggccaggagttcaagaccagcttgaccaacatggtgaaacctgtctctactaaaaatacaaaaattagccaggcgtggtggtgcgtgcctgtaatcccagctactggggagactgaggcaggagaattgcttgaacccgggaggcagaggttgcagtgtgccaaggttgagccactgcagtgcagcctgggcagcagagtgagactccatctcaaaaaaaaaaaaaaaaaaaaaaaagaatgagtatcggatacaggtttagcctaggactaggcagggctgctggtaattgtggaagtagtctcattgcctaacctgaaacttgcatcctggttactggtcttgctggagagtcttggctcaggttacgtcccaggtctgttgaggagctcttgatagggaattagttgaagcagctcatactctatcctcctttactggtataaatccataaaattgtttagttcccaggctctggggtccctggcctagcagagagcactgctccctttttctcattccttagtcccaacaacccgcacctgacacttactacacgtggcctgcttccctgtcctgtgtgttttggggggtgctgaagaggaaggctcctgtgtcttcagcacaaacacaataaacacttcacagcagtactggctttatgttttccatttctgatatcagaagtaggagcatgacattgatagtgtcattttgggggaacttttcgtacttcatgcagcagagcagtgaagagtgagctgagtgccttggggttctgcagtacactctcaagtagtattttaggaaaatgcaatttgctgaaaaaataaaagaaattaatgtaaaaaatccacaagctgggcgcggtggctcacgactgtcatctcagcattttggaaagctaagggggaaggatcacttgagcccaggagtttgagaccaggctgggcaacatggcaagaccttgtctctacaaaaaaatagaaacaaaaattagccaggtgcggtggcatgtgcctgtggtcccagccacccggaggattgctcatgcccaggaggttgaggctgcagtgagtggtgattgtgccctgcactctagcctgagcaacagagcgagaccctgtctcaaaaacaaaacaaaacaaaaacccacacgtttccagaaccttctcatataacactttatttacattgttcttaaatacgtgtgggacggttatatacataccactatacttatgtgtatatatgttgatatacacacaaaattatatacataatttttgtttgtttgtttttgagatggagtctcactctatcacctaggctggagtgcagtggcgtgatctcagctcactcactgcaacctctgccacccgggttcaagcgattctcctgcctcaggcttctgagtagctgggattacaggtgcctgccaccgcgcctggctaatttttgtatttttagtagagactgggttttaccatgttggccaggctggtcttgaactcccacccttgtgatccacccacctcggcctcccaaagtgctgggattacaggtgtgagccactgtgacctgccatatacataattttttaaagtttcacgattagttttagcttaaaaatgtcagctctgggcttaatgaagaaaatatggatatactttatgtcaatgcattaaagtgaatggccataaaagcttatcccagagacaaaacaattcagatataagagaagtgggagagtggaaggtttatctaatcttctgtaggcaactccacagctacaaccagaaggccattttgttacaggcctgaaagccccgttttctttttattcttctttgaaacctttagaaggaacaaagtattggctactttttaccgctgatgtcagtgttaagaatcttgtgataacatagatttactctccctgctgaaaatcactatgtggctcatcagtaacacaactagacatgatgacttaatgcaaaggaagtcctatgtaaatgagcaatgaaattgcaactgtgtataaggaacaaaatagaatatgaaactccagaatcttttgttttcatttctgtttctcccaaggctctatcattcaaaactccagaatctttcagcatgcaattgtctcctgatatcagcccctctcttgttttgttttcttttttttttttttaatcacagtgagccacaacctaggagtcttttagtggtttctacttggtttgctctgcagcctaccagcagatttcctacattccggtcttgttcccctctagcccattctccacactgcagtcataatgaaatttctttcttttttgggggggatggagtctcactctgtcacccaggttggagtgcagtggcatgatctcggctcactgccacctttgcctcctgggttcaagcgattctcatgcctcagcctcccaagtagctgagattatacgcacctgctaccacgcccagctaatcttgtatttttagcagagacagggttttgccacgttggccaggctggtctctaactcctgacctcaagtgatcgcccaccttggctttctctctctttttttttttttggattttgagacaggatctggcctcgttgcctaggctggagtgcagtggcacgatatcarctcactgcaacctctgcctcctgagctcaagccatcctcccacctcagcctcctgagcagctgggactgcaggtgtacaccaccacgcctggctaatttttgtattttattttatttatttttttggtagagacggggttttgctgtgttgcccaagcttgtcttgaactcctggggctcaagcgatctacccatcttggcctcccaaggtgctgggatgacaggcatgagccaccacagctggcctataatgaaatttccaacttacagctattgccattatccaaagcccagaatccctgatttccttccatagcccttcatggcctgaccagtgcctgactctccagcctcacacttcatattctctctgtactgctctgcactgtagcctcattgagttgctttcacgtctttaagtgttgtgttctattttttgtggaattcagcatatgttatgcccttgacctaaggcctctcctttcttttccttctctggggtgctgcctcatccttctggtcttcaaaaccgtttccctgggaaaacatctttgactcagcaggcagggatcatgcccctgctgtgtctgtgcataactttctgtggctacttctgtcttggtctgtgatgtactttataataattttggtctttcctccagtgtcacaatactggaagtctgtttctttttctctgtgttgtatccttagtgcctgaaaggtaggaggttctcaataaatatttgttaaataatcaagtaaatggagtctggtggaaaagagaaaaaataagtgtagaatgtgtgtgcaagaaaggaggggtagggggatgaaaaagataacaaaagcacataacaaaacaacaaaaagcaaaaacaacaaaaaatgcagatgacaaaaaagataacaaaatgatgactgctgtggcaacttgtagaaagtaaggaaggtgctctcattctagagagaagtaggcagccattgtagttttttaaagagagaatatgggctgggctctgtggcccacgcctgtaatcccagcactttgggaggccgaagtgggtggatcacgaggtcaagagatcaagaccatcctggccaacacagtgaaaccccttctctactaaaaatacaaaaattagctggataggtggtgtgcacctgtagtcccagctacttgggaggctgagacaggagaatcgcttgaacccaggaggcggaggttgcagtgagctgagatcacgccactgcattccagcctggcgacagagtgagactccatttcaaaaaaaaaaaaagaatatggccagacactgagctgagatagacagtgcggcagtgtctggtattaactgtaataaactctactgtcagaagcaggtggtttatacttaagtttattgagagaattggatatggataagagataaactcttgggaaatggggagaaatataaattctgttgtaaagcctgtaaaaaattgagattactagtggttagaattttggaagtgaagtgcagtgaaatattgagtacctgagaggttacttgttagtgaaaacacaatagcagtagtacgtagctacagtttggctccaaaggargaactgtttttactatagtttgtaatggcttcagaatcttcaatttgagatatccagttattaaaagagaatcaattgcagttgaaatgcattagtyaagtattttaaagtgctttagcaagctacatttaaaaagtgcttattatagaaaatatacccaaaataaccaatgatgttactgtcttgtgcttattttttctagacctatttttatacatagttaagattatacaatatgaatatttctgaaatctatatttaacattataacatatgtatttttccatgttctttctttttttttttttttgagactgggtctcatcctgtcacccaggctggagtgcagtggtgctatcttggcttactgcagccttgacctcctgggctcaagtgatcctcccgcctgaaccttctgagtagctgagactacaagcacatgccaccatgcctggctaattttatttttactttttggagagatgagggtctcactattttgcccaggctggtctcgaactccttgggtcaagcaattctctcaccttgacctcccaaagtgctgggattacaggagcgagccaccgccctcagccccatgttcttaaaaaccttttgtraacgacatttaaaatagttgcagattttttcccctgtctttggaagtgttacaacatccaaccatttcacagttactaatttaccatcattctggtttttgtccttgaaaataaggcaaggctgaataatgaacatctttgtggctaaagtttttttctttactttgagttgttaccttcctttagcttagttcagtggttttttctttttcttttttgagatggagtcttgccttgttgcccaggctggagagtagtggkgtgatctcggctcactgcaacctccgcctcccaggttcaagcagttctcttgcctcagcctaccgagtagctgggattataggcgtctgctgccatgcccagctaattttttgtatttttagtagagacagggttttgccrtgttggccaggctggtcttgaactcctgacctcaggtgatccacccgcctctgcctctccaagtgctgggattacaagtgtgagccaccatgcccagccagttcagtgattttcatatttgagtgtgtcagccttgcctggaagccttgttaaacacagactattggatcccactgggcggatttctgtttgagcaggtctgaggggagacctgagcatttgcatttttaacaaattcccagttgatgatgatgctgctggtttgggaactacactttgagaactactgggctatattattgacaatgaaactataatgttgaggttaagttcctaagtcagtaggagtgattatgatcttgaatgaaactgagttcatgtaccaacctgtatcagggaaattgaagaactaaaggaccatattgcatttcagcactgagaattcgtgcagtttgtgaacatgtgagtgctgatatgtgcaaggtttttgctgagtattgtgaggcaaggatgttgtaatgaataaaaaatagccctttttggctttttttttcttcttttgagatggagtcttgctctgtcgccaggctggagtgcagtgatgtgatctcagctcactgcaacttccgcctcccaggttcaagcgattcttctgcctcagcctcatgagtagctgggactacaggtgcccgccaccacgcctggctaattttttgtattttggtagagactgggtttcaccatgtttgccaggatggtctccatctcctgaccttgtgatccccctgccttggcctcccaaagtgctgggattacaggcgtgagccaccgtgcccagcccggccttttttcccccgcctagagatggagtcttgctctgtcgcccaggctagagtgtagtggtgcaatctcagctccctgcaacatctgcctcctgggttcaagcgattctcctgcctcaaactagctgggattacaggcatgcaccaccatgcccggctaattttgtatttttagtagagacagggtttcaccatgttaatcaggctggtctggaactcctggcttcaggtgatccttggcctcccaaagtgctgggattacaggtgtgagccaccatgcatggcctcatttgggaaacttttgatatcagaatcttaggtttttcattagagattgtcagatttccatattcctctggaaggtaaaggcctaattgctagcattctggaagccagttagggtaggagggtaggagggtagggtattgggtagaggataaagaaggggtttgggaaaggtggggggtgtctcttggcagttgtatggttaaattgartttttgttttatttagtgatatgtgttttttgggtacatgtgatattttgatacctgtgtataatatgtagtgatcaaatcagggtgattgggatacccatcatttgaaacatcttttctgtgttaggaatattacaagtcttctagctgttttgaagtatacaataaattgttaactataatttctgtactgtactatcaaatattagaacttactaatcaaactgtatttttgtaacactaaccactttctgttcatctccaccactcccacttcccttctcagcctctggtaaccaccattctgctgtctacctccacgagatccacttttttagcttccacacatgagtaagagtctttcttttaaaactggttttgtgagcatatttaacatcagtagcaataaacttgtattttaagctcctgttgctgtattttgaggaccttctaagtccattggaaggattttgaataccatagtgtctgcagtgatagttgttgaaagaaagggaaggcatcagtgcaaatatttttagacagtttttaaagagactcaagtcacccaatttgtcttctaaaaatcctgattttggaagaggcagtggagtttctgttgataaaaaatgatttatagtttgtgcttggcacttcctaatggattacatcaggaaagatttattgtctggcactctcattttaacgatactacaattgattattaggtttagatgctaataccttttttacctttatttcagagaagcttgattctttgctctcagactacgatattctctctttatctaatatccagcagcattcggtaagaaaaagagatctacagacttcaacacatgtagaaacactactaactttttcagctttgaaaaggtaatttgaattattcatggaataatgttggggcactgggggcttggtttggcaaaaacaaaaaagtaagggtatctactgaaatcttgggaaattacattttaaagatttgtaattaatttccagtataatgcttattctaaaattcatactggggctgggtgcagtggctcacgcctataatccgagcactttggggggccaagacatgtggattgcttgagctcaggagtttgcccaagctcagcctgggcaacatggcaaaaccccgtctctactaaaagtacaaaaattaggcatggtgacacgtgcctgtaatcccagctacttgggaggctgaggcaggagaatcacttgaaccagggaggtggaggctgcactagccgagatggtgccactgcactccagactgggcaacagagtgagactctgtctcaaaaaataaataaataaaataaataaagttcatactgatgagtatttttaaaaaagtaaatagatattgcagaggtgttaatgatggtaacgatgtttagaaaattctaacataatttaaattaattgaatgcttataaaaccttttgtttttggtgctactttataaccatcaatcatgtgctaaatattatctttatatatgaagagataaagattttgttcaggaccccacagcctggtggtgagctgggtctagattttactgttctatttatttatttagctaactagttacttagtttccaggattctttaacctgcttcatatttatttatttttaaaaacagggtcttgccatgttgccaaggctgatcttgaacttctgggctcaggtggtctttccatcttggcctcccaaagtgctgggattacaggtgtgagccaccatgcctggcccaaatttaatattctttctacattgagttcctcttacttcttagcataaattgatggatatgttctatttcagtagtaattttaataccacgtattgttttgcacattgaaatgttaaataattgcaggcctctttttaaagtctttaggaagctttattcagtatcaaaaaacagacacatggagaattgactgaattattctttatttatttatttttttgagagtcttgctctgtcgtccaggctggagtgcagttgtgtgatcttggctcactgcaacctctgcctcctgggttcaagcgattcttgtgcctcagcctctcaagtagctgggactacaggtgcacagcaccacgcctgggtgatttttgttatttttagtagagacagagtttcaccatgttggccaggctggtcttgaactcctcacctcaagtgatccacsatctcggcctcccaaagtgctgggattacagacaggggccactgcatctggccatctttattctttatataggacaagccttctcaactatgttaaaaaataaaaggaatatgtgcgtctggtttaaaaaacaagccatggakgatatgcaaagtttttacttctaactcagttagacttctcagacccagagaggtttcctttgtaaacttccaattttttgttttgttttgttttttgttttttgagacagagtttttgctcttgtcgcccagactggagtgcaatggcacgatcttagctcactgaagcctccacctctcgggttcaagcagttctcctgcctcagcttcccgagtagctgggattacaggagcccactgccatgctcagctaatttttgtatttttagtagagatgaggtttcaccatgttggccaggatggtcttgaactcctgacctcaggtgatccacctgcctcaggctcccaatgtgatgggattacaggtgtgagccaccgtgcccgacccaaaatattttaatgcatgttttttgcctataggtctctgtgtgtgtataggtgatatagatagcatatttacctcattttaaacagctgcataaatattcctattgcatagaattgtaacaacatactgactaatacactacagatggatattgtttaaccaaagtgatttttttaatacaacaaacagtgctctagtgagtatctttgtaaatgtgtaccttgatgaggtgtttttataggatatattcctggaaggagaattactgggtcaaggatatgtatactatgtttattgatattgctctttcctcccaaagagatttgacaaatttattcttccagcagcaatatatgagtttacctgtttcctgttatctttgccaatagtaggtttatcagcctttaactgtcacccctctaaagggcatggcattttatagttgttttgattttcattttgtgtgacattgagcatctttttatatatttgtaagtaatttgttttatatttctgtaaactgcctttttatctcttttgactatttttctattgaatttgtctttctaactactgaattgtagcagtgcttagtatattaaggagattggttcattgtcatgtggttattttaggcaaatttttaatgcaaattaatttttcctagctattgcaattatccttaggttattttttaatgacttctttttattcgattttatgtcagaatattatagtattggttattagctttcaacttacaccaaatttgagcagattggtaatattaatagctacagttaatcaggtacttattttctgtaatttactggcattttacataagttatctctaaaagtgattccttttttgaaggaacaaaaaaaaaaaaattaaggcttagacagcttagtaacttgcccaagattactcagctagtaaatgacagatacaagatttgaacaaaggttggactccaaaacttgtgttatttctgctatactggtggagagtttggtgaagaagtggatatagtagcaagaaataagtaggagcgaaggaagagtgaggaaactataaaatgaaaagaactcaaagtttagctttttgggtttctttggatttgaagtggcctgtagaatccgtattctagaggcaaaaacttccatagccttacatatttctctttcaagtttcgtagatgacattgattccctaagaaaatattaaatcgtagccacttgttatcttttctctgtgtaagaaagcagggaagtatgtaatttattttacaaagtttccatactaaatatttaatgggaaatttatctaacagtctatggaattttataccaggtgttttaaaataggttatttcctttaatccccaaaaccrttcagttattaggtgatattatttccatttgtagataaatacttaggattcaaagattgaggccaaggtcggacagtgagtaaatgaaagtaggacttaagccaagtttgtcagactccaaagcccataccctttcttttctatcatattgcgtcattaaagtttaaaacaagaacaaaaacaaagatagctgaagtaatcagtttgtatcagggctgaattaactctatgaaacccctcattacttgatrgtaaatgagaagattccgtttttcgatagcagtggaaggcaaagtaatttaaaccaagatcattgcattaaatttggatgtaactattagaggttgaaaaagcatagaaacactgagaggttgtatgaagagttgaagtaacttaagaaaaaaagaaacttgtttaaaatttgccttacaagtttcatttcctttttgttataaatcaagaaattatcagctaggcgtggtgactcacacatgtaatcccagcactttgggaggccgagctggatggatcatgaggtcatgaggtcaggagatcgagaccatcctggctaacacggtgaaaccccgtctctactaaaaatacaaaaaattagccaggcgtggtagcaggcgcctgtagtcccagctatttgggagkctgaggcaggggaatggcgtgaacccaggaggtggagcttgcagttagccgagattgcgccactgcactccagcctgggcgacagagtgagactccgtctcaaaaaaaaaaaaaaatcaagaaattatcttatttttaaataacgaaaaagctgcggagtatatactgttttgatacttttttgatgttgcctgaatttttttggaaaaagttaaatgtttctcctaaaagtgaaatatatcagattacttgagaaggtctagaactgataaagaaatgaaagtgatatacctgactaaatggaccattaaaaatggttagggtaataatgttaattcaaactggttagctggtctttagttactgtaaattcttaagtcaaaagtcagaaagataaaacgttaaagaaatctgtaagaaaatgacttcacataattttgggaggataaagtaaaagaaattttgacattctgttggacgttttataactcaaaagctaatattggaaaatcaaaaaacatgaattttataatcgcttggtctttatctttagaaaagattcttaatgtagcaaatgaaaaatgcaattccactgatttctttctgaaaagaacattaagtaatgttgcaactcttagctttaaaacaaaataataagacatttataataagtatgcttttgaaagttctcagcataactggagggaaaaatcataactgagaatgtgtgggaagatatgttttaggatagcagaagaaaatgttccaaggatttacgaaataatgttctattgtcttttccctttgaccattaaaaaaccacaagcaaactaaaattaccttgttatgctcaaaaagttaaaaatatttgttgccatggagatagtcccagtctagatttctttccggtagtttaaagacttttgcaatcccatggggaagtaatatattttcagtacaacagctgacaaaatttgtttctgtgggtgagatgaataatatacctttctttgtctttggtgttcatggacacattgaaagactataaataatacttgagaaagtcttgctcaccactcctagttttcatgtaaggatggaaagtcatagaaaacaaaaagaatagtaagccaattaaagaactggactgaaactcaacaaaaagaatagtaagcccactaaagaactgaagtgtataccccctcccctctcctcccctcccttcccctcccctcccttcccctcccttccccttcccttcccctctcttccccctccccttcccctctcctccccctctcctcccctctcctccccctctcctcccctcccctcccctcccctcccctcttttcctgtcttctggtgccaatggagtctatattctaatgtctgtcttagataccttgtatttattttcctaactgtaattgtgggttacttttttgcaagatatgttgttttgaggaggaaaaaaagcacgagtactttttttttttcttattttgagcgggagtctcgcgctgtcaaccaggctggcgatctcggctcacagcaggctccgcctcccgggttcactccattctcctgcctcagcctcccaagtagctgggactataggcacccgccaccatgcctggctaatttttgtatttttagtagagatggggtttcgctgtgttagccaggatggtctcgatctcctgacctcgtgatccgcccagctcaacctcccaaagtgctgggattacaggcgtgagccactacgcacggccgcatgagtacttttaaatatagaaagcagcatttattaattttgcacagcaataagaattttctcatagtccacccagcttgatagagacagcatagtacagggttttgaaataaaccaggtttatttcccagtttcaccatttactagctgtgtaactttgagtaggttgattagcttccaagcctcaatttgtacttgtgtgaagtggggataatagatgcatagtacctaacaccaagtaggtgttcaataaatggtatataataggattagtttttgataataatttttttagataatcaggattccaacttaactacgcagtcatgtgtgtttccttattcttcagtgttttccaggagagatgaatgtataagttctttgaatatctttaccctagtgtgagtttattgtgatctgctgtttttatagctaaataaattagttcatttgtcgttacaggagatatattgctctaagtacctaataagactttagttgtaacttgcatagtgttttattaatgtcamtgcttctggctttttaagaaagtttaattatgtgaaaatgagacttaaaatttgtgtgcttagagtaaaatatgaatgcatttttcttcaggcattttaaattatacctgacatcaagtactgaacgtttttcacaaaatttcaaggtcgtggtggtggatggtaaaaacgaaagcgagtacactgtaaaatggcaggacttcttcactggacacgtggttggttagtatggagcttgttggtttgcccctgtgtctggtgtattaggtctccaaatctaacttgattgcatattcttttctggtgcaggatagtggggacggggtgtcatagaagtgctattctttgacttttctttgaggtatataagtttagaggcaggaacattctaatagaaggaaatgagtattatctaaatgtcatactagctggctggtttaatgattaaaattaaattcttcttaagtgataggaatttaacctttcttttcctcagtgactgtaagctttctttatgatattttaaacagggaagcttggagataaaatacttggtgatcctattacgtatgtatttgagaaaatttatcaaacaagcaattgcagtttactttttgacctttttctgcaatgagraaaaaaaatgtcattgaaatccacaaatagtatagttcctaggcctgtacattctaaatcatgctttctgtctctcttagttcttcctttacctagaagtagataaaattattccagaagaaaatcttagcagttttgtttgttttgggaaagggataggtttcaagtgactaaacttgaggctaccccttaggagttgagattatctagcttctttctggagcctttgtttcttgttttgcagagctctcacagtactaggcaaattccaccctgaaggatttaatttttattgagagtaatgcatagtttcttatttgatgtaagtatttttaaataataattttttttttctcttaaggtgagcctgactctagggttctagcccacataagagatgatgatgttataatcagaatcaacacagatggggccgaatataacatagaggtaaatttatatgtgaattttttttcagtagcttatatctctgattttcaaaaagctgctcagttctgcaaaggtgaaaagtaattatacttatttctttcctcttcgtatttgaagttttttactaggaaagtagactttttaaaaaaggataatctctaagaagctgtgttatgatacaccctgtatttctaagtaccataattgagagagttacatgtgggatggataataggaagagaaaactttctttccctcctgactcattttttaattctttctcaaataataaatgtaaacatcctcagaaatgaaaagtgaagtattatttttcaatttctctgtttttctgctagacacactggaaatgctagatcaatgaaaggtggtagttcatagtctgagaagttaaagaggaagctaggaaagtcaggctgtggtcactcttccattgaaagagtagcratagaaatcaagaccacagtggctgcattggttaagacacatatctatctgtcagatattagtctacaaaacaaaacgtttcctcataattgtgaattgaagttgattctgtgtttcctgaaaaatgagaagactctgggtggtggtggtgatatcactaaaatagatcacctgtgggaaaactgagtaagattggtcaaaatgaaatgttcaggtgtatttgagtgcttaataggggtaaaacagtctgctggagctatatatactatatgttttaattatatccaatctacatgactgttagtcctttgactgtccattattgtgaaaaagaaacctatggccttgcagtatgttatagtttgttaatgtttaagctatttaatgtcaatgttttgaggagtctggcctaccagaaagagtcagaaatttagtagaaagtaaaggaactaatattataaatgcattcattctagaataggcaaagcatcactggaatgtcttaaatttgcctgttctttcaaatcaatttattttttaagaatacctttattttaaaatatatgctcattgcaaaattcggaaaatagattatctgtacttggacagataactactattgacattttgacagacatccttccamatttttttttctatgtgtaaatacacaaataaatatagttatrcccactattttttcctgcaaaactaggaccatacaatatgtacagtttgtcttcacacatttttcgtttaacaatatgattatgaaccttttcgtgttaatatagatctaaattagggttttttttktttgtttgtttgttttttgagacggagtcttgctctgtcacccaggctagagtgcaatggcgtgatcttggctcactataacctctgcctccccggttcaggcgattctcctgccttagcctcccaagtagctgggactgcaggtgtgcgccatgatgtccggctaattttttttcttttttttgagatggagtatcactctgtcactcaggctagagtgcactggcgtggtctcggctcactgcaacctctggctcctgggttcaggcrgttctcccgccttagacccttgagtagctcagactacaggcacatgctacctcacctggctaatttttgtatttttagtagagacggggtttcaccatgttggccaggatggtctcgatctcctgacctcatgatctgccagcctcggcctctgaaaagtgctgggattataggcgtgagccactgtgcctggcctcaactgttttgtttctaacttttgaaataaaaggtattgtagtgaacagccttgggcacaccttttggtgcatgtgtttagttggaatagtctggatgataggtaatagtctgggaagttaaatgaagaaactgtaggaagctctgtctaggctgtgcgagggcttcagataaactcccatagctgagtagcttaacacaagcaaagttttttcttactctcctgtggcttgatgtgggttaggtggttctcctctactttgtggctttgacttttggacacatgtcctctgtagttctcacagaaagaaaacagagctagagaattatacaggatattaagggccaggcttggaaatggccttccgttcaatacattctagaacactttatctctgacctgctacaaaggagaatggaaaagatagtcgtaatttgagctcagaaagagaaaatagtgtggtaaatgcacagcattgtttttgctgcagtgcatatgtctgcttatttccttagaataatttattcttttttgtttttttgagactgagtctcactctgttaccaggctggagtgcagtggcgtgatctcrgctcactgcagactctgcctcctgggttcaagccattctcctgcctcagcctcccgagtagctgggattacaggtgcgcaccaccacacccagctaatttttgtatttttggtagagacagggtttcacaatgttggccaggatggtctcgatctcctgacctcatgatctgccagcctcggcctctgaaagtgctgagattaaaggcgtgagccactgtgcctggccagcttattaattcttaagccaaawtatgtgtctttaggatccaagttaaatttgctcagattacatttttttttttttaagatggcatctcgccctgtcacccagactggagtgcartggcgcgatctcggctcaccacatcctctgcctcccaggttaaagcgattctcctgcctcagtcccttgagtagctggaattacaggcgtgtgccaccatgccccgttaatttttgtagttttagtagagatggggtttcactgtgttggccaggctggtcttgaactcctgacctcgtgatctgcccatcttggcctcccaaagtgctgagattataggcatgagccaccacgcccagctagattactcatttttttcaaatacttccttttggaaaaataggaattctgtttccatccatacctttgtttcactaagtacaaaaatgagtataactaatatttcattgtaagatatttacttagccaggcacagtggctcacacttgtaatcagcactttgggaggctgaggcgggtggactgcttgagcccaggaatttgagaccagcccaggcaatatagggagaccttrtctctactcctccacaaaaaaaaaaaaaaaaaaaaaattagctgggcatggtggcacatgcctgtggtctcagctacttagaatgctgaagcagtaggatcagttgaattcggaaggcggagactgcagtgagctgagattgtactgctgcactccagcctgggtgacagagcgagaccctatctcacacatacacacacacaaagatgtttacttacaagtatactcatcagataccttgagggacttttgcatgaaattaataatgtttattgaaaaaatgatttactacttacaggggtgattttcatactctttataattcttttgatacttttatagttcataagtgtggtgattggctgttcacacacacatatgagatgtaccaccctagaaccttgttacaatgttagcacattaccagtctgacatgaaaaaaaataattctttacacttaccttgatgcaaaaacattgtctatctgcactaatatcttaggaatataagtgagcaggaaaaaatatatatcttatttttaacacatcatcattaaatattttgtttatgacagtcttacttggtcactcaggctgaagtgcagtggtgccatcatagctcactgcagccttgacctcctgggctcaaacaatccctcttttctgcctcctgagtagctgggactacaggtgcatgccaccatgcccaactaatttgttaaatttttgtagagtgtatcagatttttgatgaggtctcactgtgttgcccaggctgatctcaaatgtctgactgtaagcaatcctcttgcttggcctcccaaagtgctgggattacaggtgtgagccactgtgcgcagccrttaaatattttaaaccgtcactgactttaccatagcttactatttatataaataatcctgggttaaacttgcatagtgagataatatttcccccaacttttatttatttatttgagatggagtcttgctctgtygcccaggctggagtgcagtggcgcaatctcggctcactgcagtctccgcctcccaggttcaagcatttctcctgcctcagcctcccaagtagctgggattacaggcacacgccactgtgcccggctagtttttatatttttggtagagacagggttttgccacgttggccaggctggtcttgaactcctggtctcaggtgatccacccgcgtcggcctcccaaggtgctgggattacaggcatgagccactgcatccggcctaatttttgtatttttagtagagacggggtttcaccatgttagtgaggctggtcttgaacttctgaccttgtgatctgcccacctcggcctcccaaagtgctgggatgacagacgtgagccaccatgcttggcctcccccagcttctagttttaaaaatgttcagctggtgcagtggctcatgcctgtcatcccagcactttgggaagctgaggtgggtggatcacttcaggccaggagttcgaggccagcctggccaacatggtgaaacctcgtctctactaaaaatacaaaaattagccaggcttrgtggcttgcgcccgtaatcccaactgctygggaggcctaggtgggagaatcgcttgaacctgggagacagaggttgcagtgagctgagatcgctccactgtactccaatgtgggtgacagggtgaaactctgtctcagaaaaaaataaaaaagaaaatgtgcaaatctacagaaagattaaaaagtaccctgtagttacagaaagatttttttaaaaaataccctgtagcccttaaacaatttctaacataatgtcctgttagctttctctctttttttcgtgaatcatatgaaaatcatttgcaaacatcatgacccttcacccctaaatacttctgtatgcatccttaggaataaaggcactcttttctatagctgtaataaaagtaacatacctgagaaaatgacaagaattctacaatattatctaataatcatgccatagtcaaaatctctagtcatcctcaaaatctcctttgtagattttttttggttttccagtccaggatccaatccagttttctgccttttagtcaattactcatcaaattattttttccagcaacttactagtaataatggtaatagccttagcttttattaataacaaccacttttcttttgaaatgttaatataaaactagatttattacctacataatcttcataatcttcaagttaggtattatcactactttacctaatgagggaggttatgctcagggtacttgtccaaggcacatagtgaggtatggttgaggtttgaactcagatatatctgatcccaaagccagctgtctttttctgtgctggactgactatactaggaaacaatcaatgtgaacttagaaatgtttgacccaaaagaaaaaaaatttcactcctattcataggctaaatgaactttactaaatatggaagattcctgtagcccggaagttgggttagttaacttttgagatctctgccaaccctgaaattctgtaacccttgtttcttacatctgcctcatacatggattaccaaagatgtatatgcatataatatttaacagttttattgagataaaattcacatactatattattcacccacttaatgtatacaattttgtagttttgtgtgtgtgtgtgtgtgtgtgtatttttgagatggagtctcactctgtcacccaggctggagtgcagtggcacgatcactgcaacctctgcctcctgggttcaagtgattctgtggcctcagcctgttgagtagctgggattacaggygcccaccaccatgcccggctgatttttgtgtttcagtagagatggggtttcaccgtgttggtcaggctgttctcgaactcctggactcaagttatctgcccaccatggcctccccaaagtgctgagattacaggcgtgagccatcgcgcccggcagttttcgtatattgatggagttgtgcaaacaccacctcattcaattttagaacatttttatcacctgaaaaagaaacgctgtatcctttagccatacttcccccttcctccctaactcccccagctctaggcaaccagggatctactgtctatttagatttgtctgtttgggtcatctcatataaatggaattacataacatgtcttttgtgtgtggcttcaatttttttatttttttgagatggagtcttgctctgtcacccaggctggagtgcagtggcatgatctcagctcactgcaacttttgcctcctgggttcaactgattctcttgcctcagcctcccgggtagctgggattacaggctcctgccaccatgcctgactaatttttgtattttttactagagtcggggtttcactatgttggccaggctgttctcaaactcctgacctcaagtgatccacctgcctcrgcctcccgaagtgctgggattaaagacatgagccaccacgcycagcctgtgtgtggcttctttcacttagaataatgtttccaaggttcatctgtgttgtagcatgtatctgtatcttatttatttttattgctgaatagtattccattgtatggataaactgcattttgtttattcattgattagttgttgatggacatttgggttgtttccactttttagctatatttacattactgcttgtgttttcatttctcttggttatatactaggagcagaattgctgggtcatatggtacttctacttttaacctttgaggacctgccagactgttttctaaagtggttttaccattttacattctcatcagcatatgtgagggttctggatttctctacatcctcaccagtatttgtctttgatcatagtcatcctagtgggtatacaggggtgtctcattgtgggggtttttttccccattggggttttgatttgcatttccctgatggagataaatatattttttgtgtgtccccccacaaactgcctggttctgatgagaccagtgttcttacagagaataactttgctttgaaacaaaacaaacaaacagccttttgacttgggtaacctttggagtatgttaattgtgatttactctggccttgtaacattgtaagtggagattttgtttaaaaactgcgttcgctgaaacaagtaataaggttcagacctattgttacaagttctgagttttctttcatataaatatgtttgttcttttgtgtggataaaacctaacgtggcaaaaaggtgtcaaacacctaagtattaaggaaactaaaatgaaaatgctgcatgaacagaaaccttgtccaattttcattactatagcaccatcacctataacagtgccagtgtacagtagatattacataatatttttgaatgaatgagtggaaaatgatatgcatttttctcttctgcatcctctgaaagatttcacaacgtgcaaagtatgtaaggctttatttatatacagataaaataatcagagtttataatctatgtatttactttcctgcatagaaactccatatgattaaaaattgagattatttattttaataacatgactaatcagtttacttaacctagaaatgaatgttatctaagaacaagcaaagaatgttagaagaatttagtgtttaggaattattattgttttccatctcagtcgtatatattttctgttttagccactttggagatttgttaatgataccaaagacraaagaatgttagtttataaatctgaagatatcaagaatgtttcacgtttgcagtctccaaaagtgtgtggttatttaaaagtggataatgaagagttgctcccaaaagggttagtagacrgagaaccacctgaaggtaagacttaaagagtgtatttcaaataagaaacaaacatactacaattgacttcagtaggggtggttgttatttgttaaaaaataacatgattgtcaagtaactatagtatttggcatgaaaataagaggtttgttccagaaattttcatcttcttttgtttrtaatgtaagagttgaaaactctggaaaataatgggaacaacagagattagactttaaaaaagattagggaaaagggaaatggagtgatctgagggaaaatattcctgcagatatttagaaatgataaaataatatggtggaaagacaatctttagagtttataagaaattaattggtagtaggagggacctatatatatactgcttagaatacaagaaggttatatccatcttgggacaatccatttagggtcatttaaaaaacgtaaccatcttggaattttactgcccaaaacacctctggttaggttttttgttttgttttgttttgttttgttttgcagcgcgatctcggctcactgcaacctttgacttccaggttcaggtgattctcctgcctcagactcctgagtagctggattataggcatgtgccaccaggcctggctaatttttgtatttttagtggagatggggtttcaccatgttggtcaggctgttctcaaactcctggcctcaagtgatctgcccacctcagcctcccaaagtgttgggattacaggcgtgcaccaacatgcccggccaaagacggttatgttattaaaattatatattagcattttaatatataaataaagaaattcttaatttatttcacaagaaagttgtcctattaaactaattttcaatgtgaatatcttgacatttttactgttacattggttaattcataaacttcttgttgtagaatatgactgacagcttcatagcccagcattaggtgactgttttactctgttgagcactatttatttatttatttatttagagatgaagtctcacttttgtcgccctggcttgagtgcaatggcacaatcttggctcactgcaacctccgcaccctgggttgaagtgattctcctgcctcagccttacaagtagctgggattacaggcgggtgccaccatatctggctaatttttgtatttttaatagagatggggtttcatcatgttggccaggctggtctcgaactcccgtcctcaggtgattcacccaccttggcctcgcaaagtgctgggattacaggcctgagccaacatgcccggccttactctgttgagcactttttaaagtttctgtattggaaaaattaaagaggcacttgtccttggttttgaattctacagtgttttaactttatgttacttttcacttttctgtcttcctccaaattattttttgttgttgttcagaatcctttagtgatattaagctcacataatgtttgtttcaaaaatatgttagatttaaagtgttaccataaaactccttgttttggtgaattttgatttaatagtgcatacaaattcatattagagcttgttcatcgagtgaaaagaagagctgacccagatcccatgaagaacacgtgtaaattattggtggtagcagatcatcgcttctacagatacatgggcagaggggaagagagtacaactacaaattacttagtaagtatttgatattgcatcgagtaattgaaaaaaaaatttgggtgggtacattccatgaaacttaatgcaaccagatctgttccagatactctgttatttccctaaaatatttgagggatattctctgaggtttttatgttactgtatggaaattatagtttcaaatttgtgacaacccattttacccttgaactaatattttctgcatgttagaatttatgcatatagggtttgggagaggttataatgtagtccttcctccttgatataagtgagttctttaaaaacatcactgctatcatggtagtgaacctgtggtgtcacatgtgaatgtaaaaatatgtatttgcatgaacccatgtttttcttttgcttatatgtatatttcagagaggaaggcgagttttgtttgtcatgttaaagacctaatcattggacttcacttgaaataggtgggactttcatggtcataactagttctagggcacagaagtgaaggaaagatgtaagaagtgatgatactggatttttaagtatgaactattatgatttttgaagtctggggaatcatttttcattgacattttttgctagtgtgacttcattcgtcatgattacttggcactgaccaaaatgttgttactgagggaataatggagaatgcagctattcatgaagcaagaagaagctggtgcagtaaagatgtctttctcattgccttgcttttcccatgctgtccattttattcataccctcccaacttctttcccttccctttcatgtcaagtggatttttttttttttttttcaacacagagtctcactgtgtcgcccaggctggagtgcagtggcacaatctcagctcactgcaacccccacctcctgggttcaagcaattctcctgcctcagcatcacaagtagctggaattrcaggcgtgaaccacagcactcggccccatatcaagtgaatttattatgaggctagtaagagtcactgtgattcttgttcctaaataagagagatttttactttaaaaagcttctctcttaatctgggttttatattaaggggctcctcttattttacttctttgttcattgcactataaatatgaatataatgagagatctagtcttaaaaattgtatttttttacaacttcttaggcataacttgtttcacagttgctggaacaaacctcatcaacccagtttttgaacagtagaatattctctttgagaaaaagataggtaattagcattttgttctttctcatgtcattttccttggaaactatactgccttccttctccagttttcccaaatcagagaacaaaagaaggagggttgctgaaatgaaccttgttctttctggctgtcttcttacccattcctcagtgctgaactttttggggtgagagtgggggaatagggttggcagttgtctgccacggccccttacttgtttctggggaagacattcgaggtactcaccaagagatagagtgaagatggaattctttttagaagggaayacagttgacccaggaacagtgcgggggtgtggttagaagcactgaccttcttccctctgcagtcgaaaatcctcacgtgactttttttttttaaggctctgtcgcccaggccggagtgcagtggtgaaatcatagcttgctgcagcctctattgcccgggccaaagcaatcttcccacctcagcctcctctagctgggacaacaggtgttcacccttcctggctaagttttttgatttttagtagagatggagaatttcccaggatggtctcaaacttctaagcttaagcaatcctcctgcctcagcctcccaaggtgctgggattacaggcatgagccactatgcccggccactgtataactttgattctccaaaaatttaactactaatagtctactgttgaccagaagccttaccaataaaataagttgattaacacatttttaaaatatgtattattactgtgttcttacaatcaagtaagctagagaaaggaaaatgttatgatgaaaatcatwaaaaaaaaaaaaagcccggcatggtggtgtgtgcctgtagtcttctgttactcaggaggctgaggtgagaggattgcttgagtccagaaattcaggctgtagtgagctatgatcgtgccgctgtactgcacccctggtgacagagcaagaccttgtctcttgaaaaaaaaaaaagaaaatcataaggaagagaaaaatacatttactattcactaagtggaagtggatcatcataatggtcttcatgttgagtaggctgaggaggaagaggaagagttgatcatattgtctctggtgacagaggctcarggaaatccatatgtaagtggacacttgaagttcaaatctgttgttcaagggtcaactgtatttcaggtatactgattgacttttaaatttaatttttattattggctgaaacggtagttttaaaaaagcctgttacttgtcattttggttccatgtgcaattgagtacctgaaatttaggttaaactataccattgttttattctggtaacagcactttaagtttggggccaaaggttgggaatactctgatacagtaacatctcaatgctagtttttgcgaaagtagaaacttttgcaatggcctctaaactgagattttttctttccccatagattttatattgcattgccaggagwggtaaagagttacataatgtcttttttcttttttaaatacacacagatagagctaattgacagagttgatgacatctatcggaacacttcatgggataatgcaggttttaaaggctatggaatacagatagagcaggtatttatcaatagatatggcttatattacttaagttttgtaatgtaaatatttgtcacttgtattcaaaacctaaaaacttgtccttaacaataattgtaaataagttttctcagatgccaatgattttttatgatgaattgtgcagtatttttgatgttaattagttctagattgtgaagttttctgtccttagtctcgctttaggtagaaagccttttatgctgctgtgctttgttccttctttgaattcatggcctttatattctctgtagttttcttcccccctccgattatgcttaagtctttagttaaaactctggcatgcaccattgaatccttagtcagaaaatttactaaaaaatactgtgtacctttgcaaggctgtatttatatatacagaacctttaggttctttcctctcagatatctccttctgatttcttgtaatctgttaacagagtgtgtctagtaatgttatattaatgtcatcttaataatagctcatattaaaagttatttcaaattgctaggactaattaaaaaggcttctgacawagggtattgctttgggcagagagacattttgatatgtaaattatataaattgttatctctatttttttccaagctttttgtagtaaaccatatttttataagttatatagtatagaatttagaggttgaaaaaatttttaaaaatcattcaccatgtttataaatgttaaactttgatattacttgtataaaactaagagaattatttttcccttttcattctctttcactgttacgcattttctttttaagttattatttgaataggtaacatgtacacagtacaaaagccagtgaaaagtaagtctctgcagcctgtttattgtcaaaccagttcctttccccaaagacattcatgtcactagtttcatatgtatctttctagagatgtcgtatgcaggtatagtgtrtgtatatgtctgtatttgacacaacggtgctatgcagtacacttttacaccttgctttttcatttcacagtatgttggagagtacttcatgttcatgcatgtaaagctgcttcacttgttttattataaatagctgcatcatgtttgagtttcagggaacctgtaaattttctttttgctttaggcatttggaaccagtcgaagaaacaggaataatataggagattaaaacattaacttctttacatctgatgaaggatggattggagggtgtggtttagatgtgtatcatggtgggcttctaagtagttctatcccagatttgaccttgaccagccaccatcaaaactgcagagtccaccccagtaaacttaccacacagtggcagaggagaccagaatgggccttctctgcaggcaggcaggcaggcaggcaggcrgagagactcacagaaactctgagctgagcatggtttccttctttatctcacacttactaatgggagcctttgttacttttttttttcttctttgcaggtttaatatgaatttgtctgaaatgcctgtataaggagaagactctattcttagccttttattcctttgatgcacaaagagatgtatattttattattctttcctgagttgtcgactgtagtcgtaataaatattttaggctcctgtaacccaagttcttattttttcaaaataaacatggaggatatgaaaatttaagagtacatttataatattataaataattcattgacatatgttttccataccatatgcttctctgtttgtttcaaacattgaatattggtactgaagaatttatgaattttggttttaaaatgttttttttctagaacgattctttttttgaacagataaaataatgcagtattcagagccttctgacttattttggaagtgttctaagtatatgatctctttaagtatagattcgcattctcaagtctccacaagaggtaaaacctggtgaaaagcactacaacatggcaaaaagttacccaaatgaagaaaaggatgcttgggatgtgaagatgttgctagaggtaggtcttagaatcctggatatggtgctaacaccactttgtcatttctgatatgtggattgtatgtgttttaatgaaggagcrtgttagaaaagatggacacccagaagcagtctcctccagctgatccagcagtaaccccatcccatgtagcagcatagacaacaaataacaaaaactctatgaaaaagaaaaacgctataaagcaatgcttcctttttttttttttttttttttttttgagacagagtttcactcttgttgccctggctggagggcaatggcgtgatcttggctcaccgcaacctccatctcccaggttcaagagattctcctgcctcagcctcccaagtagctaggattataggcatgcaccaccacggccggctaatttttgtatttttagtagagacagggtttctccatgttggtcaggctggtcttgaactcccgacctcagatgatccgtctgcctcggcctcccaaagtgctgggattacaagtgtgagccaccatgcccggccaaagcagtgcgtcttaaccttaatatctttgaggatctaatgagacaatcagtggatcttctctagaaaataacatggatacccaatatatagagtttttgcacactgtttcattagttctgcacacttagttcagctctctctgaagcttatcaatttatcttttagggcagtaattatcaaacaggttatgaacatgtattggagagtagaaatatagcttggagatctgaaagttctctacaggaatttaaaatttttgtgtttttattctggcgattaatctaaagatggctaacttaatcattttatgtcatttggagtcttgccgtataacagggtgctgccatgtgattccagtgtcttgagtttgtgtgtgctattactttggtgtagaatgactttatatgaagcgatagtttttatcttttaatgtgttggcaagtttattagtttcttgttgttgctttaattatcacaagtggagcagcttagaacaacacttatttatcccatagtttgcatgggctagtccaggtatggtgtggctcatctggattcttgtttagggtctcatgaggctgaaatcaagttttcaaagcttcaatagaattaaaggatattataactattcatccagatggagaagcataatgtgcagcacctgtgtggtactcattcataccttgtctaatttgatctgctgagcaccctgagaggttggttgagacagcatccttgtgaggaggctcagcaagtgttactgtttattccagctgacatgacaaagcagcataggctgggggacttaaacaacagaagtttgggttttcacagttctggaagctggaagtccaaaatcaaggggtcagcagggttgatttcttctgaggccaaggtacttgtggtgtagatgctgtcttctccctgtgttctcacatggtccttccctcagtgtgtgtgtatattctgatctccttatcaggacaccagccatattggattaaggcccacccatatgacctcagtgtaccttaattacctccttaagggccctgtttccagatagagtcacattctggggtactgttgagggttaggacttcaacatttgaattgtggggtggcacaattcagccagtagcaggaagattaaatgacttgtctgattagtcatacaactggtgatggcagaggttgwattgagcacagatctcctgactcctagaacagctgaaccactgcgcctgtctgcttttctgtgagcctccagacagcccatggcaggggaggaaccaaagagaaaaatgacttatgttgacagatggtcctctccagttttcttccctaagcctcctagaatattcttagaagcctcatccttttaccacggaactatcagaatccccatgtaaccacacttcattcctcatatagggctctctggcctctcatttaaagcattttaaacattgagggttttggctaggcatggtggttcatgcctgtaatcccagcactttgggaggctgaggatgaggcagtggattgtttgagcccaggagttcaaggctagcttgggcaacatgttgtacaaaaaatacaaaaattagccgggcatggtgaggcacgcctttggtaccagcttcttgggaggctgaggtgggaggttcacttgagcctgggaggtcgaggctgcagtgagctgtgattgcgtcactgcattccagcctaggtgacacagcgagaccctgtctcaagcaaaataaatcaaaccccccccccaaattaaggtttttttaaacttggagacgctggacggttatggtagaggtttttaaagtaatgtatgaagcccttttaaattaagaaaaaaaaaatcctctcaaacctgcagtgttgatttaaatggatgtaaaatctttattttagtaacataaaactgggtatgtatgcttttctataagtgtatatttatataaatgacaatatattatgaagctcaaaaaagtttaagattaaaatttctataaaaccaattgaatccttgaaatacttgagagggatctgttttggcctggagtgctgcaatccccttatcgaattggagcatctctagtcctgggctgtatgtcttcagaacagccctcggaggagcagtgagttagttctgaagagctggagcaagctcccgaactattcccttttgtgtcccttgtcagatgacagtgtgtgcctctcacctgtgcaggtggagaagcactttagggaaagagcaaagcactgcacgaggttgtgattgctggtgctgagctgcatgccatcatagttctgttctggaatgtttagttgatttagattacatcttttagtctgatgtaattgttaatctaagaatgcttttttttttttttttttttttggtctttcaaagcaatttagctttgatatagctgaggaagcatctaaagtttgcttggcacaccttttcacataccaagattttgatatgggaactcttggattagcttatgttggctctcccagagcaaacagccatggaggtgtttgtccaaagggtaagtttttccatttcttgtgtgaatatgctgctgggattattaagatgattggattatattataattctgtatttaataagcaatttatctctgtttccttttgactttagcttattatagcccagttgggaagaaaaatatctatttgaatagtggtttgacgagcacaaagaattatggtaaaaccatccttacaaaggtatgttcttttatttctaaaagaatagtgttagagtttattgtagtagaacctcagttatatatttatgtaggtattttttwaaaaaatgtaatatatactgttttttaaatttctgcctaaataaaatttatgtatttttgtgggatatatgaaaattaaagcataaagaagaaaataaaaatggcctgtcagccttcttytgaaacatgtgaggaccactgcttttctcraaccctctgtcctggacccctctgacctgcagcaactcttagagctccctgtctcctagtcctgcagtgcagctgtcattcaaggcatcccacaccctcttattttcagaaccccatggtctccctctttctcagtgccatcattttggtgtagtgtatcttgcaggagcttcctaagaaaacgtagatgacctgcatattgttgggatttcatatatctgaaaatgtctttattccactcttaagcctgattgataattttggctgagtatattcttagttctcatgttctctatggtcttctgtgcatgttgcttctaaagaatctgaagtcattttgagttcttatctttgtttgtcacctgtttttttctctggaatatcttaagatcttgtttttctccagctatgtctgttaaaatgtgtttgactacaaataacagaaaattaaataagcagtggtttaaataaggggtttatttgtctcagtcaacaagaagttcagggatagcattttctgggtggtacagcaactcagaggtaccctcagtggctcaagaacaagcaggaagtctttgtcctcatggatgtcacctcatggttttaagatggttctcttctgtgttggagaaaggaggagaaagagaacatggctagcctagtctggcccttctaaaaagcttctctggaggccccatcctggcttttgtttatatgttactggacagcactgggtcccgtggctgcccttagcctcaacggaatgtggaaagctggctattttagctgagtatattgctgtcctgggcaaaattagggctcattaagtaaggaagaaggggagagagatgttggtaggacatattagtatctgatatactgatttttaatttttatttaatttttattttttttgagacagagtcttgctctgtggcccagtctggagggcagtggcaccatcttggctcactgtaacctctgccttctgggttcaagcagttctcctgcttcarcctcctgagtagttgggattacaagcacctgtcaccacgcctggctaatttttgtatttttgttttagagacagggtttcaccatgttggccaggctggtctcatgaacccctgacctcaagtgatccactcaccttggcttcctaaagggctggttggtatactgattttttgactatgatgttatacttggtgtagggtatgggaaaacatttgcaaaagacacatctgagaaaagactgctatctgaaatatacaaagaggccgggcatggtggctcattcctataatcttcggcactttgggaggccgaggcaggagaatcacttgagcccaggagtttgaaactaacctgggcaagatggtcagaccctgtctctacaaaattaaaaataaataaataaataaaaatttccatatgtataaagaactgttaaaattcaacaataagaaaatgaacaacctaatttaaaaacagacaaaagagcagaacagatacctccaaagatatacagatagcagagaagcatatgaaaagatgctcagcgtcatatgtcattaggaaattgcaaattaacaatgaagctggttgtaggggtacatgcctgtagtcccagttgcttgggaggctgaggtgggaggattgctcgagcccaggagtttgagacccatcctgggcaacattagtgagatcctatttctataaaaaactttaagaaacccaacaacaatgtgctattactagtagcttattagaatggctaaaatcccaaacactggcaacacaattccaacaaggctatggagcaacaggaactctcattaattgctagtgggaatgcaaaaatggaacagccactttggaaggcagttggcagtttcttttctttttcttttttcttttttttttttttttggagacggagtttcactcttgtcacccaggctggagtgcaatggcgccatctcggctcactgcaacctctgcctcccaggtttaagcaattctgcctcagtctcctgagtagctgggattacaggtgcccgctgccactcccagctaatttttgtatttttagtagagatggggtttcaccatgttgtccaggctggtctcgaactcctgacctcaggtgatccgcctgcttcagcctcccaaagtgctgggattacgggtgtgagccactacgcccagccataagaatgtttatggcagcttaattcataattgataaaacttggaagcaaccaagatatcctttagttggtaaatggataaactggcacatccataaaatgagaaaaaaataaaaagctattaagccatgaaaagacatagaggaaccttaaaagcatactactaagtaaaataagccagtctgaaaggctacatactatatgattccaaatatatgacattctagaaaagacaaaaccatgcagactataaaatgatcagtgattgctagatgctgggggagggagggatgaataggtggagagcagggtaattactctgtatgatacttcaacagtcagtataagacattatgcatttgttgaaacacatagaatatacagcacaaagagtggaccctaacataaactgtggactttgggtgatttaaaaacaggtggtggcaggagcctatagtcccagctacgcgggaggatcacttgaggccaagagttagaggctgtagtgtgataaatgcaactgtgaatacccgctacattccagcctgagcaacttagcgagatcctccttttcttttttgagatggagtctcgctgtgtctcccatgctggagtgcaatggcatgatcttggctcactgcaagctctgtctcctgggttcatgccattctcttgcctcagcctcccaagtagctgggactacaggcacccccaccaccacgcccggctaattttttgtatttttagtagagacggggtttcactgtgttagccaggatggtctcaatctcctgaccttgtgatctgcccgccttggcctcccaaagtgttggaattacaggcgtgagccaccgtgcctggcctgagaccctgtctctttttatttatatatatatatatatatatatatatatatatatatatatatatatatatttatattttaaatttaagttctaggatacatgtgcacaacgtgcaggtttgttacatatgtatacatgtgccatgttggtgtgctgcacccattaactcgtcatttacattaggtatatctcctaatgctatcccttcccccttccccctccccccaccccacgacaggcaccggtgtgtgatgttccccttcctgtgtccaagtgttctcattgttcaattcccacctttgagtgagaacatgcggtgtttggcttttgtccttgcgatagtttgctgagaatgatggtttccagcttcatccatgtccctacgaaggacatgaactcatccttttttatggctgcatagtattccatggtgtatatgtgccacattttcttaatccagtctatcattgttggacaatgttgaacaataatgtagagtggtatgagaaaagaaaaagacactaattagcttttgggaatcttttaatttctttttttcttttcttttttttttttttgagatggagttttctcttgttgcccaggctggagtgcaatggtgtgatcttggctcactgcaacctccgcctcccggattcaagcaattctcctgcctctttctcctgagcagctgggattacaggcatgcgccatcacgaccagctaattttgtatttttagtagagatggggtttcttcatgttggtcaggctggctctcaggtgatccgtctgcctcggcctcccaaactgctggattacaggcgtgagccaccgtgcttggccttaatttctaaatttatttttttcttatggtactttgttttaggggaaaaaatctctcaaactgtgttttccctctattctcacatcacaaccatcatcatcaacacagaagacttgtgtgaccagaccaaacgtgtggggatttccccctacatatcaagcagtagacatcagctaggtgtcctccaattcaattcaaacactctccacccggaaatagtatcagatctcacagtttgagggcccagtcccacaagactgactgttccctcctccccaccagttacaagtctgagcctccagaacttctgaccaactggcttcaagttggggtttccacattctcctctttgggtctgattaatttgcttaagtggctcacagaactcagggaaaagcttaacttagtttatgggtttattacataggatattttaaaggatacaaagaagctgggtgcggtggctcacgcctgtaatcccagcactttgggaggccgaggtgggtagatacctgaggtcaggagtttgagaccagcctgaccaacatggtgaaacctcgtctctactaaaaatacaaaaattagccaggtgtggtggtgcatgcctataatctcagccactcgggaggctgaggcaggagaagtgcttgaacctgggaggcagagattgcagtgagctgagattgcgccactgtactggtcaacagagggagtctttgtctcaaaaaataaaaaaaaaagaaaggatacaaagaaatagccaaatgaagggatacatagggcgaggtctggaagggtcccgagtacaggagcttctgtccccatggagttgggatgtacctccctcctggcacacgaatgagttttgcaccttcctgtcaacctccatgtattcaaaatgctctctggaagctctctgaatcctgttttttgagattttatggaggcttcattacataagcacgaatgacaactgtgtagaaatgtgattggacaaaatgggtatgttctcatactaaccgactgagtggggaagcccaccaaggcctgtccagattctccttgacctctctgtgcagcattcctccctccacagtaaagggcaggaccctctctagaatgagaatgagaatgaggatctctggacccacaatcagattagagtcttgccttggatcaggtaaaaggaggacaggagaaggtcagagagagagattctgtttcctgaggattgctcctgagccctaaagcaccccaacattataacagaagaccgtaaccagggctacggagggttgtaagccaggagccatggacagaaacatacatgtgtgtacagtagctcacgcttttacttttttggagtcacaacttcttaatggcttgatttcatgacatattttctttggtcttccagaactttcctcttaaaaaaacacagcaaaaaaacaaaatttgatttgaaatttttgagatttttttttaagagtcattagcaaatccactaatgaattttccccaagcagttaggagatatttctcttcattacacctttgggatttgagtgcttttgctaaaaatttaagttttttttcccactacggttttaatatgaacatgtggaaagacttcttgtatagaaaaatgacttgcaaaatattattttttcaggttctatggagtgatttcccccccttaggaaaaaagaactcaggaattttaagtttatatgtatatatatttattttattttattttatttatttattttaagacagactctcactcttttgcccaggctgggggttcagtggcctatctcggctcacagcaacctccgcctcctgggttcaagcaattcttctggctcagcctcccaaatagctgcgattacaggcgcccaccacaatgcctggctaggttttatatttttagtagagacagggtttcaccatgttggccagtctggtctggaactcctgacctcaagtgatccagctgccttggcctcccaaagtgctggaattccaggcgtgagccactgtgcctggcctttaagtttgatattttattcagataaatatggaaaaaaaattttagctttattggcaaaatttattattcatatagaaatcatctgataatctgatagattaagtacagccctgcaactggattctaataaaccaagtcctctaggtcattaagattgttattggacatgaattcagtcattgagaaaataaaacattgttttgttgttcctcagttgtggtttttgttttttttttaagatagagtttcactcttgttgcctaggctggagtgcaatggcatgatctcagctcactgcaacctccgcctcctgggttcaagtgattttcctgtctcagcctcccgagtagccgggattacaggcgtgcgccaccacacccagctaattttttgtatttttagtagagatggggttttactatgttggccaggctggtctcgaactcctgacctcaggcgatcaacccaccttggcctcccaaagtgctgggattacaggtgtgagccactgcgcctatccgtactgttttttttaccccttgctttttttttcctttctgctgagatgctttaggttttaacagacatgtgattgggccgaggggcatgtgaggaggctggacaattaactacagttagcttattgcatttatcagcaccagattgtgtgtggttgaaatggccaaggtttgatgttttgttatgaatgttccagtatatcttataaattacattttcttaaattgatttgttactacttacaataatgtttgatagtattaaataaaatcctacttattctgttaaattcatataattggtagaagaatcatagtccggttattactcttttttgagacaaagtcttactctgtcacccaggctggagtgcagtggtgtgatcatagatcactgtagcctcagcctcctgggttcaggtgatactctcacctcagcctcccaagtagctgggaccacaggtgtgcaccaccatgcctggctaatttttttttttttttttttgagacgaagtctcrccctgtctcccaggctggagtgcaatggcgtgatctcagctcactgcaacctccgccccctgggttcaagcagttctcctgcctcagcctcccgagtagttgagattacaggcgcgtgcctccatgcccagctaatttttgtatttttagtagagacagggtttcaccatgttggccaggctggtctcgaactcctgacctcgtgatccacctgcctcagcctcccaaagtgctgggattacaggcgtgagccaccatgcctagcccacctggttaatattttttattatttttgtagagatagggtctccctgtgttacccaggctggcctcaaactcctagagtaaagtaatcctcccatctcagcctcctaaagtgctggtattataagcatgcagttcttattctcttgttgatctgattataaggctctatttaagacagcataggcccaactggcagaagtaggtgatggctggatattgagaaataatgttttctttgcatgatccttaaggaagctgacctggttacaactcatgaattgggacataattttggagcagaacatgatccggatggtctagcagaatgtgccccgaatgaggaccagggagggaaatatgtcatgtatcccatagctgtgagtggcgatcacgagaacaataaggtatgtgtgtgtcgagaattttttatgtggtttggaaagaggctgtgtataatgatcataatgagagctcagaaacgtattccattcctaggcgtttccctagggatggatgtgcaaattacaaagtaccttgaaacgtggytgtgtgttttggggtgaagcacggttcatctaaatctggttaaaactatcatttggactttgttgtcaagcttaatggtgtagatttgagctctaggaaaaattactaataataatggctttttttggagttctggatttcagggtctggtgggctcaggctttatgttaaaaatttgtcatttcatttacaagttgtcattcattttaactctacaatttacatgtacagtttacacgtttttattaacttttgcagttaaacacatagtttgcctgactacaagcctcatgggagaaaggcccttccttgtctgtcttattcatagctctatcttattcatagctctatctccagtgcctagtaggagtatctggcatgtaacaaatatttgttgaataattaatggaatcatttactattgggggtttctgatagagaatactagttgatttgtgatactgtaaaacactttcagagactttaagagtgccgtgactaactcttagagtctgaactaaaagttgtgttaataaatatctggttctttcattttatttgaagttaaacagcataaagcagtgtgaggaaaacaatagttgcactgctgagttaaagagggtcggtggggagagcttaaaggagtctgattctaatcacaaaagattgtgaagtatttgtcctgactcctattttgagcttggctgtgggctaatgtgcaagccttccctggacacagagggcaagattacttctgcttttccctggctctgacaccctgctttctgaaatttctgcctcctgttctttttgtgatctttgattgttgcatctcatttttttttggctttttatgtatattttctgcatctcattttctttggctgttatgtgtaaacagttcctctgttactttgcatgttatgttttatttttcctctgcttgacaacttgtgccagagaaacatttttctaccmctttttgtctactcttccaacctgtcaaactgttgaattttccttctcttttcatagtctctgcatttctaatcatgttcactatagttcagtgctgcccaatagaactttctgctgcggggcgggggatgttttgtgtctgctctgcccagtatagtagccactagcccagtggagcaattgaaatgtggctagaaactgaggaactgaattgtaaattctattttatttaaatttttaataatgtttgcctgtgatgggagacgggaatgggcattaactgtaaaaggacatgagtgasattactggaaggatggaaatgtcctaaaattgacttatagcaatggtttcaacacttggtaaagttattagaaatcactgagttatatacttgaaatggatcaattttgtgatatgtgaaatatgtcttaataaagttgttaataagccaacaaacaaaaacagcagtgtgggagcagaggaaaagtagcgcggatgtagaggagctgtgaagtcataagttgattattgttgaagctggtgaggggcacgggggcattcatgataccatcctgtctacttcatagatgcttgaatatttctgtaatagaaastgtaaaatatgtgactaggaacaaaatttaagtagccacatatggttggtggctaccatattgcatactgtttctctaagtaataggtcatatgcttcttggttatgaggatagtgtcagaacttgggagcaaaatgttttactttgcagactgcctgrgtggacatgcatgctgctgactcttcctgctgccagttctggggctcttcaaaacagccctgtaagaacttgccagtgaggcatggtggctcacacctgtaatcccagcactttgagaggccgaggtgggcagatcacttgagcctaggagttcaggatcagcctggacaacatgtgaaactccatctctacagaaaatacaaaaattagctgggcatagaagcacatgcttgtagtcccagctactcaggaggctaaggtaggaggaacccggggagttcaaggcggcagtgagccaaggttgtgctactacactccagcctggatgacagagtgagactttatctcaaaaaaaggaaaaagaaaaaaaagaacttgctaatgagaatggggcctgggaagaactttttttttctggagctgccagtctgtatcaatgaagaacaatttatttattttgtcctgagcacatcatatttagtctgtgtttttctagtttggttgcccaagtaggagtccccttgtaagaagataatgtgcatcttctatgttttatttatttattattatttattatgattttttgagtggagtctcactctgtcgcccaggctggagtgcagtggtgtgatctctgctcactgcaacctccacctcccaggttcaagcgattctcctgccttagcctcctgagtagctggggttacaggtgcatgccaccacacctggccaatttttgtagttttagtaggatggggtttcaccatgttggccaggttggtcaactgactggtcaacaaactcctgacctcaggtgatccacctgcctcgacctctcaaagtgctgggatkacaggcatgagctgctgtgcccagcctatgttttaaatgaattccttaataaaaatatttttaactgatgaaaagggcttacaggacaaaaataaagtagttccttgacctagaaagacagaacccatcaccctctactaggcaagcctatgaagagcagtttgccacaggtggacttctctgtggacagatgacattagtgaaaaggaatgtaggacctttgagattgtaacttcttaggaaggtttgctgaacggaagaggaagtcttakgacaaggatgcaaacagaagctgccagatcttcagggatgtgtaggcagaaagccagagttgcgggttggtccttttatcgttagtgctctccagctgctkgggagttgtaactctgacaaatcagtgaagaggtcttcttatctgttcactgtgaattttaactccattttaacctgataaaatggaacccagagatacatgatgttgatgaataaacccaccaaaatgacaactgcctgaggccccgattagaataaccagaccccttagacatctgtactgtaacgacagatttgggccgggcgcggtggctcacgcctgtaatcccagcactttggagaccgaggtgggcagatcatgaggtcaagagatcgagaccatcctggtcaacatggtgaaaccctgtttytacaaaaaatacaaaaattagctgggcgtggtggcatgcacctgtagtcctagctactcaggaggctgaggcagaagaatcacttgaacccgggaggcggaggttacaatragccaagattgtgcctctgtagtccagcctggtgacagagcaagactccatctaaaaaaaaaaaaaaaaaaaaaaaaaaacagatttgaagatgttttttaaaaagccagttagtatttctgtgtaagatgaggtctttgctatctttctgaaagtagctcctttggtgtctgatttggtrgttacaggcacctttggagggtctcatacacttggctctcaggggcttcatgattgttgtctggggtgaaagtgaagccattttggcatctgcagagcactttggagaccccgacctaagaagtaactatgctcagttttccctaagcctcttctttttttgataacttcaggaggtctggaaaatgaccgcagttttagagctcctgataaaaccctcagccttaaaagggagttatcctagtggttctgtactccagggtgggaaggtagtgtagagactttttgagacactggtcttgctggttgatgaaaatgtttaggtaacaattggggatttaatttatataaaatgtactattatgcctattactaagctcaaatatttaaacaactttaaacttggatcatccatataagtagccaaagaaggagaagaaaccccttctcctgcatttctgaattgttttgtctgggacaacattaacctacagaggttcttaattcttgtcactgcatgagtggcatgcctgaggtgaggagatttcaagtctgatggagctacgagctctctgttgtgctattctgcttgtccttaartgggctttgactgggatgtttggtctcagtatttgtatagcttgcttaccttcgtaagaagaattatagatccttaaccaagttcacatcagccatttagcattctatggagggaggttcccagttccatatcagtggcctttggaggagactgtggtggccttgccataactccagggtggctctgatggtggttttacattaagagtttgtctctagagaagacacaaacattgcatgggaatacatttttatgatattattttgggtccttattgccttttttctctcaagatgttttcaaactgcagtaaacaatcaatctataagaccattgaaagtaaggcccaggagtgttttcaagaacgcagcaataaagtttgtgggaactcgagggtggatgaaggagaagagtgtgatcctggcatcatgtatctgaacaacgacacctgctgcaacagcgactgcacgttgaaggaaggtgtccagtgcaggtgaggagtctctccacagggattttgggaagttggtrtaacaagatgtccaaaataagagaagactgaacttgcaggggctttagaatcaactgaaaggggtgtgagtgtgtttgtttacatctacctcttttgcccttcacagcaagaaattgctttctgggcctggcacggtggctcactcctgtcatcccagcactctgggaggctgaggtgggagaaatgcttgagaacagcctgggcaacatagtgagacactatctcttaaaaaacaaaaaacaaataagaaaagaagaagctttctggaaagcagtgtgacattatgtaacaaaatccttgaccttgcatgctccttggtttagcagtcctatagttaaaagaatcttttttttttttttttttcctgagacagagtcttgctctgtcgccaggctggagtgcagtggcgcgatcttggcttactgcaatctttgtctcccgggttcaagtgattcccctgccttagcctcctgagtagtgggactacaggcacgcaccaccatgcccggctaattttttgtattagtagagacgaggtttcactacggtggccaggatggtctccaactcctgaccttgtgatccatccaccttggcctcccaaagtgctgggattacaggtgtgaggcaccgtgcctggcaaaataatcttttttatttaatttaatttatttatttattttgagacggcgtctcgctctgttgccaggctggagtgcagtggcgcgatctcagcgcactgcaatctccgcctcccaggttcaagcgattcccctgcctcagcctccccaataactgggactacaggtacgcaccatcacgcctggctgattttttgtattttagtagagacggagttttagcatgttggccaggatggtctcgatctcctgacttcatgatctgcccaccttggcctcccaaagtgctgggattacagaggggagccacygtgcctggcctttattttctttttgagacagggtctcagtctgttgcccaagatggagtgcagtggcatgatcatggctcactgcagcctcaacctcccaggctcaatcagtccttccacctcagcctcccggatagacaggactacaggtgtgtgccacctggctaattttttttgtattttttatagagatggggttttgccatgttgcccaagcttgttgtaaagtcctgggctcaagtgatccacccttctaagcctcctaaagtgtggagattctaggtatgaggcaccatgcctggcccaaataatcttttatttctttttttttttttttgagacggagtcttgctctgtcgcccaggctggagtgcagtggcgtgatcttggctcactgcaacctccgcctcctgggttcaagccattcccctgcctcagcctccccagtagctgggattacagtgtgcaccaccacgcccagctaatttttgtgtttttagtagagatggggtttcaccatgttggccaggctggtctcgaactcctgacttcgtgatctgcctgcctcagcctcccaaagtgttgggattacaggcgtgagccactgctcctggcygcccaaagaatcttttgggcaacagagataagatttaacaagggtataagatttaacaaggtttttttatggctacatcctaatagcaaaattttggaaacaatcaaaatgacagtcttgggatatgaatgttatcatgattctatatactggaatagtgtggaggaagtaggttacaagttagaaagttacccaggttttcattttttatatacactgatagaccagtgcctggcttagaagtaaaagggttaaacttcagttttctggtgaataattgagatttaactggatacagtgcatattaacgctgtaaatactgatggggagtagagttctggctgccgagtgtcttagctatggattgccttgtggccccaccttgtcttttttttttttccttgtctttttttttttttttgagagagtctcgccctgttgaccaggctggagtgcagtggcgcgatcttggctcaccgcaacctctgccttccaggttcaagctattctcctgccttagcctcccgagtagctgggattacaggcatgtagcaccatgcccggctaattttttgtatctttagtagagacggagtttcaccatgttggccaggctggtctcaaacccctaacctcgtggtccacctgcctcatcttttttttttttttttttttttttgagacagaatttctctcttgttgcctaggctggagtgcagtggtgcgatctcggctcactgcaacctctgtctccggggtccaggcgattctcctgcctcagccttctaagtagctgggattacaggagcgcaccaccacgcccagctaatttttgtatttttagtagagatggggtttcaccatgttggccaggctcatctcgaactctcctgacctcaggtgatccacccacctcggcctcccaaagtgttgggttgggattataggtgtgagccayctcgcccagcccatcttgtcttttttaaattaatgcgttaaatgaatgaaaaccaagggcaccaagatgtttcacaggtgattgctgtgttcccattcttttctcctatagtgtggcatttatgtgacctcacgcacattaggaagggacaaagtgtgtgcaggtagctctagcagcggagatgtctgatgatgtaggagtgggtgacrgagccaggaggtcttccccggtgatcttcaggtcactgtaacrtaactgtagcgtttgatttgatatggggccataatttgaattgctctgttcctgtctgctgttcttctccagtgacaggaacagtccttgctgtaaaaactgtcagtttgagactgcccagaagaagtgccaggaggcgattaatgctacttgcaaaggcgtgtcctactgcacaggttcgtgttcttgttgcttccttggaatgctgtgggtcaagtgtgtgtgtgtctttgaaaaacaagattatgttttgttcagatgagagacaccttatttttaatctcatatgccgggttgagtttctggcactccttagtttgtgacacttggctttggtgggtttaagacctgtttctatttctctttcatttccatcactctcctctttctcctcacagacatccactctactgtggttaatatttgcctggatatgtgtatatccttgaaagatcatatagtgttattttgtgcatgtatgtgtttttaatgtgccaaaatgatattctaccttaaatttacttttaaaaaattcagtatcatgttttaaagaattacccatattgtgctacagataatataacaaggtttttaatggctacatcctaatagcaaaattttggaaacaatcaaaatgacaatcttgggataatgaatgttatcatgaatctatgcactggaatagtgtggaggaagcaggatacaagttagaagggtaaccagttyttctatatgtatctatatgtatttcactgttggggacacctacatattgtttagttatatgattggctgtgttttacttacaagtcaccaagtggtagctacttccattgccttcatccccttgatattccagataggacacagatcacatcctcctacgtcccttcaggaacctgtgtgtttctctgggtactgaggagtgtcattgtgtagtcacagaggcaggatgtgctggtctctagagcaccactgctaggttgcctgtgtctgaggactccttatcctgacgttctggccaacgcttggaattaccctgctgtcctattagcatgatgagtataaagtaatctcttgttcttacttttttttttaacagcccttgtcctaatgcacttacttacatttttcttgagcatctctttatatttttcagctattcagatttctcctgtgaatagccagttcatatatttggttcattttttaaaaattgggtttcatgttatttcactactgtgaatttggaggagttcttatgtaatcatccatttgggcatacgtctcctatctgttgccattctcagaacagaaatctttaacgtaatcaaatccatcattttgttgtgtgtgtgtattttttaaacacatggttcagaaaagccatggcggatggttaaaaagatattttccacagctgcttctattagcttcataagttgtccttttacattcaggacttgaatctttctggagctaacctttccaggtgtccagtatcttttgttcggtcaattgttgctttaaaaatttcaaagctatgttattactaggtatataaacggacatatctctacatctttatctgctgttccttaccagtatataatgttccttttttacccttgcgatgttttttgacttaaattgtcaaaaagcaatattcagtttgctattctagtttttttgttcctctgatatatctatctgtcccattcttatatttttcaaaatttgtctctcttggttggttggtttgattttgtaatagctttattgatacataattcacactcatgtagtttgcccatttaaagtgtacagtttaatgatttttagtatattcagatttatgcagtcatcacaattaattttagaacatttacattactccagaaagaaaccctgtatcctttagctatgatcctccaatccccccattccccacractcagagcaaccactaaccaccctattctttatggagttgtctgttttgaacatttcatataaatggaattatacaatatggtttcgtgaccacatattgtatgactggcttctttcactgaacatagcatttttaaggttcatgtatgttgtagcatgtatcagtacttcatgtacttttattgctgggtaaattccattgcatggatatgccacattttgtttattcattcattggttgatagacatttgggttgcttccacttttttgctataacaaataatgctgctgtgaacatttatctatgagtttttgtgtggacagttcctttggatattattcaggaatagaatttctgggtcatgtggtaactatgcttaatcttttgaggagctgtcagactgttttccaaaatggctacaccattttacagtctcagcagcattgtatgagggtcccagcttctccatatcctcaccaacacttgttatcttttttattgtaactatcctargttttgtgataaggatgcaaacagaaagctggaggtcttcagggacctagtgaatgaagttgtgtcctattttggcttgattttggttttccgtgtgcatagtatgacatgttgcccatgtttttatcttttgggatctgtcactatcacattactttgccaaatgttaggaacctgatggcccggcacagtggctcacacctgtaatcctagcactttgggaggccgaggtgggcagatcacgagatcaggagatcgagaccatcctggctaacacggtgaaaccctgtgtctactaaaagatacaaaaaattagctgggcgtggtggcgggcgcctgtagtcccagctacttgggaggctgaggcaggagaatggcgtgaacccgggaggcggagcttgcagtgagccgagatcacgccactgcactccagcctgggcaacagagcaagactccatctcaaaaaaaaaccaaaaaaacaaatgttaggaacctgaatatctaaatcaagctttaaagaagcatttgctagctatgctcaatgtttcatcttcactgtaataataaaatagattgagaaaaatgctttcttttaaataaacgtaagtaaaacaatttgaaaacgtttgttcttatcaaacagccttttgttcccttgatattttatacaaaatagtagatagcagagkataagttcctgataaggaatcagtattttctagcaggaaaagctagagaacaacaacctcaaaaaaaaaaaaaaaaaagaagaagaaagaaaaaaagcaattagcatttcacaaccagcagcagcarcatcacctgggagcttattagaaatggaaattgtcagtcccctccctggatctactgcatcaaaaaatgtgggaagggaggccagcagtctgtgctgtgtaaccttctgtcaggtgatttccatgcatgctaaactttggggaccatgctagatagatgataccattttcagaattattttcctacctgtctaatactctgactttagtcttttaagaacagatgctcaacagatatttattgagcattttttaatgtatcagggcagtatcatataccaaaaatacaataatgatccacaatataaaccttccctgagctcactggacatcatactttcagtaatagtttgttaaatgactgttgacatgatgaatgcccagtgctcatgaaaggttttatgagaaccagaggcaaagtgcctggttatctgttgggtacttaataaaccatcacttttgtttgaaactggccagattttctgtacattttgtgttactgctctgaaaccctctaagtcagaattcttttgattggcttcattcttcagctgaaaggccagtccagagctgtggatatatagtccattgctttcataaagtgttttttttctcctcctctatttgtgttgacttttagctacttgtgctattcattttccagaatgattcactcattccatcctgtctctcccagtttaactttctttggtgggttttctttggcattattggcctgggcacagtggctcatgcctatcattccagcacttggaaggccaaggtgggaggatcccttgagcccagcagttttacaccagcatggtcaacacagggagatctcgtctctcaaaaaaaaagaaagaaaattagccaggtatggtggcgtacgcctgaaatcctaggtacttgtgaggctgaggcaggaggattgccggaacctaggagtttgaggctgcagtaagctatgatcacacccctgccttccagcctgggtgacagactgagaccctgtctcaaaagaaaaataaaaagaataattgatttatttaagaaatatttgtagtatacctataatatgatagggattggagataacttaatagatttgatcattgctgtcatggggctttccagtctagtagagggaaaacagaaaataacattaaatatatatatataaattgcaaaacatatgcaatgaaggagagaaggagtgtgatagtgcataatggaagtgggaggccacatcaacttagcatcctcagggatatctcagaaaacctttgagacaaaacttaatccataagaaaagccagctaattgccccaaaagagtggaaacaccagcattccaggtagaaggaatagtatctgttaatattgaaggaactgaatggaggttgtcatagccaaagcagtgggctgtgggagagttgtgtgcgatgaagtcagggccagatagggaaggccgtggagttcttttaagccttcatacaaagtttgcaatttattctaagtaatagcacataggatattcttttatatatgactgtgagatgcagaagtggagaccatgcattctaactggggcttgggaggccagggactcatgcagcctagcctggcacatagccaggcactcccatttaaatgctgattgctggtgagatgcaggctcttgtcctagctctgtaggtcactttttgcttttgcaaggtaagatgctcacttgtatgagaaacagcgtattatgcacctgtagaactggtggacctgtgactcattctttytgttatgactggtgtttgcttccaggtaatagcagtgagtgcccgcctccaggaaatgctgaagatgacactgtttgcttggatcttggcaagtgtaaggatgggaaatgcatccctttctgcgagagggaacagcagctggagtcctgtgcatgtaatggtgagcagttttattcccagtccagcagcaggagaaaacatggcctttgtctgccaggctcccttcctccatttggaggttgtgcgaatgacagcagtggtgagatccaagccgaggatgaggggatggggaagggcagggtggtgtctggagacagscatctctgcatgcagatccaccatacctgggagacctatcctgttggtgtttcttcttgctgcagtttcaggccatatggcaggctttgaggtgggagaggagggaattttgttgggggtgagtgggtgggtaggtagaggtgtgtcctagccttcctctgctccatatcatacaaaccacaaaagcagcagtagctatctacattacattggcatggaactaggatactcctgcaacaactccaccagagagagctgattccaggacctaaccccactagatgaggatttttgcagttatcaagaaggctgggtctgctcccctctgatctcttagagcagcctggggcaggagcctctctcctgctggcctgtcagttttccttaggtttctgtgctattttggaacccctgggtttgagggcatcctcatggactggtcagggactggctggactctgcttcccaccccacttaaaccatgggagtcgatgagggagttctcttgctttcaaaatagacagagagccaggtgtggtgactcacacctgtaatcccatcactttgggaggccgaggtgggcagatcacttgaggtcaggagtttgagagcagcttggtcaacatggcaaaacgctgtctctactaaaaataaaaaaaattagccgggtgtggtagcgtacacctgtaatcccagctgctagggaggctgaggcaggagaattgcttgaacccagggggcggaggttgctgtgagctgagattgcgccgctacactctagcctgggcaacagagcgagactccatttcaaataaataaataaataagtaaaaaataaaataaataaaagacaaagaacccggtagttaaataaaatcactgggttggaagctcaccatccatacagtggagtgaggaactcttccaagttcaataatgtgtaggtaaagaagataggttgagggcagtgtctcacatctataatcccagcactttgggaggccaaggtgggtggatcacttgagctcaggagttgtttgagaccagcctgggcaacattgtgaaacctcacctcttaaaaaaaaaaaaaaaaaggtaacacgtagcagatgccaaataaatctgttgtgttgaatgccaagaggcttggggtgctctggaaggacagagcccgacacagtaaaagtccaagaaatattttataaattagtgaatgatgaaaaggttttctttttttttttttgagatggagtctcactctcgcccaggctggagtgcagtggcgcgatctcaggtcaccgcagcctccgcctcccgggttcaagtgattctcgtgcctcagcctcctgagtagctgggactacaggcaagcaccaccacatctggctaattttttttatttttagtagagatggggtcttgccatgttggccaggctgttctcgaactcctggcctcaagtgatctgtccgccttggcctcccaaagtgctgggattacaagcgagagccactgctcccggccttttctgaaaaggttttctttttgcttgtttttgtgttctagttgatttctttttctcctaagtatggtttaattttctggcatttctgccattcttatgtatgcccacatggctcacagatgcccggtgttttatcctgtgacctgtcagagctgttcttgggaggagttgtggagctttggctgcagggctcatgctcctggggtcactgagctccccacccaagggtggacagttgtgtcccagctgctctcgctttcagggagccagtgtgggccctgaggggcacactttagactgaaaaaccaaggattgaagtcagcagggtgacaagaaagttgggacaaagggaagcatttagaagagcattgtgaggggcttgaaggggagagaatagttagactttgaagagaggtcttgaatctagaatggatttttctctgcatttttttttaaaccttgtggcctctgtcactgaaggctgaggagtgtgacctcagaaactactccttggtgggggctatggatagtattagctatttaaataaaaaataaatgtgatttcttacctctttgggagcatggtcagggaggaaagaggaggcaggaggagaggyaggtctcagaacaatccagctgtcaatgcgtgttctctgttccagaaactgacaactcctgcaaggtgtgctgcagggacctttcyggccgctgtgtgccctatgtcgatgctgaacaaaagaacttatttttgaggaaaggaaagccctgtacagtaggattttgtgacatgaatgtgagtatttatgtacagctttttctgtaacagccagataggaagtttttattttgtaagtacwtgattttgcagatgaaaacaaatcaaaacacaagtggggctacatccttctggcccattgttatctacgggtattacttaggaggagaagacggagtgctttcaggtccctgcctgtagtttccttctgtggtgggaggctttgagcccagagactgagaaggactggggtggggactttatggtaaagttggttggtttcaggcagtgggtcctaattatgttttcctagattacttacagaactgactaagattgcaaaattattcagggtgtgattttgaaacaggtgctgaatgagtaggaaagacctagaaggctrcttgacttacttaagccagacccttttgttctctagagaagcataatttttctcatgcagaatgatgggagagggttttaagatttacgaggcttcacagggagtctggctgtgttgttcactgtccactgtgtatgtgtagagtccttactggaatgcctcatctttagcaaactggtttccttgatttttgtctcctggtaattctaaatcacttgtaaaaatggagtaattatgaaagtgttaatgacagatgttctactttcttgggtactcattaygcggaagttattgccttgtgtcaaagatgggaaaacgtttgattttaatgaagccctttacatgtcagttatttttataaagctacattgcttctgaatacattgtgtttgggaatgatgctgtatgtatgttttttcttcatagggcaaatgtgagaaacgagtacaggatgtaattgaacgattttgggatttcattgaccagctgagcatcaatacttttggtaggtgatttccccagattacttactgagagctgagtcaatttctgtgatgacattagaaaagtgtgctttcagagtgatgtgctttaattctgcagtagaaggtggaactattcacagctttagttakgaaacaactttgttggctagaataaaatgaactcatagatagtctgtccccgtggagcttggatgcacagattttctgacaagggaaataaagtcaaaatactggcttccttctttacccaaaaatatccatgtgattagcataagcatagtttaatgctatagactgaatcctgattgatgtaagagtgtttatttgactgaatgctatatactgaatcctgcttgatgtaaaagtgagcctcatattttgcagaagcagggtatatcatgttgtcacgagtccataatttaatcacaaaaataatatccaggtaacaaaaactttgtcttcttaagcatttactagtagtagcattccatattaatctgttgacacagctactccaggtaacatgttgaatattctgcaatctcttcctgtcagccagtatatgagggctatttctttaaaagcacttggtatggagagatggtgtggtgtaatacaggcagcacagacattctgctctcggtagtatgtctagccagcagctctggcatttgacacaatggtaatatcctaagagcatttcactttagatttgtgaagtacttggtcaagacattmactgtttggaattgttcacaggaaagtttttagcagacaacatcgttgggtctgtcctggttttctccttgatattttggattcctttcagcattcttgtycattgtgtggtaagtcatcaacttttaagtaattaaatgttttatttaaattttgatcaaytccaaccatgtaatctctggaaaaggtaaaacttgttcttagcaaagtttggcctgatatttccaatagctttttttgttgttattcctaggggaacatgtcttgtagaaagcttaactaatggtcttttaaaaaaaatactatttttgtgtgttggtgttttaatatataartttcttaggaattttatacttttaagcataggagactgtttaactggatttgtccaggtcctttgatgagtaaagcccttattkaagagcattttcaggctgacttcgttgcaatagagcaaatatcaaayatcggcatttcagatgttccccatatatcatgtagattattggcagcagatggctatgtcttcagccttctgcacaaataggatgtagggactggggcccagctgtcatatagagtatttacatcttccccaaaaaataagagtaagcagtcttttctgttctcattcagaatcagtaacagctacaagttgaattgggctttgactaaggaactcctggtcctttataaatttgaggccctttttcataaatgttcttacgaatccattcacttgcatctgtggggaatggggatttgtctgctgtagagatgagaaagtcacacccaggcttccagacttgttttcccaaactctttcatagtggccttcctatgagcatttaaaaattccagcacaactctgatgacaaaggagtttttcctactgcctccttcctttcctttcctgctggcttctcctgcctaggggccatctcacagagcagctcttcctcagggtggtgagcatgatgggtataggaagatctctagggagcacttgtgctgaagaaagctgaaggtgacgtgcttgaagctttgacagatgtctctggatgacagtgccatccatcacgattgcttctattggaggatggaacctattttgtttacagggaagttgcacatgtggacaaggcacgacccttgatttcagagcaaagcctccgataggagggagggccatggcttgtttttggtcatagaatgcattgatggcacccagacaggaagcctagtcctggattcttggtccttgccctctgtcacctattatgcttcagccacaggcagggatggggcagcagatggccatgtggttagccttctgcagaagtaggatgtagggattgaggcccagttcctccagcagagcatggtccacagaaactgtggagacagctaagagagtgaggccatgggccggggcagtgcgaagaatgctgcaggcccagccacctgggtcttcctaccagttgcccttccagtcagtgcggtcctggtgtacccagcatctgggacatttgtcatttcatgcacaggaagatgcctttattattcccctgcccacagagggataaatttctcagaaaacatagcacttaaaccttgcctctttctgtacttaacgccaaaatgtatttcctttgagtgcaaaggaaacacttctagactggtggcataactaaagcttgggtgagaaatggattgtcatctgttgagcctgctatcactttctacaactcaggttctaagttcttcagttagtgttaggaatagcctgtgatgaartagtactcactaactgaattgtatttgtagggaatgaccttcttgctgtttctttctaggataagaaattggataaacagtatgaatctctgtctctgtttcaccccagtgtaagtataccatatgaaagaaacataatcttcgcctggtctgaggccctgttaggcaaagaccttcacctgacccagcaagagctttcactggctgatggaaggtcatgttgcagcaggaagggtctaggttggaatgtttacccttctgacaacagtgatggtgaacttcgattagttgcatggatggacatttaaagagctgtgctgtccccttcccaagccataaggagtgatttagccattcaacacttagttaatattttgagttcaatttctctcttgggatcttaccttgagaggtttgaatcctcttttgggtcttcaaatggtaagtaagttttcaggatgcttgaaagctagtaattactgtttttgccattaaaagtaatggcattaattacttttgcaccaacctagtattttttagtcacttaggttgagtgagcctcacctagcacttttttcttagcatcacagtgccaacagaataagaggctgtttgatgggtaagggtggagctgtgaggacctccgattcatcttttattcctatcaatcaattgaacccatgtctttgcagaacgtcgaaatgctgagcagcatggattctgcatcggttcgcattatcaaaccctttcctgcgccccagactccaggccgcctgcagcctgcccctgtgatcccttyggcgccagcagctccaaaactggaccaccagagaatggacaccatccaggaagaccccagcacagactcacatatggacgaggatgggtttgagaaggaccccttcccaaatagcagcacagctgccaagtcatttgaggatctcacggaccatccggtcaccagaagtgaaaaggctgcctcctttaaactgcagcgtcagaatcgtgttgacagcaaagaaacagagtgctaatttagttctcagctcttctgacttaagtgtgcaaaatatttttatagatttgacctacaaatcaatcacagcttrtattttgtgaagactgggaagtgacttagcagatgctggtcatgtgtttgaacttcctgcaggtaaacagttcttgtgtggtttggcccttctccttttgaaaaggtaaggtgaaggtgaatctagcttattttgaggctttcaggttttagtttttaaaatatcttttgacctgtggtgcaaaagcagaaaatacagctggattgggttatgartatttacgtttttgtaaattaatcttttatattgataacagcactgactagggaaatgatcagtttttttttatacactgtaatgaaccgctgaatatgaggcatttggcatttatttgtgatgacaactggaatagttttttttttttttttttttttttgccttcaactaaaaacaaaggagataaatctagtatacattgtctctaaattgtgggtctatttctagttattacccaaagtttttatgtagcagggaaaatatatatctaaatttaaaaatcrtttgggttaatatggctcttcataattctaaaactaatgctctctaaaaacctaaccacctaccttacagtgagggctatacatggtagccagttgaatttatggaatctaccaactgtttagggccctgatttgctgggcagtttttctgtattttataagtatcttcatgtatccctgttactgatagggatacatgctcttagaaaattcactattggctgggagtggtggctcatgcctgtaatcccagcacttggagaggctgaggttgcgccactacactccagcctgggtgacagagtgagactctgcctcaaaaaaaaaaaaaaaaaaaaaaaattcactatctacaaacctagamtatttaaaatacaaagattgcctgttttcaaacactattgaataagagggtgagatatttcttaacaacaacaacaacaaaaaaaacaggttgttttgaatgtgatgagccagccaggagatagaatactacctgcccttagggttgggggctgtccccacaagacttgatacttcagaaaccctttttattgacccacaagcagatatttgaattacttcttactttattgctccaggattcyggatgggctgcatttactgtgtgaaggataaaaatcattagcctggattctgatttctataaattgccattaaaagctttttttcccctaagaactgaaatgtgctcaccagccaaaacattttaacttgtaaattttgagggcagttaaccaaacctgtgactaatcatatctcctcctaccccccatttccaaggacatttgttactcagatacttgttatactaatacttgaacttgtaccttatggtatttgctatcttttaactagtcatgatattcttatactttagttacacttytggaatttgatacaaggttgagtggggtgtgtgggtgtatgtatgagtgaaacagttctcaaaagaatgtaagaaaaaccatttttataaaattgtgactttttaaaaacatagtctttgtcatttatagaattaacaagctgctcagggtatattttatagctgtagcactgatatctgcattaataaatactgtcgaaacacaatggacctaagtataaaacttccctgaaaaatcatctaatacttttattattaatatcagtggcaaaggtttaagcctgaggaaaaaagcktacctctacgtattgacaactttgagttctgtagataacaagcagatttgggtctcctgtgattggctaatggtctccatctcccagcagacttaattcaggttttgcttctgctacatcccgccagtaaggaagcagcaaaggtagagaagagacctttttctctatcaaaggccagagatgcgagaacaaaaattcattcccctttggagacaaatgtagtccatctgataaataagatgagaagtcctagaagggagagaaatcggttaaaggtgggtaactggccacgtgtggtagctcacccctgtcattccaacactttggggccgaggattactggaagacaggagtttgagaccctgtctctacaaaaaattttaaaaatacaaaaattagctgggtgtggtggcaaacacctgtattcccacctacttgggaggcgaagatgggaggatcacttaagcccaggagttggaggctacagtgaggtatcattgcaccactgagttccagcctgggtgatagactgtctccccccacagcrcgcgcgcgcrcrcracrcrcacacacacacrcacacacacacacacacacacacacaaaaaggccggggagggagggtataacttttctaaatgccagtgtgtaccattctctcatttgtggccctgcgacagaaatatcaccagcccctttcattgtaggcatctgaccagaggtgtcttggactacagtagcactgatgtgctatttacgtaggtgtttgaacacacagagaaccctgactagtgctatagtgctgtctccatattatagaattgagtttcatgaaagtcactcaccattaagtgagctgggacctcattccaggtcttctgaatcatatgacatgattctcaggttatttgaaagaaccttaacaggtaaatatggcctattaacgtaatcagcaaaaatgaaaaatttggtattaggagtgttcaggggccccatgagtcaatattgtttttgactctaggcaggtttttaggyagaaagaacttctaccatctaacctagaacagtaattgctgggacacaggagtccagtctccctcccattgccctgaactcaagagtacatatttaaaaagatacacatatttttggagacagggtcttgctttgctgcccaggctggagtgcagtgacatgatcatggctcactgcagcctcaacctcctgggctcaagcgatctttctaacctcagccccctragcagctgggactacaggcacgtgccaccatacctggctacctggctaatttttgtgctttttgtagagatgggtctctcattatgttgcccaggctggttttgaactcctaggctcaagcaatactcccaccttggcctcacaaagtattgggatcacaggcatgagcagccataccaggccctgaactataagaattttacccatacagccatttctttcttggggaagaatctcactagccaagagctctgttagaatctgggtggccaactagcttatgtgacttttttttttttttttgagctagagtctcactcttgttgcccaggctagagaacgatggcacagtctcggcctaattcaacctctgcctcccgggttcaggtgattctcctgcctcagcctcccaagtagctgggattacaggtgactgccaccacgcctggctaatttttgtatttttaagtagagatggggtttcaacatgttggccaggctggtctcgaactcctgacctcaggtgatccacctgcctcagcctcccgaaatgttgggatgataggcatgagccaccgcgcccggccttatgtgacttttaatagaccagaaatttagatgctatcatataatagtagcacttcttcttcggccttggttttctcatctaggcagtttgagatgagatgatctctaaggacgaccctctcagttttgtattaaattgaaaaagacatgtgagcaaaactagcccaatagtttgcagtttcctttcctagacaacagaactctagatgtcgacccttttggcactcaagctgccaaggcccctcctaatctggaattctggaaggttccagtactccagggtttcagaggaagactagaggcctagggtccagatctgcttaggctctcagggcctccaaaggtgactggtgactcggcatccacgtggtagtatgactttcccactggtgaccattttccctattacagatggataataaatgtgtaggtcattggaacgattggtatggattaatatttaggggagaggaaaaagttggcacttgggttagtttcttggctgttttctatgttgctttgtccaagtagcctaaacctaacagctaggaatagaggaaaccggtgaggctgtgagtcttcccgtttgtccaaagagcttcccgcacactggatccttccttcccttgagtacttcaaatatcatcagtcccgtccaagctttctctctggatcccagcatagcaatgaartagcctttaatgtgccctactgaacaagctctttacaaaagagtagcacaaggtcacagaaaaattaaaaaagaccagtgcctgtctgcccctcttcaccagtatctgtgtggaacctgaatttagccatacctttccttgccctaacctctggccaccatggacctgttctgttactgcagtcttgcctttttttggggggtgggctggggagggtgagacagtctccctgtatcctccagaccggagtgcagtggtgtgacctctgcctcccgggttcaagcgattctcacacctcagcctcctgggtagctgggattacaggcgcgctccaccatgcccagctaatttttgtatttttagtagagacagggtttcgccatgttggccaggctggtcttgaactcctgaactcaggtgatccacctgccttggcctcccaaagtgatgggattacaggtgtgagccaccacacccagcccaagtcttgcctttttgagacaccaaaacagatggactcatgtagtaagtagccttcagagaccagcttccttccctcagtgaagcgcctcgagagtcacccacgttgctgcgcttgtcagttcctcctctttattgccgagtagtatcccattccacggacacaccagtttccctattcatcacagaaggacactggcgtgtttccagcaggtaggaataatgctgctgtcaacagttacacccaggttctgtgtgaacatagttttcatttctctagggcagataacccaggagtggactgccaggtcctccctaagtgtatgtgtgactgcgtcagaaaccagctgtctcctgagtcagtgcaccattccatgggacctgctttttaccttttatatttgtgctttcaggctttaaaacaaagtaacttaattagaactacatatctcaaacagttttattagccaatactgtatttaaattcattgttttacctattaacaagttttagctttctgccattctctgtatgaaagaagaacttggcctggacgttcataaatatgagccatgtgttgctcattgatgtcactgcgcactaactcctagccaaggagcctggctgaattaagctgctgggcttgtgagccatcctggaacctccattcctcccctcccccaagcctgtttgttttcattggctawagggatgactgtcttagctaagcagggcctttctagggaaagctgctgcacacacacctggtttacttctgtgtgatcctatttaccccgagaggaccgagcaagccaccgtacctggctgtcctgcatcagggtccacaggtcaagtacrtcagtcccacagtcttgggccacttgtaaacacgcattggcatattcaccaacaacagagttcaggcgatttagtttgcaacctattgamgagaagaaatagaggtggcagttggtaaacccaagtgctggcccttgtgtaagttctgctccactcatctagacagtttcaaaatgccattaaatattgaccccacttgggccagccccggggtttagggtatatgttgatgagccttgcaggttactggtgtgctgctctacccagcagaggacaaggtgcagtgggaagaaggagccttcagtggtaaccggaatcttctgaggcgccagggaggatgttctagaggacaccttgaacagaggcagagaggcaggaaaggcccaggagggctgggctgcttggagagtgccggctgcaggagctgggctgggggctggtaagggctgcactagtaggaaatgccaggccatggaagctgaacgctgcgctgacaccgctggcttcttacatgtaacagctggaccgcaacacagcaaaatcatttgtcggctttagacaaagagaccttcgttttgatgcctacaattttcactaaatagcggtgtgcctgaacagcttaaccgtcctgaagctttctgcattcttatgatgacagtgcctacctagttgcaggaatattggcaggattaagagactaaacaccagcaaagcagctagcacagaacgattgagtgtatctaacacaagtgcaggctgcctcatcctcccagggagctgcaccagggaaggctggagtgcagtatctggggattgtgctaggttggtttggaaggtggggctggggctaggggagaaggctcaggaggctgcaaacaggacagtgagggctggcgagaggcggactacagaatggtattaaagagaaagcatgaggatatgggcaactggatgcgggccacaggaggacctatgctggcccaggctctacatcacagcgaagaaactattcaccagctttgattcatacttgggatcaattgtttataawattcacctagattataactagctaccccatccctacaaaaaaatttaaaaaattagctgagcatggttgcacatgcctgtggttccagctacttgggaggctgaggcaagaagatcacctgagcccagaggtggaggctgcagtgagctatgagtaatccactgccctacacagcctgggtgacacagcaagaccatctcaaaaaataacctgctgaatttctaggggaccagttattgagatgtgacccctcctctacctgctttgcccatcactgaccttttaaaaagtctgcattgggctacattcaaggctagaaaggggaaatgaaattaaacattcagaatttcatatatattattttcctgggaaacagtagacaaaaagaagtctaaacagcttctgtggaccatgctatgtaacatttttccccttttgttaaagccaagatgacactgccccccaaagcagttagggctgcaggcccagaagcaagctggggctctgaagttgtctccaggggagctttgtgggccttaaacacctccccttccctgcagaacactctggtgtctcatgcacagcaatagggcccctctgccctgatgtgatgcccagaacctactgtcaccacgtcccgcaggctggggtttctccccgtttgtctgtgcctccggtgtgtggcaccccttggcatatgctgtttgtgacttgagaacgcattggatccttctctaaggatgacaggccctttkagagcaagggacatagctacaaccccactcaacagtaaactcatacaacagtaaggacttgagctgtgaagtcacacttgctggatttgattcctggttgtgttgctggctgtgtgatcttgggccggttacttagcctctctaagactccatttctccactggtaaagtagggacaataacagccttccatgaagttgtggtatgtgtgctgtggtgtgtgtaagaaacatctggagtgctgaaaatgggtccagaaatctacctaaaaatcccagttaactcagagtcagaccacactttgagaaatagctgttctgtgttgcaaagccagtcatttgtcctagaatgttgagttctgggcagcttagaaaacttccagtccaggaacggtggctcacgcctgtaatcccagcactttgggaggctgagtcgggcagattacctgaggtcaggagttcgagaccagcctggccaacatggtgaaacccgtctctactaaaaatgcaaaaattagccgggcgtggtggtgcacacccataatcccagctactcaggaggctgaggcagaattgcttgagcccaggaggcaaaggttgcagtgagccgagatcgtgccactgcactccagcctggctgacagagccagactctatctccaaaaaaaaaaaaaaaagagaacttccataatgcacattttcaacattaacatacagctgacccttgaacaacacaggtttgaaccgtgaaggtccacttatgtgcagaggtttttcagtcaaaggtggattgaaaacacagcacttgagggatgtgaaacccaagtatatggagtgctggcgactcctatctgatcattcctacccccagcttctgtggaccagtaaaaagccccaggtgtggacttccaagtcaaggcacatcagcatcagcccccgcaggccgagcaccacagctctacacagatctcagtggccttcatgtgcaccctggagtctggtaactgtaaaggtcagcagatgccaggcccgcggttccctcctgactatccaaagccagaatcccttttctaggtcaaaaaaggtctcaggtataacataatggaagctataatttaataattttggattgaaaacagactgaaatggacatacygagcccctaagaaacagaagccccaggcaggaaaccactgtcctatcagagttcctccctcagcattcctatccagatttgccgagattggctgtggtttgtttaccttgtatgatgcactgttcttcccaggctgtttcacaaagtggggtcggcgtgatgagaatgactcgattctcagggatgtccacggacttcaggtactgcaccatgctctttaggttcgcagcgtactcctccaggggaatgtgctgcttgggattctcatctgctcaagagaaacatgagtcctcaccagatgcatatttattataagtgacaattcaggtgaacacacttctgcaaatgcctgttattcatgatgtcactggggggattgtttaacaccaaggacacaaagagaaggttttctccttatgaattaaaatgtatagttcttcataaaacaagacttcaaaggctctaactaggggcaccgtaagtactcttgtcttttcgtcactagtatccagatggttattacatcaattaggttgaatttgtaaagaaattaaagagcccaccctgttgggtgagacggcctaggttcaaatcctggctttgtcactcctcgccacagaaccgcagataaatacttagactttctgtacctcattgggaaaatgaagataataaggtctccctcctaggactgaaaatcaaaacagctaagagtttacagcactgagagcagtgtgccttcacaaagcaagcactcagtctaaacaaatggcacccacgaatactactattattgcaaaggagtattttctagataggctctcactgaagtattacaagggtcattgtttaccatttgctaaccacatgtaagtacagtataaaggaaaaaagtcaccaatgttcctaccacccagaaaaccactgttggcatttggatgtrtatctttccggtcttttcatgaagatacatacacttttaaaaaaatgagtttgcactgaagattatattcacactgaagacttcatattttgcttttctctacaaattgttttagagacaggttctcgctccatcacctaggctggagtgtagtgtgatcacagctcactgtaaccttgaactcctggggccaagcgaccctcccacacctcagcttcctaagtactgggactacaggcacgcaacaccacactaggcaaactttgttgttattgagacagagtctcactctgttgcccaggctggtctcaaactcctggcctggcctccagtgttgggattacaggcatgagccaccacgcctggctcacataacatattatgagcttttctgtgtccataaatagtttgcaaaaaaatgaaatttagttgtagggtgaccacatgatgtttccgtactgtacagcttgtaatctactgttatatataaatagcaatacacggccaggtgcggttgctcatgcctgaaatcctagcactttgggaggccgaggcaggtggatcacctgaggtcaggagttcaagaccagcctgaccaacatggggaaaccctgtctctactaaaaatacaaaaattagccaggcgtggtggcgagcgcctataatcccagctactcgggaggctgaagcaggagaatcatttgaacctgggaggtggaggttacagtgagccgagaccgtatcacttcattccagcctaggcaagagtgtgaaactgtcaaaaaaaaaaaaaaaaaaaaagcaatacacagaaatctccgcacacacatctggctgcgtatctgaatatttccttaggttgaatttctacacgtgggccgtcccttggcgcatattgccacacagctttccagaggatcacaagctattctctcaccaggaatgtaasagttccaatcttatttcatgcgtgtcagctgtaagtattactgcttcatattgcttttctgagtcaaaaaatcaaaataccttgttttaattggcattttttgataagttttcacacattttcaaatatgtatttgctgttaaatttcgccttttatctattcctgtcctttgcctacatyttctattggagttggtatttttcttattgatttctacactaaagacattactctcttgtctgccacattttgcagatattttccttaacacatcattttcttcttcagttttttcgcagcctattttatttcataaacctgtttttcctctgtggcttcctccactgctcttatacttaggaagtgttttttccttatgctaaatttgataaaaatttatctttttaaaaaattctgttttgagttttcttatggtttttggtacaagatagaaagtgaagattaatttcttcccaaatataatggttagtgtgcagtctccaccgatacctgtcatctacgtaatctttctcctagagagcaagaattcctcttactgcagttggtgttcyttcatgtccagcctcaactcagaggtctcctacggtgtgcccgtgaatagcagaccacagcacttctgtgacacaagtagggtaacaaaagaaatctctggaaggtgactacctaacttcccaaaacaaaggctgatttttctcgtcgatagcacgcagaaggcttttttcaagagtagaaggggaagaaaggcctcttacatggctagctttcctctagtcacagcagcaattcttcagcagtcarggagagaccatctccttttccaaacccacgttcaccattgcccaggattcaagcctaactgaggtcagggtggctgctgccctgacatatccctccctaagacacgccaccagctgccatcagtgtgatgcaagccacaaggtatccttaagctttctgctgccaaatgcatcaactaaagagaacacattacaaacttagcatagcactaacagactctagaaaatatttaactgtttgcaagattaggactgccagcaaccaaggtatgtagaaactgagtcaagaataaaatccaccagtgttaaagccaggaatacatataaacaacataagtttggcaaaactgtatctattgggagaaagtaaacagttgaaaaaagtatattaaatgcaagtttgctgtaacataaaaatgattaaaagtgagctagaagaacatcaaaaatgcttttaccttttagtgcactgtcattggccccaaagaaaattgtaactgctactgggatgtccaaactgtttcctttcctgattaatcttggaaggataattttggcccacctggtattgtaacctgaaaatccacgattcagaacatcacattttctgaaacgaaaaattttaaaaagatgaattgtgggcaagaagtgtttatggtcgcagtaaccggcctttagtgagggtgtgctctctgggattctaaacccgtcacgtgtctctgagccacccccaggtttcactttgataggagcaagaacatagctgaagcatgctaatcttaagccattcaaagatacaggtaaatacaccatactcctccgtgagagaagtaattatatataaaggggctgtgatgaagtctacagactacctgacttcaagcatggtatagtgaggtgcttttaaaatggagttcacaacagatagataatctgagcaagtatctcaggtaaaaagtcactaatatcctggaacttaaatagtttagtttggtttatatttaaayagtctatagaatatttgagatttctggttttgattaaatagttttagtaaatacattcgttgtgtttcaacttaaaccggttaatactttttgtttccttcttaaaaacagttggattcacagtactgtaggtgtaatgggggaaaaaaaaaaaaaagccgggttgcctggatttgtttctcggctccctgtgtgactaggcgtgaccctgggcacgctgtgctccttcctcacatgtaaagtgaggagaatcccagttaaggattcgcatcaggcagtaggtttgaaacccctcagagaataycagtcacataagagggactctttttttcttagtcttggtaaaatgatatgatttgggatttgcttcagaataatccataggagggatggatgggctcatttcactctttgcttctgtagatatttaaagttgtccataaagttttcttaaaatgacgcctggggttcaacttatgattagtaaatcaatatggttcattttgctgtattcacattcccatacatgcataaccaagcagagaagctggggcacccgcggagaactgcaggccacagcgtcaggcagcggctccaaagcagcacaaggggacactttctgacactgctcaaagttctcaggtggcatttataaactgcagaaccaccaccgaaactcagccttatttctaagagattgtttgtgtgtgtaatgattataaaatgcgactagccattttacagagtgaaatcacaatactttaatgaagtgctgggctgggtgtggtagcgagtgcctgttggtcccagctactcaggaggctgaggtgatgatgccttcagccccagaggtggaggctgcagtgagccctgatcacactgctgcactcaagcctgtgtgacagagttgtcaggcctctgagcccaagctaagccgtcataacctgttacctgcacgtatacatccaggtggcctggagcaactgaagaaccacaaaaggagtgaaacagccagttcctgccttaactgatgacattccaccattgtgatttgttcctgccccaccctaactaatcaatcgaccttgtggcattcctcccctggacaatgagtctcaggagctccccacagagcaccttgtgacccccttcccctgctaacaatagataaccacctttaactgtaattttccactacctacccaaatcctatagtactgccmtacccatctccctttgctcttttcagactcagcccacttgcacccaagtgaataaacagccttgttgctcacacaaagcctgtttggtggtctcttcacgtggacgcgcctaacaagagaccctgtcgcaaaacaaaaaccaccaaaaaccaaaacaaagtgcggtagaattgtgacaaggtgagtcttaagtcatggcagcacttcaaaaaaaggcaaagtagcttcctaccagtgtggtgtagcagtgaaactgcaagttctgcagtcatagcagctggacttggatctgtctgcccctgactagggaagaggccttggccatttccttgatttgtctgagtctacccagccatcagtgctcaaccctaaaatatctaattggtcagactgagtgaagagtaaatgttttctgttccttctcctatatactgattaggggaggcaagcaaaattaataaaggaggaatgttctgttcagaactatccttcatccataagacggatccctaagacattttccatccataagaactcaagtatcggaaaccattctcacctgaccascctgtcrgccagcgatgctccccatccaccctgctggaaggaaaactggaggaagaaaagcccattattactactaatgactgtaaccgggcatctcagygagggcagttctgattggcaacttcygttttctcggcgctcccttcttggctttgattgcttcactccaggaggtcattttggggattacaggtaagtacacctggcagcactttagcagagggggatttttctctatcaaaagctaaacagcctgtattcccagcactttgggaggccraggcgggcggatcacatgaggtctcgagttcgagaccagcctggtcaacatggcgaaaccccgtctctactaaaattacaaaaattagcccggtgtggtggcgcacgtctataatcccagctactcgggaggctgaggcaggagaaacgcttgaatccgggagrcggagcttgcagtgagccgagatcrcgctactgcactccagyctgggcgacagagcgagactccgtctcaaaaaaagaaaaaaagaaaaaaaaaaaaaagctaaacagaaatctaagttcaggaaataaagtcaaaggtcagtgaggaaatgaaggccacrccgcctcactgctttgctggttaccgagctgagggtgaacactttttcatacacattcccatggaattcggcagctctgactgccccatatgcctaaacataatgttaccagttactggcgtatacacaaaagcctggtgaagcaagtcctgtctgagaagaggacacacacaggaatggaatttctactccctccccgaagtaagaacctgcatttagaagaccgttcccttcatgggaggtgagatgatcttggatgaacggatggtccttttctacctaattcctgaaggcgttttacttccaaggtcaacccctaacggccccacctgtgcccgcagggaatggggcgagagagctcctggcgcctctgcccggagctgrccgcggggcctcctrggacacagcgcgcggtcgcccgcggccgctaacccggacccggaggggaaaggccgctgcccaggagggcgctgaggggaagaccgcgcatctcgacccgggtgggaggcggcgcggggcgggcagcgcggccgggtcccctcgcgtctgtgcctggagcccgggctctcgcggacgccgtcgtgacctccgggacgccgcgggcccggaaggcgcagccactgggggacccgccactcctccggtgtctccacgggcgtggccaggcctccggcccagccgtctcgggcgccgaagaggacggcgaggagcctcggcctgctcggcagcgaccccgcagggaggccggggcgggaggccgagcgtcggggcggccgtacctgggtgatggagtccccgaagagcaacaagcgaggccagagcagggcactcccgcagcccgcggcctcgcacagcgccatggagcagccgggcggggcggggcggggccgccagccacgagaggcgcctgcgcagtggccgcccgtgggttgcgggagccgggctcgtgggcacccacgcagtcactttggtgacgcgcgaaggtcgttgccccttggagtccgtttgcaagaagctcggcctccgcgcttgytcacccacagcaaggctgcccccagggagtccggagcccgcgtcccgctgcgtggttcccggaagaaaagcggttgggggcccttctaagcccaccccgcgctccgcgggcgcaggtgcgttcggcaaagggcaggagtgtgacctcaggacgcgcggcgggaagcacagctggctctcggtggggcggagggctgctccaggcccccctggaagaggtcgtgggatgcgcgcgcggcctcctgcgcccagcgtcactctggagggcctgtaacacccacgaggacgcaggcactgcggaaaccctggcagtacctcgtggttctgcgaatgacaagggaaagcagctgcaccttcagtgcgcgcgcagccggccgcttttctttttcccgccgtggggtggatgcgcagatgcagaaccccgcggacacggagcactgactaacttccaagggattcacctgttaaaacgtggttgtaatgcaacgttcttacctcaactgtgcaatgaagttcggcagccgagctaaaaacgaacgggtgggaaggatgccttgaaatcacggagctgtagatgagtaacagaagggccaggggcgccggcgcagaggccgaccccgctccctggggcggggcgatgggcgtagagcatgactttctttaggttgctcgtcccaagctcgcttggatcacctgggggagctttacaactaagatccaacctagggccctcattccagccggactaactcacctcctggtggcaggacttgggcacaggtgcacttgtgatgcaccccacgtgattcccacgggtagcccagattgagagcccctgctagagcaagcaaaggtgcctggacttcatctttatcacaaggacttcattaaggccttcaagcagcagaggcttgaggccaggtctgttccaggaatcagctataggggaggagatggaggtggttgcaggaattcagaggggagagtagacttggactcgaacagcagcagtggagatgaagacagaaaagattcaagtgcaacttagaatccttattattaactcaaattggttaccccagrggagagggtaaccagcagcggttgctatcggcagatcttgatggtttcaatgggagctgcacatacatgcctggaagaagaatccaaaattctaaaataatgggcagttgatytagtagttagttctagaataatggacaaattaattagcratttagcagtattcaggctgttgaaataaaggccatttgacattaaaagtaaacaggctcccccagagaaacgaatgcattttattttaggtaacaaaagtagagtcaagtattttttcaaagttcatatacaggcacagtctcagtgaactggcgtcagggcctcgtacagtctctgtgcagccagctccaccatttctcggagggattcatcgtcttcacttccctcttcacattctacagtctgaaagtgaggcacaaacaagactgttagaattaagtctataatgattatatagaagataaatgaatactctttaaaaaaaccatcatctcataaaaaattagccagctgtggtggcgtgtgcctgtggtcccagataagagkctgaggtgggaggatcactgagccgggaaggttgaggctgcagtgagctgtgactgcaccactgcactccagcctgggcggcactgcgagaccgggtctcaaactaaaaaaaagaacaatcatctgtgtgtgcagaggtcatggtgggactgattaccatgaaacagaacggccgccctacacacttgtgggcgtgcagtgcttyctgacagcagcacggtcctaattagtgatgacttgaggctggggtgaaagactggggaaagtctagtaaactacatttacatcaaagcccacagtttgatctagtaaatgatactccagggaagttcatctatgccacacaaattacttggcaaggaatggatgtggctatctactcaacatttggtactgaatttgactgaaactcactaataatcttctagttgcttctttttttttttttttttgagacagaatctcgctctgtcgcccaggctggagtgcagtgatgtgatctcagctcactgcaacctctgtctcttgggttaaggtgattcctgggttctcctgccttagcctcccaagtagctgggattacaggcacaccaccacgcctgggtaatttttgtatttttagtagagatggggtttcatcatgttggccaggctggtctcaaactcttgacctcagatgatccacccaccttgacctcccaaagtgttgggattacaggcgtgaaccaccacgcctggcctctagttctttttttttttttttttggagacagagtctcgctctatcatccaggctggagtgcagtaatgtgatcttggctcactgcaacctctgcctccctgtttcaagcaattctcctgcctcagcctcctgagtagctgggactacaggcagctgccgccattcccggctaattttttttgtattttttagtagagatggggtttaactgtgttgcccgggctggttttgaactgtttggaaaatccacttggatcttgctggtgcaaacagaagagcggcttctttaaaaaatggagagtcaactagatgccaaactagagaagggatgaggtgaactaagctgtattatggaagaggacagcaatggagtggcatacacgcgaaccttgtactatgcagtaacccggaaaaacacrgaaaacttcaaccataataatataaaaagaacaatgtgaaaaaaatgttggaaacactggaagcaaatgccaatatgcaacagtagactgttgagtgtgagagcacagattatttatgccttcactttatttcccaaatgtcttgaaacgtaggaaagagcagctacatacccgtgtctccaagttaaggttggcagttttcccgtccactgtgacgctaagaatagagtcatcctttacacttacacagtcttctccaaatatgtccctgaaaataagcagaaatgcaggattagtgaaaatgcccggctttatatatttgaggaaaaaataaaactgaagataggtcctagttctaaagcagaatactgkatttactttttttctttttttttttgagatggagtcttgctctgtkgcccaggctggagygcagtggcacaatcttggctcactacaacctccgcctcccggattcaagtgattctcctgcctcagcctccctagtagctgggattacargtgtgcaccaccacagccagctaatttttgtatttttagtagagtcagggtttcaccatgttggccargctggtcttgaactcctagcctcaagtgatccacctgccttggcctcccaaagtgttgggattacaggcaggagtcaccatgcccagcctgtatttacttttgagacaagcttcttatttgccttgatacagcttattaagtttataaaacagggaaaatacacagctttattcaagaatgatctattcagcaggcatcatgctaggtggtttatatacattatcttaacctataattttagtaaggatccccttttacatgtgaagaaaacaagacacagaagttaagtgatttgcttaaagcctcacagctagtaaacagctgagccggcattcaaatccaggtatctaggtttaaatggctcccaagcccactagctgtgcactcctactttaattaaacttggtatttattgagcatcttctgtgtggcagattccttctgtgctagtagctggggataaagaaggcactaagacattgcctctgtcatcgagagaaacagttttgatggttaatttcaacatcgtccccattggtacagaggtgttaggaaacagcagtccaccagcaggctgaatgcaggtaagaaaggcaggcagtgactctaaacaacccatggaccatggtcagcctaggacagttaagcactgacaacactgtattaagcgggggaagtggggagtgggaatcaactccttgcatcttcaggcagttactgctcatcatatgtgtgaataaacttaggtgggaccctagcacaaaggaaaagattatattttattttatttatttattttgagacggagtcttgcttgttgcccaggctggagtgcagtgtcccgatctcggcccactgcaacctctgcctcctggtttaagcaattctcctccctcagcctcctgagtagttgggattacaagcacccaccaccacacctggctcatttttgtatttttagtaggggtattttggatggggttttgccatgttggccaggctggtctcgaacccctaacctcaagtgatccacctgccttggcttcccaaagtgctgggattacaggtgtgggtcaccacacccagccaaaaaaattayattttaaacacagaaatgtattcaaaaggataggaaaaaaggttccattttcatgtgatccactgttggcttctctgaagaaaccaatacatctactcctatctaatcctaagtgtttaaacaactggggaaatagctgcatttttaagggtacgattggctttgaagtttaaggacatgggaacctcccattcctggccgaatggaagctgtctcatactcctgttcctcagagttgaatagttctggtgtgtttgtgggaggtgagggagagggaggggaggcgggaggagtggtgtcaggaggacagggaagaaggccagagtgaaagtccagtggaagggccgcagcctcccgcagactgccctccccacggctcctgaggaccagccacagcaatgtgaacttccattctgcaccccgactgcagcacgtgggagagcggggccagtccagggccacacgggttttctattcttgtagagccccagggaacagggccgccaacagaactattgtagtcaagtccctggtcagcaacacccaccttctacaatagggctgtttaaccgggggtcccaggatagcctgtggggagggggttgtctaacctccttgaaatcaaaggtaaaactgcatatatgtgtgtcccctgcccccgccccacagccttacctgactgccaaaggggtgaaggatctaaaaatgattaagatactcagacttcaacgctggcagacttgagccctctgcaaaatgagttaagagaaccagaggctccaggggtgggaaccagtaaaatctctggccttttcaacggccatggtaatcactgtgcctgcactgttggctggttttgtatgaggaatgctctttaaaatcaaaatgacaacacagagaatactgttttgaagatgtatgacaacttctataaacaaagtcatcatttaaagtctatcatttttttttaaagccactaaactgctgctttagtgggccgggcacgggggttcacacctctaatcccagcactttgggagaccaaggcaggtggctcatgaggtcaggagttcgtgaccagcctggccaatatggtgaaaccctgtccctactaaaaatacaaaaattagctgggtgtggtgggcatgcgcctatagtcccacttgctcgggaggttgaggcaggagaatcgcttgaacccgagaggtggaggttgcagtgagctgagattgtgccactgcactccagcctgggcgacagagtgagactccgtctcaaaaaaaaaaaaaaaaaaaaaaaaaggtcagtgtagaattttggggaaagaaaggaaggaacagaaatgttagcataaaagccttctaaactagcaggccaccttactttgttaaaccgtttcatggggcaagggctcacatctgtaattccagcattttgggaagccaaggcaggaggatcccttgagcccaggaatttgagaccagcctgggcaacataggaagtccctgtctctccagaaaaataaaattagctgggcatggtgttgcgagcctgtgatcccagctacttgggaggctgaggcggattgctcgagcctgggagtcaaggctgcaatgagccaagatcatgccactgtattccagtctgggcaatggagcaagactctatctcccaaaaatagaaataaaataaaataaaataaaaagaaatacttagtttaaagttaattcatcgcttacagactaagaagagtctagaagaacaccattttacaaagaattcacatttaacaagtaaatatataaaataattcttgaagatacagtaacattcagctaagatttttgaacttgtccttgatgagaatgttttaacgcttgctaactgtgccagccctgtgccagcatcctgaagcactgtattaaatgaaacacaaacggctgacctagcaggtcacaggtgagtgcagagctggcagggaacggttccagcccctctctttcctaacagagaagcaggcctccgagcatggcagtggcctggccagagccacgccccagtccttgaaggagtcagagccgaatccagggctccttccggccgctgtcactgtcttgttgagaaataatgggtgaaaaacttactggagcatgatctccaacctcttgctgtaaacgtgcatttctaattttttagaaaccttctgtactgcacctgggaaaaaaaaaagcgacagagagttcagtttctaaattcctattcagaataatttccaaatcaataatcagaatctggttactgataagttaaagtgaataactatggaatccttaaagtgacaagcagggatttgtattatttgcctgctaaaggaaatggatattttcatcatttaatttcatgttctttttatgtgtatttaaaaaaaattttctattacatcttttcaccctttctccaatatttcatgttcttattaaagaaccacaaaatgacacttaatattatttttagttttatttcccacatttcttaaactttacatttatgaccacgggcaattaactccaggaattctagggacatattcaagctcaaagatctgtgaagtcttttatctaaaatgtgatataaatttagctttctattagatataattattttaataaaaattaatatttaaaatgacttgcccattaaattactcagctttccttccaaaacaaatctgacagcttgggaaaatgggccccccttaatctggagtttcaggcatgctctgacccctcattcaacaactcagtgcatcaacagtagcaaaagagtgcagagctcacagtctggcacttcctcagaaagttaaacagtgagcatttgacctagtaattctactcctaggtacagatccaagagaaatgaaaacatatgtctgcagaaaaacttacatccaaatctccacggtagcactattcataaaacccataaaatagaaacaaccgaagtatccattaacagatgaatggataaacaaaatgtgttgtgtccatacaatgggaaattatttggccataaaaaggaaggaagtaccaatttatgtgacaacacggatgaaacttgaacacagcatagtgaaggaaaccagtcatcaaaggctatatattgtatgattccatttatctgaaacgctgagaacaggcaaatccagggaggcaggaagtagattagtggttgctttgagttggtgagaatatagagattggggcatcatacgtaagggatatggggttccttttcggaggtgtgcatttatttatttatttatttagagacagggtcttgcactgttgcccaggatggactgtagtggtatgatcacggctcactgtagccttcacctctgtgctctggtgatcctctcacctcagcctcccaggtagctgggactacatgcatgcatcaccatgcccagctaattttgtgtgtgtgcgcgtgtgtgcgcgtgtgcgtgtgtgcgcgtgcgtgtgtgtgcgagtgcgtgggtgtgtgcgtgtgtgtgtgcgcgcgcgcgcgtgtgtgcgtgcgtctgtgtgcgtgcgtcagtgtgcgtgtgcatgcgtctgtgtgcgcacgtgtgtgtgcgtctttgtgtgcgtgtgtgcgcgtgcgtgcgcgcacgtgtgtgtgtgcgtgcgtgtgtgcgcgtgtgtgtgtgagcgcgtgtgtgtgtgcgtgtagagacagggttttagcatgttgcccaagttggtctcaaactcctgggttcaagcaatctgctcccctgtgcctcccaaagtgctgggattacaggtgtgagccaccatgtctggcctggtgtgatgtaaatgttttaaagttgattgtggtgatggttgtacaactctgaatatgctaaaaaatcattgaattctacactttatatggatgaattgtatggtatgtgaattatgtatcaataatgctgttacaaagagtagtgcagaattttaaaatccttcagacaacacacacacacacaccccatatatatggatattgtcatcatttcatttcatgttcataacagacttcactttacaaaagggctatcagaatataatgaagagaaggcaaccttggtggcatttgattgggattgaacagactaagataggaagtgaaggccagctgagctcttagaaggatggggggccttaagagttgaaagctgggctggcccaaatgtgaaaatctcaagtttggatgggaagaagtcagtttgataaataataaatatacataaccaatttcctcttttatatattttttatatataaacgcgcgcgtgtgtgtgtgtgtgtgtgtgtgtatgatatgggggaaaataccagaaataatcttatggcctcacctataaacaggaaaatataatataagactgtaatttctttcttctttttttcccttagaaacaatgtctcgctctgttgcccaggctggagtgcggtggtgcaatcatagctcactgtaaccttgaactcctgggctcaagtgatcctctcatctcagcctctcaagtagctaggcctgtacgtgtgtgctaccgtgcctggctaagactctgtcatttcaaagagacttcaaaaattatgatttcttcaatgcactttcaatttcccagcccaagtaattactttctcatgtaacactatgactttttaaaatattgtatcatgtaagtgtagctttattaactcacttctgcactcccacatacctatttcaatctactctacggaaaagactcaacttgtcatttctcctaaactattctagaattcaaaccatacttcatctaattctttttaattcgtgaatttcaattgtatatacaactaactactcgcctgtaatcccagcactttgggaggctgagaagggaagactgcttgagcccaggagttggagaccagccttggcaacatagcaagaccccatctccattaaaaaaaaatagtaagcccaggtgcagtggctcacacctggaatcctagcactctgggaggccaaggtgggcagatctcttgagctcaggcatttgagactagcctaggccacatggtgaaaccctgtctctataaaaatagaaaaattagccaggcgtggtgatgtgcgtctatagtcccagctacttgtgggggctgaggtgggaggaccacttgagcccaggaggtcgaggctgcagtgagctgagattgcaccactgtactcaagtctgcgacacagtgagaccctgtctcaaaaaataaaataaagtaaaataaaaataaaaatattaaaaaaacacaaaaacaaaaaactaaccaggtgctagccaagaaaactatataacagaattttatactttaattataatcattagtttcattaattactaaaataagcacttaattgacatgtaaaaacaatctcacaaaatatattacaaaataaatatctaggctatgaaactatcaaaagaaactttccaaagtttacgtgtgtatatatatgtatatatatatttgcaaattcctgcattaatatttagacaaactcatcagacacgagatcatattaaacacagaactatacaatcagacaggtatacctgtccttagtaggtctgtgtgtcaaaacaggacacacacatgctgaaaacaggtgccatgtaaaatagaagaatgttatggaatataaaaacaaaataatgtattttgaaaatatataagatttcccctttggttaagaatggggacacataaattgtggttggttagacacacacacacacacacacacatacaccacagatacaaatacaagttgtgtttccagaatctggactgaagtgtcaggaggctaagaaatgaaaagggagaaaaatgccatcaaggaagaatcggattgtttcacagaggtgccttgagaagagggcaactttttctgtaaatggccagatggcattctaggctttgtaaaccacagggtcgctgttgcaatgactcagttctgctgctgtagcaggaaagaggcatcagagatgatgaaccagtgcgcacggctgtgtttcggtaacactatacttaccaaagcaggcgggctaggtgtggcttgtgggccacagtcgctgactctgctctaaatgtgaaaatcccaagtttggataggaagaagtcagttcgataaataataaatatacagaatcaacttcctcatgagcagcataagtgtcacatgtaccagttcttgcaatacttgtcacctttgaaaggagcaagtgctacttattaaaacctgtcacttagccccacgagtgacaactgtccatgctgacatatcacatacataccctggatcattatcttaaagttcatcctgtctgttctctttctgtcaccacttacagctaatccaacaggaaatactgctggctttattagaacacctccagaatccagcactttgcgatatccccatgacttccaccctaatctgagccactgtctgccacctggatgactgaagaagctcccagctggagcctctgctttcttgcttgccctcctaacagtactttcagcaagcaccacggcagtcctttaaaaactccgtcagatcctgtctcagccccgctcaaagctctgcagcatagcctcattttactcacactgaaagtctgaggtccttacaatagccaacaagaccctatgggatctgcccaactccaaaccctatcaggaagccctgggacatgccagaatgtcagatccttggagggggcagatctgtttgctttgttcactgatgtttcctaagcactttgaggcatgcctgctggggagcaggtgctcagtaaacatctgtcaaatgaatgttaatgaaaatatgcaaacacttcatcatcccagaggaatataaaacctcattctccataaactacaaaatggggaagaactaagaaacacaaggcacccagccagctgaacaaatgctaaatacacggaacacacggaaacagcccagttctaacctgtctgcaatgaacctctgctgaaatggccacaggctaaccaaaggaaggaatgtttttattattagcataagagggattactaataatatagtgataattaatttaaattcaattactgcagatcagagtaaaggtacatttcattttggaccggagcattaagagaaataatcaagataaaggcaaaccaacctatgacaggtca

SEQ ID NO: 97744 - DNA, 70214 bp, Homo sapiens
tttccccaaagtgttgaaagacatcaacgtacagatctaagaagttcactgaatccccaagcagaataaatacaacaaagactacatctgggtacatcacattgccaaaaaaaaaaaaaaaaaaaatcttaaaagcaatcaaggtggggagtgggaaggagtagcattacattcagataaacaagagtgatggctaacctcatcagaaatgatggaattaagaaaatgatggaatgacatctttaaggtgcaaagatgaaacaaaggttaacttaaaactctgtatccagttaaaatatccttcaagatgttaaggcaatggccaggctcagtggcttatgcctgtaatcccaacactttggggggctgagacaggagaatcccttgaggccatgagtgaccagcctgggcaacctagtgagaaccccatcaaaaaataaaattagctgggcatgggctgtggtcgtgctactgcactccagcctgggggacagagtccctatctcttgaaaaacttaagacaaaatcttttccagatgaaaacagaatttgttgctggcagactgactttatacggaatgctttaagaaattcttcaggctgaaggaaaatataaatctggagtgaaaaacgtagtatctgaaattaaaattttccttggatggacttatcagtaaatggatttcccaatgggaacctgtatctccaggatggaattaagaattttgaaatgataaacatgttggtaaataagaaagacatttttcttttttatttttctaaatatcattgctgtttaaagcaaacaaaaatagtattgcagtgtttataatatatgtataagtaaaatataggacagaaatagcatgaagggtcagagagggcaataaatgtaattatattgagataatattactatattgtacacaaagtgagatagcattagtgtaaggtagattgtgataagaatgcattttgtaatctctcaccccatcactggggtgcagtagatctaaaaagccattagagaagataaaatgggtcactaagaattatgtgattagtcaaatgaaatcaaggaaagaaaaacagagcaaagaagtgtaagataaaacagtgggatggaagagctgaaattaataatgtcactaaattgcttaccttcctccttcctgaactgttgtggattttttttttttcagggggttgaggtttttttttagagacagagtctctattgccccaggctggacagcagtggcgtaatcagtctcaaaatccctgcagtctcaaactcctgggctcaagtgatcctcctgcctcggcctcccaaaatgctgggattacaggcaggcagagccaccacaccctgccagaactattgttttaaagtcattaggtggttaagccctcgagactatgtgcaagtttgatgattcgttaggagcactcacaggactcagcatatagtcttattcccaacaatgatttattagagcaaaaggatatgaagcaaattcagcaaagggaaaaaaggaattaagtgaagtccagaggaaaccaagcaccagcttctaagggttctctcctaatgaagtcacacaggatgtcactccagcaacaagtgacagcatgtgaaagtgttaagcctcactgttagacatagtaagcttgttagggaatagagggaatctcccctcaaattcaagttcccagatgcctggcaagggccaaccttgccagcaggactttctggggatagcagtcccaggcacgtgtttgcacagtggttcagatcaatgtgcttacattgggtagaggggacctatggaagtccaaatttgggtgtcagagacctaatagggtgaagacagtgtctacaatgatggacagctaggtatgaggtgtcagggacagattgaggcagttattcacatggtggataggggcaacctggaatgaggaataagctcaagcacagaaaggggtgtccatatggggtaagggtgtcagcagagatggtagattggttgcacaccaaagacttgatggaataaagtgaatatactaaccacagagaaggtaattataaatacagaaaggggggaaactagaatgaaacctggagttcagcttgaattgggtttaagaaagtgaattcatggtttaaaatctataaaaatagatgaaatatcggctgggcacagtggctcacgcatataatcccagcactttgggaggccgaggcgggcagatcgcttgagatcaggagtttgagaccagcctggccaacactgcgaaaccccatctctagtaaaaatacaaaaattagccaggtgtggtggtacacacctgtagtcccagctacttgggaggctgaggcacgagaatcacttgaacctgggaggcagaggttgcagtgggctgagatcgcaccactgcactccagcctgggcaacagagcgagatcctgcctcaaataaaaatagaggacatataagcatataaatatacacgtgtgtatgtgtccaaatatgtatattccctagtctgtccaccaaggtggccttggagcagttatgctccaataataatgagcacataaagtacccatatcttgccttccaaattcttcactgtcttagtctgcttgggctgcattacaaaataccatagactgggcagcttaaataacagaaatttatcctcacagttctagaagcttggaagtccaagattaaagtaccagccagtttggtttctagtgagggctttcttcctggcttgcagatggccaccttctcaccgtgtccttgtatggcagacagcacaagctctctggtgtccctttttaaaagggcattaatcccatcatgacagtcccatcctcattatctcatctaaccctaggtacttcccaaaggctgaatcaccaaagaccatcacattgctggtgaaggcttcaacatatgaatttgagggacacgaatattcagtccataacatcaactaaaggaaccaagactctttgataaaatggctaaattcagggctggggcagagaaaatacatgagtgtggaacttcttgtgccagagagaaaaagtgcccaaagattgatgaggatgaatcattgaaatgacacacagattaaaagggttcccactggacaaatttgagcatcaaaataagtaatagtagtaattaattataacccatcagaagaaataaaccatgagctcatgtgaatatatgaatacaaacataaacaaattacaagcataatgaggaatgtgatatttatatggtttaaaggtacctctccaggccgggtgcagtggctcatgcctgtaatcccagcactttgggaggccaaggcaggtagatcacctgaggtcaggcatttgagaccagcctgcacaacatggtgaaaccctgactctactaaaaatacaaaaattagccgggcgtggtggcacgtgtctataatctgccactgattaggtgtgtgattttcccaagcaggggataatagtagtacctatgtcaaaggctgttatgaggattaaatgagctaacacataatcgtgctttttttttttttttttttttttgagacagagtcttgcactgtcgcctgggctggagtgcaatggcacgatctcggcccactgcaacctctgcctcccaggttcaagtgattctcctgcctcagcctcctgagtagctgggattacaggctcctgccaccacacctggctattttcaatagagacggggtttcactatgttggccaggctagtctcaaaaacctgacctcgtgatccacccgctttggcctcccaaagtgctgggattacaggcatgagccactgcacccggctttttttttttttttttgagatggaatctctctcacccaggcttcatctcagctcagtgcaacctccgcctcctgggttcaagcaattctcctgcctcagcctcccgagtagctgagattacaggtgcctgccaccacacccgactaagttttatatttttagtagagacggggttttgccatgttggccaggctgatctcaaactcttgacctcaagtgatctgcctgcctcagcctcccaaagtgctgggattacaggcatgaggcactgtgcctggcctcaaattcttagaatactgcctaccacatattgaatgttcattaaatcctaggtataggacaggggtgttggctcatgcctgtaatgctagcattttgggaggctgaggcaggaggatcacttgagcccaggagttccagaccagcctgcgcaacatagcaagacctctcctctactaaaaaagattactgtggctgcagtgtggagaacagattgtcgatagatgataatacctacgattttatttattttttacttcttatttatttttttgagatgaagtgttgcactgttgcccaggctggagagcaggggcacgatctcgcctcactgcaacctctgcctcccgggttcaagcaattctcctgcctcagccttcttagcagctgggattacaggcacccgccactacgcccagctaattttttttatctttagtacagacagggtttcaccatgttggccaggctggtctcaaactcctgacctcgtgattcgcccgcctaggcctcccaaagtgctgggattacagacgtgagcaccacacctactcagttgttctgtataccattacatgttcagcaaccctaatccaaccatctgaaattaaaatgctccaaaatcaaaactttttgatcatcaacacgatgccacagtggaaaattccacacctgaccgcatgtaaaaagctgtagtcaaaattttgtttgatacacacacaatttttaaaattgcataaaattaccctgaggctatgtgcataaggtgtatacgaaacataaatgaatttcaagtttagcctctggccccatccccaagataaagagccacaatctgaaacagttctggtcttaagcatttgggatgaaggatactcaacctatacccagttttctacacgacactacttatgaatatcttttaaaaatttctttatccctacttgttttctgtcttccctaccagaatataattttcacgagaccagtatctgacaaacacacgtgctacatattcaatctttatcgaatgaatttaatattttccaagttttctataattaacattacttctatattattaattttatagagaatccaaatagcattttattaagtagaccattagtcggtccgagttcaaattctgctactacagcaaactatatgtaggactcaaggcaagtttcttttttttgagacggagtctcgcgctgtcgcccaggctggagtgtagtggcgcgatctcggctcactgcaacctccgcctcctgggttcaagcgattctcctgcctcagcctccagagtagctgggattacaggcgcgtgccactacgcccggctaatttttgcatttttagtagagccggggtttcaccatgttggccaggctggtctcgaactcctgacctcaagtgatccgcctgcctcgccgccgaaagtgctgggattacaggagtgaaccaccacgcctggcggaggcaagtttcttaatcttctttcctcacttgtaaaactggaatactgtccattttcataaggttaaatcatacaacacaggtaaaagcgcttcagcacgcaacgaaatttttctaacgtaacgaaaaactcctcgttgctccttgccttgcccttaacctcaacgcttcaggtcccgaccaatctctcggagagctcagagggagccgctctagccgccttccgccacggagtgcagggacagccgggaaggggacggaagccggaggccagagcacgcacttcctcccacgctttcctcacagccaatcgcccactggtgccccaccccttccgttctgggaaaactcgagcacccagaacggcttccggcgggagctgtgcagctccttatcatggtgagttggctgttggggtgagggtttcggctgtagctgattcggtttatcttatttggtcccgaagcgaccttgaaatccctcagccacccagaggaggggtcattggagttgaagtcgggccccttggcaggagcggctgtctcccaaaatgttccccttcagagttctggtccctttcggtccctcacctgttccgcaggcgctcacgatctaggccccgctgcaggcagagctttcagctcctggcgagtttctracttccctctgccgagatttctttaaggtaataaaagtttttgccagcgtcaacaactaggccaccaacaaaagatctgaaaacaagtccacagcaacaactgtaatagtgattcttagagcagtggcgataacgccagcggaaaaaaaaaaaaaaggttagtaatagggttttagggcagacgtctcactctgcaacttggctttactaaatattaagtagcctgattacggcagcaaatttcataagcgcagtaactacagaaagtcaaggtgttggtaggacattttattgctgctttatttctgggtttgtagaaactaatggaagacccagtagacgttatggttgttgggatatggtgttttctctcaaatttgttagaattagtcattctttgcctttagagctcaaatatatagctctgaactttaaagataagcagttggttgggatttgaagtgtccaagtggcgtgtgccttttgaaaatgcatttattagaaaaatttatggagtacttattgatagcctacgtatgagaaagagaccacatttctgtgcctaagcttttgtcactgtactaagttttttacttaagtggatatggtcgggaaaatgcctcattcacacactttatgttttgtaaattttctgtaatccttttgcacacagaaaatgggtaaaagtttacactttttggctaatgatcaaatagccttcagttacgctcttcttcaaaacattcaccattgtgaagcctgtagccagagttatatttctaaaatttgaccacatcactcccttactcaaattttctccttttttttttttctgtagcactcaagataaagtcctgtttagcatggcatacaaagccactcattatcaagcttcttacttttacagcctctttttttgttgttgttttcgagacggagttccactcttgttgcccaggctggagtgcaatggcgcgatcgcggctcaccacaacttccgcctcccgggttcaagcgattctcctgcctcaccttcccgagcagctgggattacaggaatgcgccaccacgcctggctaattttgtatttttagtagagacggggtttctccatgttggtcaggctgatcgcgaactcctgacctcaggtgatcctcccgcctctgcctcccaaagtgctgggattacaggcgtgagccaccgtgccaggccacaamctctttttttttttttttttttaatgcatacatgtatgcaacatccgtatttcagccacagtgaatagcttgcaaatcatgctgtattaattgagcctttgtacctaatttgcatatgctcttccatccccagaattgttctctgttctctatcggctgtccttatcagaataacccttatatatccttaattatttttcatgaacctttccctcatgttccagtatcctcttagttgcttctcctttgtgctctggtggtaccttgtgcttttatatgcacaaacacacacacacacacaccagttttgttacataaagctgcacaaaacgaatacatacaatagaaacttaacttgcctataatactgatgatttgaagggagttgaagataaagggataagagacttaaaattcagaggtctttcagattatacaccttcattaactcacagccctaatttaagaaagtaaaacttgaatctcttgtgttttttaccagtaacatctgtaatccttacagacgatgttaaagttgtgtacttatttgtctttctcactttctagactgtaagctcattgagagcaggacctatgtatttcaccctaattcccagagctttgtagmgtgcctggcccagaggaagttttcaataaacatctgttttataagacactgaaaacttatggcactatatctttatgcttgaaacattagtattagtcatgcagggaaacagtatttaaggtttattttaaaggatattgagaaaaggttttgcgtttattaagaacatgctatgtgaaaacagtactttcttagaaaatataaagaaaaatacaaataaaacgtctgttttataaagcactgaaaacctatggcactatatctttatgcttgaaacatcagtattagtcatgcagggaaacagtatttaaggtttattttttaaaataaatattttaaaataaaatattgagaaaaaggttttgtgtttattaacatgctgtgtgaaaacagtgccttcttagaaaatataaataatataaatatataatattaaaaatataagtatataaaaacaaaatataaaggaaaatagcccttgtcattagtgaagttactaaaattacaaagcaatgtaacaagttgaaggctttactttggttaatgcaaaataagtggcataaaaaacactatagtttggaatgatctaggaagacttcatttaagaagtgaaacatgaaactaagtactttgtgccccactctaatactcttaatctaatacttgtttgtcattatatgaataagagcttgggttagacagatctggccttttcacgcaagagtggtcatgagacaaaagagtagaccagtttaactgaagttgagggtttctatctggagtaagagataagactggaaagaaacaggctaagtcattgaaaacctggaaattcaggttgtaaaatttgtagtttattctgatagcaatggagagccaatataattttgggaagagtgatatgacattaggatttttgttttattttcattgtcaggatggcatcagaagtggctttctgcctcttagaaaccttgttgattctcttaacctgaaacttaaagttggctagggttaaacagaagatgtccaaaataacagtattaaggagaattttttaaatctttggaaccaaaataactcacacataattctttaagaaaagaatatatatacatatgtacatacacatatatataatatttatacatatgtacatttatttatgtatttatttatttatttcgagatggggtctcgctctgttgcccaggcttgagtaaagtgtgatcctggctcactgcttgacttcccgggctcatgcgatccttccaccttggtgtcctgagtagctgggactacaggcatgtaccactatgcctggctaatttttttcttttcaatttttttgtagagacagggtctcagtatatttcctaggctggtcttgaactcctgggctcaactgatcctcctgactcagtcacccaaagtggtggaattacaggcatgagccaccatggccagccaagaaaaagatatatttattggctgggtgcggtggctcacgcctgtaatcccagcactttgggaggccaaggcgggcggatcacgaggtcaggagatcaagaccatcctggctaacacggtgaaaccccgtctctactaaaggtaaaaaaaaattagccgggcgtggtggtgggtacctgtagtcccagctactccttcaccgcagaatggggctgcgacagagtgaatatcctgtttgccgtgtagcctatatttaaaatcagactgtcctcctcaaaagcagctggaactgaggttcaagagatggatgtgactgtgtatagggagaggcataccatttttatttttaaagtatcaasagaaatcatgatttcacattaacaatacaaagttgcaaaagcaaatgtgaataatgagcaggtactgatttggccagctttataaatgtgtaacttttaaaactgggttattcatctttttaaaaatagtttgtggaagctcattgtgtatagagaaaattggcctattgtctgttgtgaattatagttttttttcagtttgaccttcttaaagtttttttcccccttaagggtattacattcgcccatgaaattatatagtaaaatcaatcaatttttttcctttagagcttcttgggttttatgccctattaagaaaggcttcccccaactcccagattataaaataatacatctagactttcttcagtcaagtactctataaatctgtattttatttttaaaaatarcaacagagtaaggagtaacggtaagggtgaaacattaccttgatcaaaataccatttattgactggcttatattttctcccagtgatattggatactgcttttctcataagttaatttctcatatgtgtttgaactctctgttctgctaaggctttcccatgtgatttcctaaacttgggtggttaatcccctctagttgccacttggtctcctctctcattggtgagccctatctttactatccccaaactaactatacactagcaggggccagggagactagccaggatgtcagatactttgactgaatgcctaagagagaatctcaggggttttactataatagttgcctgaacttactttctttttgagacagagtctcactctgtcaccgaggccagagtgcagtggcacaatcttgactcactgcaaactccacctcccaggctcaagagattctcacgcctcagcctcctgagtagctggtattacaggtgtgcaccaccacacccagttcatttctatatttttagtagagacagggttttgccatgttggccaggctggtctcaaactcctggcctcaagttatccctctgcctcggcctcccaaagtgctggcattacaggcatgagccccaagcacaaccacatatatagctttaattaggtgaattttcagtagaaatttccagtagagctatttggcaaactatttctttttcagttcaagttgccttatccatttaaaaataaagagtgtggtctggagctaaaaagcctgggtttgaatttctgctcagccatttactagctctgtgactttggatgacttactaaaagttgtctccaccacataggtttattgtgaatatkaaatccataaatacacataaagtgtctagaataagtgcttgatgtatattgagtacttaataaatattggttatttatatcataggaaccactatatcatatcataggaactctgaagatgattaaayatctaaatgctgatttgtatatgtttgtttgaaaggggacaattcatctctttcgaaaaccacaaagatccttttttggcaagttgttacgggaatttagacttgtagcagctgaccgaagggtaagttattccttaaccccaattttaattattgcacaaacaacattataacattgaagaaagataatttttaaggccaatagaaatcactcctgatcctgccacactgttttcatttttctatgttggaaaagtatttttttagtgtaaaattgcagttgtttggtgttaagttgttttactttggtaggaagcttctgttaaagttttgattctaattctgaagtgttttaaagaaaaatggttttgtggttgctttttgttattaagttttcaaaaaattaaatggatccagtctaaagccatgttttctcttttatttattttttttttttgagatgaagttacactcttgttgcctaagctggagtgcaatggcatgatcttggctcaccgcaacctctgcctcccgggttcaagcgattctcctgcctcagcctcccaagtagctgggattacaggcatgggccaccacgcccggctaattttttgtatttttagtagagatggggtttcaccatgttggtcaggctgatctcgaactcccgacctcaggtgatccgcccacctcggcctcccaaagtgctgggattacaggcgtgaaccaccgtgcctggcccatgttttctcatttttaatgtagggcaagaaaaatatgttttgagactgtaaataaaaagatgtaattgccatccttttaggccaccaatgtaaaccttctagttactgtgtttcatgcttctcattgttgtctaaatgataaactctctgagggaagtgactgtctctattttgctcacctttttatagaagtacaatataagcattcagtaaatatttgatgacttttaagtaaagccagcttcaatgaaacaataataagcagtaccaatgggcactccaattgaaactctgccatattttcactatttttcaactccgttatcctcatttgcttccttatccaacttagattctatgctccatcattatcatttccctcctttttgttcttttttttttgagatggaatcttgctaaattatccaggctggtcttgaactcctgggctcaagggatcctccttcctcagcctcttgagtagctgggattacaggggtacaccaccactcccagctagtatcattttcttttatatgttctcaactcttttgtgctccccttccctctgtcttaattcctggaaaatccctaaccttcattaagttcactttctttctactctacttgcatctaagcaactgaatgtaacctgagagaaacaaaaccatgcgactggtctcactttgaattcatgatcagacagaccattagtgctgcctattaagtgctgcctattagtgctctttcattttatatttcctttgttcattcaattttccaatttcctagatggctgtttcatacgatgttctttcgtttctatcctcaagcttctaataccttcttcatcctcaccctaacctgatgatcttgcttcctgtttcaccaagggaaaagaagtaatcagaagaaaacttctacatcctatcattagcacatcagccatcactccgccttccctcctatttctctggacaagctttcagttcttctctataaaggcaatcctttcacttgttgcctactgaaagatgatgtccctataattgttctgtttcttacatcaytgtttttcttgcatcatgcatcattctcctctttcttgcatcgtaattacatgttataagttccactctcagggctgcttcatttctcagcttccttttgtagcaaacctacttgaaagaattatcagtacattgtgttcaccttctcttctcctcatctttattaaacacataccagttaggtacttgtgcccactaattcacataaacagcttttacaaggtaaccaaaaatctctgtgttgccaaaatgaagatttttccttatttctcaccttacttggttgatgttgaacagccaaagtcagtacttttttttttttttttgagacagagtctcgctctgtcgcccaggctggagtgcagtggcacaatctcgtcttactgcaacctctgcttccctggttcaagcgattctcctgcctcagcctcccaagtagctggaaatagaggtgcctgccaccacacctggttgattttttgttttagtagagacggggtttcaccatgttggctaggctgatcttgaactcctgacctccacccaccttggcctcccaaagtgctgggattgcaggagtgagccattgcacctggacaagattactaacttttaggaacatcatcatgccctttattcagattcaccagttgcttacatttggccccatttgcttcatcgttgtctctataatatgtacttatagagacaaaacgatatgcatatgtatgtgtatttttctcaactatttgagaatttctatgtcagaatttattttctcttgaacaactctccttctggaactattcttttaaacttgtatactgtaataacttagccgatgacaattttggtagatgtagaaagtgtgacacagactttttgaaggaagttatgtttattcctttgaatatcagagtataaattgtagcaacttgaacagaccccgtgaaatttatcacttctgtacacataagagtgatttttattttcacagtcctggaagatactgctctttggtgtaataaacttgatatgtactggcttcctgcttatgtggtgcagttctactaatagtataggtatgtcacctttgtatttttatggagttgttatttttacttttatttttctcattggaaataaaggtatatcttacatagaatatattattctgaaatgtatataactcaaatgatttaaataagggactatatttaaaacttccctgtaaactgtaaacttttgttcatttgttaggattgtaatttttttttaagtttttttccttttaaaatatattttaaaacagaaatggggtttcgccatgttgcccaggctggtctcaaaatcctgagctcaaacgatctacccaccttggcctcccagagtgctgggattacaggcgtaagccacaatgcctggccattttcattttaaataagctgttattttttgaaaaatcattaaatctatctggagattttttttttttttttttttttttgagacggagtctcactctgttgccaggctgtagtgcagtggtgtgatcttggcccactgcatcctccacctccctggttcaagcgattctcctgcctcagcctcccaagtagctgggattacaggcacgtaccaccacgcctggctaatttgtgtagttttggtagagatggggtttcaccatgttggccaggatggtctcgatctcctgaccttatgatccacccgcctcagcctcccaaagtgctgggattacaggcgtgagccaccgtgcctggctggagatttgtttttaatataatagattaaaactttaatttatgcagtttgtaagttagattttgaggtttgttggcttttccttaaaaagggaattctgtaatttttttcttatatctttttatgttttttattgcattgttcttttgttcagttattcaaacaatacatttgaaatagcgctgagattacagaagcaggcagaaaaatggtaacagggcttttgaacattcattgcttcatttttcctaatggagaaatcaggttgggaagtaagcttttctaccaacgaactttggctacatatatttatcagatttactagataactgccaatatatgaggttggcccgtgactcaaaagtttttttgataatggatacccctggtagaaataattttggtaacttgctgtatttttttagaggggtcagtaatacttttaatcatttttttgttgttttgcagctttaactgcctatacttacctgaccatttttgatctttttaggtaagtttttaggaaatcttaatgttttggagctaataaggaacttggtagaaatgtggtatagccatacaattcagcaataaaaacagcaactactgatatcttacaagaaaacaataaaaacattatgctttgaagacagtcataaaggaccacatattttatsatttcatttatatgaaatgtccaaaacaggcaaatctayggagagaaaaagtagattatgaagaagttttctttgcttaaaggaaagtaatctactaaataagtaaaattatcaacatagaacaaacacacaaacaacaataattagagacataacagtaattagagggcaggtggggcggctcatgcctgcaattccagcactttgggaggccgaggcgggtggatcacttgaggtcaggagtttacgaccagcctggccaacatggtgaaaccccgtctctactaaaaatacaaatagccaggcatggtggtgtatgcctgtagtcccagctacttgggagggtgaggcataagacttgcttggacccaggaggcggaggttgcagtgagccgagattgtgccaccacactccagcctgggcaacgagcgaaactcagtctcaaaaaacaaaatatttataaatttgattatattaaagttaaaaactctaggtagcaaatgtcaccataaacagagaataacctgagaagatatttgtaattcatacctcagagggctaattttgctaacatttgaagggccctacaatttaagacaaagaccaagaaaaagaaaaggaagaaaaaaattataattcatacagagagtttacagaaaaggaaatataaatgacacttatgaaaagttgcttatcttcactaacagtaagagaaatgcaaattaaaattactctgagatgctgttttgcctgtcacgttgggaaagcttaagaaatttgagtatacctgtgtcgctgagtgtattagggaaacgtgctcttttgtttttttaaaaatggctttatttggccaggcttagtggctcacgcctgtaatcccagcactttgggaagctgaggagggtggatcacaaagtcaggagttcgagaccagcctggccaatatggtgaaaccccgtctctactaaaaataacaaaaattagccaggcatggtggtgggcatctgtagtcccagctactcgggaggctgaggcaggacaattgcttgaacctgggaggcagaggttgcagtgagctgagatcgcagcactgcactccagcctgggcgacagagtgagattccatctcaaaaaaaaaaaaggctttattgagatactataattcatatgccttaaaatgacttttagtctcttcatacatagagttgtgcattcatcaccataattaactttacaatattttctttcttttttttttctttgagacggaatcttactctgtcacccaggctggagagcagtggcatgatctcagctcactgcaaccttcgcctcccagtttcaagctattctcttgcctcagcctcccaagtagctgggaatacagacatgcaccaccacgcctggcaaatttttgtacttttagtggagacggggtgtcgccatgttggccaggctggtctcgaactcctgacctcaagtgatctgcccaccttggcctcccaaagtgttgggattacaggtgtgagccaccacgcctgacctacaatattttccttgtctcaaaaagagaccactcgccttagctattactctccagtcattccgttctcccactcattccattctcttctccagccctaggcaaccactgatcagttttttctcgcgatagatttacctactctggacatgtcatataagtggaatcatacaatatacagtcctttatgactgtcttcttagcacaatgcttttctgttttgttgtagcatatatcaatagttactctttcttttttttttgagttaggrtcttactctgtcacctaggctggagtgcagtggcgtgatcttggctcaagtgattcttttgcctcagcctcccaagtagctgggattacaggcatgtaccaccaggcacggctaattttttgtatttttattagagacggggtttcaccattttggctgggctggtctcaaactcctgacctcaagtggtccacccacctcggcctaccaaagtgctgggataayaggcgtgagctaccgtgcctgagcaataggtatgttttcttctaagagttttatagtttttgctcttacaattaggtctttgattttttttgttgttgtttttgttttttttagatggagtctcactctgtcaccccgggtggaatgcattggcatgatcttggctcactgcagcctcagcctcccaaagtgctgggattacaggcatgagccaccatgcccaattagtttttgtatttttagtagagacagggttttcccatattgaacaggctggtctcgaactcccaaactcaagtcatctgcctgcctccgcctcccaaagtgctaagattatgggcgtgagccactgtgccctttgatccattttgagttaatttttttttttttttttttttgagatggagtctcgctctgtcgcccaggctggagtgcagtggcgcgatcttggctcactgcaatctccgcctcccaggttcatgccattctcctgcctcagcctcctgagtagctgggactacaggcacccgccaccacgcttggctaatttttggtatttttagtagagacagggtttcaccgtgttagccaggatggtctcaatctcctgaccttgtgatccgcccgcctcggcttcccaaagtgctgggattacagacgtgagccaccgcacccggccaagttawttttttttaatggtgtgagattgggggttcagattcattcttttgcatgtggataaccagttgtcctatcatcatttgttgaaaagactactttccccattgaattgccttggtacccttgtcaaaaaccagttcacgggccaagtgtggtggctgatgcctgtaatcccagcactttgggaggccaaggcaggtggaccacctgaggtcaagagtttgagaccagcctgactaatatgacaaaactccatctctactaaaatacaaaaatgagccgggcatggtgccatacacctgtagtcccagctactcaggaggctgaggcaggagaatcgcttgaacctggtgggacagagattgcagtaagtgagccggaatcgcaccattgcactccagcctggacaacagagtgagactccatctcaaaaaacaaaacaacaacaacaaacaccagttcactgtaactgtgaatgtttatttttggattctcaggtctgtcccattgatctgtatgtctgtcctttatgccagtaccatcagtcttgattactgcagctctgtagtaagttttgaaattggaaagtgtggatattccagctttgttctttttcaagattgttttggctaaacaggcattcttttttctcaggctggagtgcagtgggttgacctcggctcactgcagcctcagcctttaccgcctgagctcaaatgatccagctcagcctcctgagtgagtggtaccacaggcttgtgccaccacacctgcctaattttttgatattttgtagaaatgaggtcttcttatgttgcccaggyaagtcacaaatttctgggctcaagtgatcctcctgcctttccctcccaaagcgttgggattacaagcatgaactacctgtcctggctggaaacaggcacttttatacattgctggtgggaatataaattggtgcagcatctcgagggcaatttggcaatatcaattaaatttataaatgcccataaccttaaacgtagcagttccttttctagtaatttatgctgcagatatattcctgtggttaaaaatgagttgcatatgagattattcagtacaaaagattggaaacaatcagtatatgaatgatgaaataatggggcatgtataccccatattttggtatgtatatatcatagaattctcaaacttgaccatacagcagaattacttggaaggtcttgttaaaatacatattgcttcatttccagagttactgattcaggaggcctagggtaggacccaagaatttgcatttctagcaacagatgaaaccgatcctgctgggtatagggaacccacttatctgtgtaattaaatattatgtagccttagacaataaartcaaagcattttatggttttgaggtcctaatgaggggaaamagcaagatacacaacagtgtatatagtatgctgcaatttgtattaaaaagggggaaagaataagaatacgtacatgtatacacatccacacactacactcattcatttgcttgtatttgcgtaaatatacataggaaagataaacaaactgataataataggtgtctttgaagaggaagactctggcagggagacaagtttaaaatcttcccactatatatctgttgtaaattttgaattttatttatataaataaaacgccaatttaaaaataaataaaaagcagtttaaatatgttaccgccaagagtggtgtctcatgcctgtaatcctagtgctttgggaggctgaggcaggaggacatttgagcccaggagtttgaggctgcagagagctatgatcttagcactgtactccagcctcagtgacagagagataccctatagaccaggcacagtggctcatgcctgtaatcccagcactttgagaagccaaggtgaaaggactgcttgagcccaggagttcaagaccagcctgggcaatacagtgaaacctcttctctacaaaaaattttaaaaattagccaagtttggtggtacacacctgtaatcccagctactcactgaatagtaggcagtaggatcacttgagcccaaaaggtcaaggctgcagtgagctatgattgcaccactgtaatccagtcttgggtcttggtgacacactgataccctgtctcaaaaaaaaaaaaaaaggattttatttatttatttttgagacagggcctcatcctgtcacccaagctagagtacagtggcacgatcttggctcactgcatgcagcctccacctcccggtctcaagcgattctcctgtcttagccgcccgagtagctgggattacaggcacccaccaccatgcccggctaatttttgtatttttagtggagatggggtttcaccatgttggccaggctggtcttgaactcctgacctcaggtggacctcccgcctcagcctgccaaagtgctgggattacaggcgtgaaccaccgcgctcagcccatgcatgtactttaaaaagttactttggggaatagttactaatgttaccaaccatatttgataacaaactaacggtaataaaaatagtcaaattttaaaactaaagtaataatgtttcccttatgtcttaaggttcataaggaaaatcttttcatttaatttgaggaagtttctttctttagaggctcacaatctgccatatgagttagctatcgctacataacgtttcagatgaaaggtgtgatttagattcatttagagcttcactaatatccaaacacagaagaaagtggttatctgattttagaattttaagtgttaataaatgctactgttttacaaagaggtgtagaaatatattttattggagaacattaataccaaagtggtgttactaaactatggaaattaaaatgatttacacatataaataaaatcaaacatattgaatgatttgttaataaatgggtactgattttttagatttatgtagtaatgggaagtaaattcgatcagtgtaccatatttcatcaaatattagatgccaacagttttaagacaaatacttattttatgtgtccccaagaaaaatgctgctaattcaactgtgatgtactgtaagttgtaagactaaccctgatttgaggattattaagatgtgaaaaaacatgtacttcttaaaattgatgaattatagaaaaattttcagagatttttatccatttttaagggtaaaattttcaaaagttaatatttagacactgaatttttcagatttcttattattaacaaatcttatctatagagtattatttacaaagaaaaattttacaattaataattgaagctttggccgggcgaggtggctcacgcctgtaatcccagcactttgggagtccgaggctggcagattccctgagctcaggagttcgaaaccaccctgggcaacatggtaaaaacccatctctactaaaataccaaaaaatgaggtgggcatggtggcgcacttttgtaatcccagctgcttggaaagctgaggtgggagaatcgcttgagcctgggaggtggaggttgcagtgagccaggattgtgccactgcactccaacctgggcgacagagtgagactccgtctcaaaaaaaaaaccataaataataaattaatgattgaagcttcaattgtatatttcgtttttcttttctttttttttttttttttttgagacagggtattactctgtcacccaggctgagtacagtgacatagtcatggctcactgcagctgcaatctcctgggcttaggcgatcctcctaccctagcctctggggtagctgggactacaggtgttcaccaccacacctggctaatttttgtgtatttttgtggtgatggggtctcgacatgttgcctaggctggtcttgtactcttgggctctcaagtgatccacctgccctgacctcccaaagtgctaggtttacaggcatgagccaccacgcccagcctaattgtatatttctgactgcagaaactcatttggctgcctttatccgatgcaatttcaaaaatcattcatccattcaaaaccaacctagattatttgctgaacttcaatgtaaataccatattcttgctgcttacatgaattggaagtgagattagcacactatatgaaccctgtcatgatgagtgtgaagtactctcaaggagttagccagggctcttttgattgcagccatcagacttccactggagctctattgggggagcaaaggtgtaggatacttaattctacagattcaggggtgttaatggaatctgagggcagaggtttaactgggccccattgtaagaatcaaacttctctttatctctcatctctgttccctgtacatggacaccgttgagctattttcttcctgtaggtcagcgttccctactcgcaaatccagggatagaaatacaaatactactccaaattttcaaatgtgcatttccatcattcaggaaagcagccaaattaagcctggaatgccttggttgcagttccaaatcctacttccaaatccagagcagcattttgacgcagcttaggttacatgtgtcaggtgcctatctgtggatgagtcagctgtggccagggagtagggtcatgttaagaacataccagttctcagccaggcacggtgcctcacacctgtaatcccagccctttgggaggccgaggtgggtggatcacaaggtcaggagttcctgaccagcctggccaacgtggtgaaagcccatctctactaaaaatacaaaaattagccgggcatggtggtgcatgcctgtaatcccagctactcaggaggctgaggcaggagaatcacttgaacctgggaggcggaggtygcagtgagccgagatcgcgccattgcactccagcctgggcgatagagtgagactccatctaaaaaaagaacatatatcagttcctgctgtaatatagatggagaaaaaaatgaaggatagttaataactgagaattgaggaattgtgagctagggagacagactcttgtctccctgcttcatggagcctttcatatttccatttaaggattacaaaatactttgatgtcttcaagatccatgagataggagtatattataaggatggcttttcggccaggcgcggtggctcacgcctgtaatcccagcactttggggtggccaaggcaggtggatcacttgagaccaggagttcaagaccagcctggccaacatgacraaacctcgtctctactaaaaaaaaatatataaaaattagccgggcatggtggtgcaygcctgtaattacagctacttgggaggctgaggcaggacaatcacttgaacctggaaggaagaggtttcagtgagccgagatggcactactgcactccagcctgggcaacagagcgagactctgtctcaaaaaaaaaaaaaaaaagcatgccttttattaatcaggtaactaacatatttaactgggtctracgcagatagttgttacctcaatttcatattgtagtaacttgttttacagtgaatctactatagttggaaaatgaacataattttatctcactcaaaatgttgtcaaggtattattaatatttatgttaacttttaacaaagatgaagcgtatcaaagttaaaattgatcatatgtgtcattttttagcattttcagttacagaaaccatttagggtgaataacattgtgtagtggaagtatgaatttaggttctactttactgacttgatgtattataactttattctgttccttcacatgttaaaatcttccaagtataccacatgttcagatgctcactgtgattagatggtaaactactagaattaattatcttaataaattattagaataatttattattaatttagtctgtgcaaacacagataactttcaaccacttaggaattctgaaaacttaatttatcttcacatgttctcttctagttctaatactaaatttatttttctttttacttagtttaatgacatgtttaataagttactgggtaacattgaggaaacctagccctgtctattcatttgggtaagttcaaattattttattttctgctaacttatgactactaaaatattatttatagtagacgataaagagctagctagagtatttctggaaaataaatgctgcgtacttagtgaaatgatgatcagatagtgaaaatagataggctgggcacagtggctcacgcctgtaatcccagcactttgggaggctgaggcaggcagagcaccttaggtcaggagtttgagaccagcctggccaacatggcagacccctatctctactaaaaatacaaaaattagccaggcgtggtggcatgcacctgtaattccagctacttgagaggctgagacaggagaatcgctggaacccaggagacggaggttgcagtgagccgagatcatgccattgcactccagcctgggcaacagagcaagactccttctcaaaagaaaatagaaaagcatcttccaagaaacataaatatttaaggtataaatcatattaaaataaaatgttcacattaagttttttatattttataaagcaaatattttaaaaagttcacgttaagttctttaatattttggggatttattttagcaagagcaagtacaaaggattttcatgttagtgtatcttctagatgttaaataaatgtgatatagtttaataataggcagtggtaaagatggattttcatctgaaactggatttgtgatagcaatagatcaacaaataatttgagatttgtttccataattactgaggccaggtgtggtggctcatgcctgtaaccctagcactytggtaggttgaggcaggaggattgcttgagttagaagccagcctgggcaacatagtgagatctgtcgctgcaaaaaatgtttttaattagctgcacatggtggtgtacacctgtggtcccagctgcttgggaagctgaggtgggaggattgcttaagccaggagtttgaggctgcagtgagctataattgcatcactgcattacagatggcaagagtaagaccctgtctcaaaaaaaaaaaaaaatttactgaaagttgaaaggaaataatcttttatattaaaggtttaaaaatgtatttaaacatgagttccttttagatgctaggaaacaacttgaaagaattttactttattaatttttttttacctgaagaggcatatcgaccaaggaatttcactttagtaaagaaacttttggaccaaacttagtcttcttttccaccataccattcattgggactatattcttttgaacaaaattaggttttatttacttaaacaatgggaagaagtaaacaaaaattttaatgcaaaataaggattttcataaatcaatcataaatcaaaatgaatttttaaaaaatattatttttaattttatttattttttgagacggattctcactctgtcacccaggctggagtgcagtggcatgatctgggctcactgcaggctctgccttccgggttccagcgattcttctgcctcagcctcccgagtacctgggattacaggtgtgtgccaccacgcctggctcagtttttttttttttttgtatttttagtagagatggggtttcaccatgttggccaggctggtcttgaactcctgacctcaaatgatccacctatctctgcctcccaaagtgctgggattacaggtgtgatccaccacacccagactttttttcttttgtgtgtgtgtgtgtgacagttttgctgtgtcacccaggctgaagtgaagtggtgtgatcttggctcattgcaacctccacctaccagattcgatcaattcttatgcctcaacctccagggtatctgggattacaggtgtgcaccaccacacccagttaatttttatagttttagtagagatggagtgtcgccatgttggtcaacctggtgtccagctcctggcctcaaagtgccaggcccagcctgtgtcactgaaacttgagagagttgcattatcactatgataatcagttgtaaggtatagatatatccatataaggaaatctgccactgcaagtgacagaaatctaacttagtttggggcctggtgcggtggcttacgcctataatcccgggacttcgggaggccaaggtgggtggatcacctgaggtcaggagtttgagaccaggctggccaacatggcaaaaccccatctctactaaaaacacacacacaaaaattagctgggcatggtggcaggcacctgtaatcccagctacttgggaggctgaggcaggagaatcacttgaacctgggaggcagaggttgcagtgagtcgagattgtgccactgcacaccagcctgggtgacagagcgagactctgtctcaaaaaaaaaaaaattagtttggggagtsagatgcagtggctcatgcctgtaatcccagcattttgggaggcccaggtggtcgatcacttgagtttaggagtttgagaccatcctgagcaaagagcgagaccccgtctctacaaaaaaatacaaaaatatgctgggtgtggtggggcgtgcctgcattcccagctactcatgagactgaattgggaaaatggcttgaacctgggaggcagaggtttcagtgagtgagatggtgccactgcactcctgcctgggagacagagctagacgctgtctccaaaaaaaaaaaaaaaaaaagaaagaaaaagaaaaatgagttcgggggaaaaaatgggaggacttttacaatttatgtaaccaaactactgtgggaagacagtaactggcgcaggcactagaccactgaggacattgtcatttttttgcctcccaggcctgcttttctctgcatgtcctgttcagtctctcagaccacttttctccaccaatccgaaatgatgctcctatcaagaccttaattcacaccttctcaccttcatccgagagaggaaataataaattactactgttaaaataatatttatggtaggcaataaagagctagctagagtatttctggaaaataaatgctgcctagttcagaaaatcatgagaaagaactgttgcttgggccagcttggaacaggcatcagtctttatagatcagttactgtggatagaagacaaggtcgtgtaaggacatgacagctcccattttggctcacttgcttagagtgaacaggaaagaaaggagcagctaagcaataaagttaaacactcaaatatatttgcaatcgatcacatagctgaagtatcacatatatctggagacttcaaaatccagttctctaggcctgagaactatctagaatttcagactaccttcttgacagcttcacacggatgtctaattggtgtcttaaacttaggaaaaaattcttggtttcttcctcaaaaacctattcctttgtagttttccccgtctcagtaaataccatcagcactstgttgctcaaacaaaaaattctgggaatttctgttgattactgtctctcatcacccacatttaatctattagcagattaattatgtcaaggtaacctacaaacacatccagaattaccccccaatcccatttctgtctccactactgccagcccagaccaagctactttcatttacagccagtgtttttctttttaaacctgtatcatattatccctctccccttaaaaccatcyagttgtttcccgtaatacttagaataaaatcctaactcctttttctaatttacaaagcccttatatgatcaggaccctgcctacttttcttcaacttaatcttctcatggcctctataggatactgactttctttttgttgtttgaacgctactaactcattcccattttaggtcctttatataagatctgcctgatatgctcttcacctgatctttgcaaggctggcttcatcgtgttactcatatcttaatatcactaaatgctaatttccattaagtgactgaatggcccaatcaaaaatagtcatctggttaatctcttgtcacatcagactactataattctctgtacagaacttaccaaacaaggtatttgtttttctgtccctaccctttaaaaggtaaatttcagagctgggtgtggtggcttatgcctataatcccagcgctttgggaggccgaggtgggaggatcacctgaggtcaggagtttgagaccagcctaaccaacatggtgaaacctcatctctactaaaaatacaaaaattcgccaggtgtggtggtgcgagcctgtcgtcccacctactcatgagatcgaggcaggagaatcacttgagaccgggaggcggagactgcagtgagccaagattgtgccactgtactccatcctccgtctcaaaaaataaaaaataaaaagyaatttcatagaagtagggaccctgtcttgttttctgtaatatctttgtgcaatttgatgaattttaagaaatgaatacatttgtatagwtactatctggatcatgatatagaacattacaagtcccccaaaacctcccttcgtgtccattcagaccctaccagaagtaactggtaatctgacctctaacattgcatattagttttgcctgtttctgaaaatcctgtagatggaatatagtatgtactatcttgttcattcttgttcattgctctcatattccattatatgaatatgtcacaaattgcttaattgttaaggacatttagatgactttcactttttagctattataaataaaactacttctgaacattcttgtatatatcttttagtgcacatgtgtacccatttatgttgggtatgtgtatctttgagtggaattagtttggatttgcatgttcattattaaaagataagataataccaaaccgttttccagagcagttttaccaatttatactcccactggtagtgtttgagagttgcatttgcttcctgtccttgacaacagttgatactgtcttttttttttttttttttcttttttttgaggcagcatctcgcttggtcgcccaggctggagtgcagtggtgcgaccttggctcactgcaacctccacctcccggatttaagcgattcttgtgcctcagcctcctgagtagctgggactacaggcatgcaccaacatgcctaattttttttatttttttatttttagtagaaatggggttccaccatgttggccaggctggtcttgaactcctgacctcaagtaatccacccaccttggcctcccaaagtgctgggattataagcatgagccacygcacccggcctttttttttttttttttttttttttttttgaggcagartctaactctgtagcccatgttggagtacagtggcatgatcatagctcattgcagccttcaacacctgggctcaagtggctctcctgcctcagcctcctgagttgctaggactacaggcacatcccaccatgcctggctaatttttaaaatatttttggagtcaggggtctcaccatattgcccaggctggtttgaactggtttcaagcgatcctcccacaccccgagtagctgaaattacaggtgtggagccaccgtgcccagctgttattgtcttttttcataaaggccattctatggtatgcagtggtatttcattgtggttttaagttattttccttatgactaattgagcacctttgcctatgttgattaaccattcagatcacctcttttttaaaatgcttgtaaaaatcttttaaccatttcctgtttttctgtattaatctgtaacagttctttatatataagtatcttctccttcttagttgcccttctttctcttaatggtatcttctgatgaataaaagttttaaattttaggccgggcgcggtggctcacgcatgtaatcctagcactttgggagggtgaggtgggcagatcatttgaggtcaggagttggaaaccagcctgaccaacatggtgaaaccccatctctactaaaaatactaaaattagccacacatggtggtgggtgcctgtaatcccagctacttgggaggctgaggcaggagaatcacttgagcccaggaagcagaggttgcagtgagccaatatcgtgtcattgctctccagcctgggcgacagagtgagactccgtctcaaaaaaaaaaaaaaaagttttaaattaaatttatttttttgggttggtccttttgtgtacttgttaagaaatcttggcatacccccaggtcagaaagacactttgttctgttatcacctagaagccttactgtttgatttttcatatttaatcctacaatccagttggaatagatttttttggtatggtgtgaagcaggagtaaaggcatattctggaytgcagtggcgcaattcggctcacttcaacctccatctcccaggttcaagcaattctcgtgcctcagcctcccaggcagctgggattacaggcccgcaccaccacgcccagctaattttttgtatttttagtagagactgggtttcgccatgttagccaggctggtcttgaactggcctcaagtgatgtgcctgcctcggcctcacaaagtgctgggattgcatgtgtgagycaccgcgcctggctctttactgcttttatgtgccacatttttcacaaatcagtggactatatatgtgtaggtctgtttctagattctcttttctgtacaatttggtgtatttgtacttggattagtactgcactatgtcaattattgcagctttgaaatacctattgatatctggtagtataaatcttccagcttcgttcttcttcaaggttatctttgccttccttcacattttgcagttccatatgcattttaatatcagcttctcaccttccacaaataacattggtgcatttgcatactgttttttcctgttcttttttattttttcagtagctggaaaacaacacttaatttgtattctatcataacctacttttttcactcacctttttccatgtcaataaatactttttttgtttaacaatatataatgttctattgttgattccagcatttttcctttacaaataacaatgtgatgtacagtcttaatttttttgtcttttctgtgcctccgtgattattttcttgaaaaattttaagcatttatacttaccataaatattgaataccattagaccatgtgttgcaggaaaaactaaaacaacagttcctggcctctggcttatagtctagggattataaaatatattcataattcactgtaattatgtatagaaatgagaggcagtataataagtggttaaaatctgaattctagtgtcagagtgtttgagtttgaaaaccttctacttgctatctatatgactctaaacagttacttttcttcttcgtgtcctaaacttcttatctgtttgggaaaaaaaaatgagccaagtgtggtggcacatgcctgtagtcccatctactcgggaggctgagcagctgggaggattacttgagcctgggagttcagggtccagcctgggcaacatagtgagacccccatctcttgaaaaaaagaaaaaagtggataaagtaattctaataaggggttgggaggtttagatgaggtaatatgttaagcactctggtgtctaaygcacagtgggtcaattaagtgttattattatgattgtgattatttctagaaaataaggactataattgggtcctggtaattgtcttttttttttttttaatcattttaaagtttttctggaaagagaaagcctctgacatgggctgaaggtgctctctcttctgagtcctaggaattgtacaaataggtactccttggaatctgtgattttcattgtttattattattctagaaaccctaatctgctctaacagtgttgggctcatagtagacagcacatatgtatattaagtgagcaaataaatgaatgtaaatgtgttctagagagactggtttgtgaattgaaagaattgtgatgatctaattaatgttttggtttcaggtttgaaagattagaagtcctggctgtatttgcctccacagtcttggcacagttgggagctctctttatattaaaagaaaggtacatttgtataggatattattytaaatcccsccatgacacctttgggaacatgaaagaaacccgtcagacacatttgctttcaagggtatgaaaacttagatgagcagggctggagttttgatagtacactttctttatgtttcagactttttcttctgtttcattttttttacttccttccttaatgctactaaattgaatcagaagtggttgtgaatgaaacagagattcagtcaggcatgtttgatgcttattacaaacccattgaaataggcttggcagagaaagatagacattacatattaaggataatttgtgaaaaaagaaaacaactaaaaaggataatttatgagtctccttgcctcatcactgctaatagttaatagttataatattaaaagattttgtgaactttaaggtgggtgaatgatatatttaataaagctttttaactttataatttataggacttatttaatatatttttatttcttatagtgcagaacgctttttggaacagcccgagatacacacgtgagattttattttcaatatataatttactattgattcttaattattaattgatgtattattaaacagttggccaatgtcagatttcagactgtggcaacataacgtttttgctggtatttcacaaacaaaattccctaatactaagactccrtttctttactcttaacagttcccaagttctaaatatttttatactacacaggaaggcctttctatcttggcttcaggcttctcattatttccaggcctaggaaacactaacccagcttcccctagtcttctgtaatttcaaatttgaccttcaaaatctttgcatagcacctgtagaaaagagaattggacgaggctcagggattcagtgtaatcccagcactttgggaggctaaggcaggaggatcgcttgagttcaggagttcaagaccaacctggacaacagagtgagaccctgtctccaaaaaaaagaaacgtatatatgtttcatatatattgcaactatgtgattttcatatatatatgaaaagagaattgtatgtatcatatatatgaaaaaacaattgtatttctcaaccacagagctgccaactatatggaccttatctattctgatcagtttaattccacaaagtctgacttgtccagtatatcgtaaaacaaataccattgatatttatacagatttataacagcgtttacctgtagcaagrtactgttaatgctaaaagtccttacttatcctttgtaagatggagcaacagtagatgggacatgggtgatggggctagwaactaagttcagattctgtatctggaaacaccaaatcattaaagcagaccactttaccttcccacctcttagtccctctacgtattgaaattacatactgataataccaagaacaaattaaaggtgaatgttatcgttgttctttttaggggaagattattagttggtacttttgtggctctttgtttcaacctgttcacgatgctttctattcggaataaaccttttgcttatgtctcagaaggtatgttttttatttactattaatttaaaaatccaactaatctctcataaaaacaagccttttgtttgtttcgttcactcagatcaatgaagaagtatattctgaagacaagagagaactagcccaaatgttctcaagtcttttttaagtggaaaattataaaacaaaatctcattagttcaagctttaaaataacaaattattttaaaacaggcaggagtgacctgtaaattaaatcatgtggtgatgaaaaattacatttaccaaataatgtgagattctaaatgtgtaatctatctaagaaaagtctattgtaagcattttagaagtatcagtatacttagaattcttagttgatatgctaattgaaaataattgtattctgttaataaagtaagttcccaggaacttctctttggcaatggtggatgggcatatatgtttgcaagtagccaaactttatttctttggaaatattcttttattttgaagtatttacaacttcagactgatttttcacttttgcagtctaaattattttcttttttcaataatttcagtgttttggaatcccactaacccacaaaagagttagccactaagagatggagaagtgaggtgaaaatagaagtgggatgtgtgcacagacccacactttgaagtatagagaagcacagataggtgtggatctttttagatctcactctaggatagtcaagagaagaaagttttctgaaatgcccattcaagtttaaacaacttcatgaatgttatgaagataaattgtgtttgtatgagttaaagaagtactgcatgaattagaaaattaaataatgataattaagatcacyagaatttcttgaaaaaaattcataatttataaaatactataacacttactctagaaatttttaagatggtgcaaagatttagaaacactgtttccctgtaaagatcagggagatacaagaaggaaataagactactgataatcttatgacccacagataatatgttaacatttctatgttattccttccacttttttgtatgcacacgtacatataattttatgtgcttacttagaattgtatatattacagttttatgcctggcttttttttttttttttttgaaacggagtctcactctcttgcccaggctggagtgcagtggcgcaatcttggctcactgcaacctctgcctccttggttcaaggggttacaggaatgtgccaccatgcctggctgatttttgtatttttagcagagacggggtttccccatgttggccaggctggtctcactcctgacctcaggtgatctgtccaccttggcctcccaaagtgccgggattacaggtgtgagccactgcgtccggccatgtctggctttttgattagcattatgtcttcagtattgcttctcattaaatactctttgaatgtaaatgattttttaatgtttgcataatattgttatgaatattttaaaatattttatacatttctaacttttccttttataaataactctataatcagcctctttagatcaacttcgtctgcattttttattctttctgtaggataaattccccgagaaggaattatttactggattaaaaatacagtatttttcaaaggctttgttgtatattgccaaatttatttccagaaaagttatctagtttatatttttattatattatattatatttatttatttatttattttttaatagagacaaagtctacctgtgttacccaggctggtctcaaactcctgggctcaagcagtcctctcacatcagcctcccaaagtgctgggacgacaggcgtgagccactgctcccagcctactttatattttcattagctggaaatggaggttcccagaaacatcaagatttgtgacattagctgggcttggtagcatgtgcctctagtcccagctactcaggaggctgaggtggttgtattgcttgagttcaggagtttgagttcagcctgggaaacatagcaagactctggctttaaaaaaaaatgaaggctgggtctggtggctcacacctgtaatcccagcagtttgggagaccaagtcaggcggatcacaaggtcagcagtttgagaccggcctggccaacatggcaaaaccctgtctctactaaaaaattataaaaattagccgggcatggtggcaggcgcctgtgatcccagctacttgggaggctgaggcaggagaatcccttgaacccggtaggcggaggttgcagtgagccgagatcacgtcattgcactcctrcctgggtgacaaaagtgaaactccatctcaaaacaaaaaaaaaagaaaaaagatttgtgaaattacttgaaatttgagtgggaaataatattaagtactttctatatgccaagcactgctaaatactttacatagaataacctatttaattctagccaggtaggtacccaggttctcacctggcttttttgagagttgagggaattaatttgtatgtagtttgaatatcccttatctgaaatgcttggggccagaagtgtttcacattttagrttgtcttagatttcggagtgtttgcattatatgtatgggttgagcatcccaaacctgaaaatttaaaattcgaaacgctcctatgagcatttcctttgagtatcatgttggtgctcaaagttgtggatttttggttttcagatttgggatcctcagcctgtacctatggcccgttctcagcacactagttaggaagctctgcttaaaagtataaagaactgctgggcatggtggctcacacctgtaatcccagcactttgggaggccgaggcaggtggatcacctgaggtcaggagttcaagaccagcctgaccaacatggtgaaaccccgtctctactaaaaataaaaaattagccaggtgtggtggcacgtgcctgtaatcccagccacatgggaggctgaggcaggagaattgcttgaacgcgggagacagaggttgcagtgagccgagatggcaccactgcactccagcctgggcagaaagagcaaaactccatctcaaaagaaaaagtgtaaagaacctttaaaaccttaaattaatagtaacaatgacataaattccttcaggtcaactgtatattgtataatagttgaaactgcttttgaattagtggcataagggcataaaagaggaaacatttatagatttgaggagtagcatgttcttttgtaatgttattcagtcactgccaaatttattttttaaaattaaagaactcaaatatttcaggtagtggtttttttttcttctatatagataatttaagtattttcttcttaaagctgctagtacgagctggcttcaagagcatgttgcagatcttagtcgaaggtaagatgttatggagtttcatgatatgcataatttaaaggaatacacaagaaatgcatctatcatgggaacttaaattattcgttgctgaggttactacgtgaatcacacaggtcagattgttattctccctttactttttaattgatacaaaagagaactttataaatgaaagggctttgttcacaaatcctctttgctttctttaagaagtacactatgtggtaccaaaatacaagttatcttttacaaggttgtcaccagttttatgtgagttctgctaatggatactctttctgtttgttttttcttagcttgtgtggaattattccgggacttagcagtatcttccttccccgaatgaatccatttgttttgattgatcttgctggagcatttgctctttgtattacatatatgctcattgaaattaagtgagtattttttattgttgtcaagtatgttttgatttctggggacttacttttaagggcatcagcaggatggatagtggtcaagcttctagcagtttcgcttatgtcctgtgtaacttagatcacatcttttccttaggtgtcttcatctgaaaaattaaggggattgggttcaataagtatttcttaccacaatgtataatgcagactggaaaacaatttaaattccctactgctgacctgatgagtgaaacagaaaagagaacagtaagaaagagatctgagccaccactgctattgccgagagagggaggagaagaggacgtaggcgtgaaacaattttttaaaaataaagccttttaggaaataggctttacagctgctttaagcttaacatgttatggcatatgattctttggctacccaccttttaartattagtctttactagaatttgtccttattgttcttgctgttttatgtattttccttaaaaatcacatgcaagtatttgtttttgtttgctacttctgtgggattcctagatttttatttctagcccacatctctattgaattccaaaaggcgtatcttcctgacttctataggtgtctactttaactgaacctattttcccttaactctgaaactgttttttcttctatctcccatctcagtgaatgggagatacaagaaaaatactgtcatttatgccaatgcattcttattttaaattgcattaaaatatacataatatagagttggcttttttctgagatggagtttcgctcttggtgcccaggctggagtgcaatggcatgatctcagctcactgcaacctccacctcccgagttcaagcaattctcctgcctcagcctcctgagtagctgggattagaggcacctgccaccacacctggctaatttttgtatttttaatagagatgaggttttgccatgttggccaggctggtcttgaactcctgaccttaggtgatccacctgcctcggtggctcatgactgtaatcccaacatagagttttttatttacattgagtgtacaatttggtgacattgcatgcagccattaccaccatccatctccagaacctttttcctcctkccttccttaaattccatgctcattaagcagctttccttttcctcctcctcacagcccctggaaaccaccattctagtttctgtctctaggaatttgacttctctaagtacttcacagaaatgaaatcatataatatttgttcttttgtgtctgcttatttcacttagcataatgtcctcaaggttcatctatgttgtaacatgtcagaatttccttcctttttaattggaatgctgaatcacattttccaatgcataatgggtaaacartgcattttgtttacccatttatccatcagtggatatttgaattggttgcatttctttgactattgtgaataataccactgtgaacacgagtgtacaaatatctgagtccttcctttcagttcgtgtgggtatatacccagaagtgaaattactgggtcatgtgatatgataattctgtatttatctaatttatttaattttttatttttgtaggcacatagtaggtatatatatttatggggtacatgagatattttgatacaggcatacagtgcataataatcacatcagggtaaatggggtatccatcacctcaaggatgtattttttctttgtgttctaattatgctcttgtttattttaaaatgtacaataaattattgttgactgtagtaaccctgttttgctatcaaatagtagattttatttattctaactatatttttatatccattaaccatcccccacatccccccaatattttagttttttgaggaactccagtgcatcattaatacccacttttcctccctcctcctctctcaccactccccaagccatttctaattcgtctccaagccttgtgtaattgtttattaatatttatttatttggctgggtgcggtggcttacacctgtagtcccagcactttgggaagccgaggcggctgggtcgcctgaggtcaggagttcaagaccagcctggccaacatggcaaaaccccgtctctgctaaaaatacaaaaattagctgggcgtggtgatgcacacctgtaatcccaaccacctgsgaggctgaagcaggagaatcgcttgaacccaggaagtggaggaggttatatatatatgagacatatatacacacacacacacacamaaatataaaatatgtgttgatatatatatataaacatatatatatgtttatttgtcccctctttcccattctcattgctgctgtccctattaagacctttatcatcatttctttggcctaattagaatagcctctggtcttctagttttcattcttatccattgctagttaccttttattttgtcactaatgtgatcattcaaaattgctagtttggagataatatattcctgtttcaaaaccctccccttgaggtgtacccaacagctcattgagaacgggccacgatgacaatggcggttttgtggaatagaaaagggggaaaggtggggaaaagattgagaaatcggatggttgctgtgtctgtgtagaaagaagtagacatgggagacttttcattttgttctgtactaagaaaaattcttctgccttgggatcctgttgatctatgaccttacccccaacsctgtgctctctgaaacatgtgctgtgtccactcagggttaaatggattaagggcggtgcaagatgtgctttgttaaacagatgcttgaaggcagcatgctcgttaagagtcatcaccactccctaatctcaagtacccagggacacaaacactctgcctaggaaaaccagagacctttgttcacttgtttgtctgttgaccttccctccactgttgtcctgtgaccctgccaagtccccctctgcgagaaacacccaagaatgatcaataaagaaaaaaataataataataataataataaaaccctcccctttgcatagttgcaaaaattgaagttgtcagcacagagtcctgwgtaatcaggcccctaccaaccttactaaccatccatctatctattcctgaccatttgtggttttattgctgggtcagggttttcatgcccctgcacatgctgctttcacttgcctatctttgaagtctctgcccaaatgtcaccttctggattatctccaccccaggagccttgtcactcaatcttttgtgcggccatggtactctgtagacatttctgccttagtgcccaaagtgcttcattatgtttttcacatgtgtatctcctgttatttctagggcaaggattgtgtctcattcacatttctatttctagcatgtggggaaaagtagaaaagagtgcacaatcagcttgtaattattggcattttggtctgtattgttggtagaacttcagccagtttgaattgttgatgttgactacagtgttaccataaaaaattcctggagaatcttacctggtgaaattcctggggaatttgaagtcttattagaaataattatcgctcactggaaacttgatataattactgatagattccattagtctttctgtatcaaaaattactagttgaatgacacacagccacggctgagtggctgccctgcccctgtttcctttcacgtttttgctgcatgtaggtggttgtggccactgtgcccggagggaggcagcagtggccagtaatgcctgggaaactcctctgggggtacattatggaactggaagcacccttggaggagtccgagagccagaagaaggagaggcagaagagctttatggatatcacagtttcggctaatggattatggacctgtacttcccttatatggtttttaygaagatttaaacaagataagctgaaaatacattacacagtgctggagtgacagaaggaagtcaagccaccattatgactcagatgagaaatcagaaacaagagaaaatggtgttacagattacctggatgctcccaagaccaaaaaaattaaaatgaaagagaagctaaatggagacactgaagaaggatttaatagactttcagatgaattctctaaatctcataagtcaagaagaaaagatctactgaatgagatattgatgaatatgaaaaaaaaaaagcaagtatcatccttagatagttctactcatgaatcaagtgataagaagctagaggagaccttaacacatgaacagaaagaaggaaccttctccaatcttcctatttctgaagagactataaagcttctgaaaggttgaggggtaacatctctctttcctgttcaagttaagacctttggtcctgtatatgaaggaaaagatttaatagctcaagcacagacgggaacaggaaagaaagacattctattttgcgatccctttgattgaaagactccaaagagatcaagaaacagttttttgtttgtttgtttgtttgtttgttttttgagacagaatctcgctctgtcgcccaggctggatctcggctcactgcaagctccgccgcccgggttcacaccattttcctgcctcagcctcccaagtagctgggactacaggcacccgccaccacccccgactatttttttttgtatttttagtagagacgggatttcaccgtgttagccaggatggtctcaatctcctgaccttgtgatctgcccatctcggcctcccaaagtgctgggattgcaggcgtgaaccactgtgcccagctctgattggatctttctaaactgtgccatgttgtgcttgatgaagtggatcaaatgttagagttaggttttgctgaacaagttgaagatattattcatgaattctacaaaactgattctgaagacagtcctcagactttacttttttctgcagctcgcccacagtgggtatgcaaagttgcaaaaaaatgagtgaaatccagatacgaacasattgatgtttttggaaaaatgactcaaaaggctgcagcttctgtggaacatttggccatccggtgtcattggtctcagaggccagcagttactggagatgtccttcaagtctacagtgggtctgaagggacggctattattttctgtgagacccagaggagtgtaactgaaatagccatgaatccacacataaaacagaatgcccagtgtttacatggggacattgcacagtcacaaagagaatttacactaaaagacttcagagaaggtagttttaaagttttggtggcaaccaacgtggctgcctgtggtttggacattcctgaagttgacctggtgattcatggttctcctcctcaggatgttgagtctatatccatcgttctggacgcacaggtagagctggacagacagggatttgtatatgtttttatcaaccaagagaaagaggtcaactaagatatgtggaacaaaaagtaggaattacttttaaatgtgtaggtattccttctacaatggatttagttaaatctaaaagcacggatgccataaggtctctggcttctgtttcttatgctgctgttgattttttccaaccatcagctcagatactgacagaagagaaaggggcagtggatgcattggctgcagctttagcccacatttctggtgcatcaggctttgaaccacgatctttgatcacctctgatagggatttgtgaccatgactctggaaagcctagaggaaatacaggatgtcagctgtgcttggaaagaacttaacagaaagctgagtagtaatgcagtgtctcagattaccagaatgtgcctcctgaaaggaaatgtgcgtgtttgctttgatgttcctacaactaagtcagaaaggttacaggcagagtggcatgattccgactggatattctcagtgccagccaaattacctgaaattgaagaatattatgatagaaacacatcttctaattccagacagaggagtggttggtcaagtggccagtcgggccgatcaggtggtcgatctggcagccggtcagttagacagagtccacaagggagtcgctcaggaagttgacaagatggtagaagatgaagagggaatagaaatcgatcaagaagtgggagccacaaacggagttttgactatttgatagttaatctaccagtatgaggttgcctatttctgcctaatcatgtatattatgcaccaaaaattaggtcatcatagttgaggtatgtgtctgctatttgcaaataaattggtcatatttttttaaaaagtatttcacaagaatgrttgtaaacagatctacttaccagttatacctttgaattaaaaaacctctttttattgtctcttttyaaaaaaaaattactagttgaagttttttgtctgtctcaagcaaataaacatatttcagctctttctagttgacagatagtttgacaaaaaaatgcctgacggggaaatgtccacattttttttcatcatacctcttcctactaattaacataattattagttatttttccactaaactttgaaaggaaagaattctaaaaactggagtwtttttctttgaaatgtttctttgcaagtagtggccaattgtgataaaattgtgtcctgttgctcagtcctgttgctttagataattaatgttcaggagatttaattgtaatatgcccagtgagatataaatttaaaatttagaattgttttttccttttagtaattattttgccgtagacactgcctctgctatagctattgccttgatgacatttggcactatgtatcccatgagtgtgtacagtgggaaagtcttactccaggtaaggtgcttcttccaatgcacgtgcttaatattagccatgttcttctaccagattaaaaagttgtatgtgttgttctacaagattgtgaaatttttatttttattttttaattttaattttttttttttttttttttagagacaggtccttgctctgtcacctagactggagtacagtggtgggatctcggctcactgccgccttgacctcccaggctcaaaggaccctcccacctcagtctcctgagtaacaaactacaggcacacaccaccacacccagctaatttttaaaaatatttgtagagatgggctctcactatgttgcccaggctgatctcaaactcctgggctcaaatgatcctcttgctgcggcctcccaaagtgttgggactatacgcgagagccatcgtgcccagtcataatttttaattacaaaagttttttggccaggagaggtggctcacgcttgtaatcccagcactttgggaggccaaggcgggcagatcacaatgtcagtagttcgagaccagcctggccaacatggtgaaaccctgtctctactaaaaaaatacaaaaattagctgggcgtggtggcgtgcacctgtaatcccagctactcgggagactgaggcaggagaattgcctgaacccgggaggcggaggttgcagtgagctgacattgtaccactgcatccagcctgggtgacagagcaagactccatctcaaaaaaacaaaacaacattttttttaatgccctccctttaacagtacagattgtgaaatttttagttactggaagcccctgctagaaatgaagtcaaacaataatctctgacattcatatagtcagaacctgatgaaagtccattagcaagtaaaatagtcacaaatcttcctatatttatattgtgacaaaatcacaaatttaaagctattattatttttcaagtgaaaagaatgttacttctttttttttttttttttttttwtgagacagagtctctctctcttgaccaggctggagtgcagtggcgctacactcaggtcactgcaacctttgcttcctgggttcaagcgattctcctacctcagcatcccgagtagctgggactacagccatgtgccaccacrcctggctaatttttgtatttttagtagagctggggtttcactacattgaccaggatggtctcaaattcctgacctcaggtgagccacccgccttgaacctcctaaagtgctgggattacaggcgtgagccactgcacccggcctgaaattttttttagatatttattttccctcagtaaatgtgctttggcttttgtgtaatctgcttatgamtattttattatttcctgccactgaatcagtgagactttaaaatttcaaacttaaaatcttaaatgacacattgctacttactgaaatgataggaacaccctgaatatgaatagaaaggcagtttccggccgggcgcggtggctcatgcctgtaatcccagcactttgggaggccgaggtggttagatgacgaggtcaggagatcaagaccatcctggctaacacggtgaaaccccatctctactaaaaatgcaaaaaattagccgggcatggtggcgagtgcctgtagtcccagctactyaggaggctgaggcaggggagtggcttgaacccgggaggcggagcttgcagtgagccaagattgcgccactgcattccagcctgggcgacagagcgagattccaaaaaaaaaaaggcagtttcccagggccggatgtgcgtgtaagcactgtggttccttctgtcttaccctatgccttttccaagacttagggcagtagttccatctccagaaaaaataaaaataagataatagttgcatagtgctatgccctatacaaaatacgacctttgtaaccatttcccaaagattttttgttggttggttggttgtttaagtgttatttatctttttatcttatcttcaagataaaaaaacaggtgtgggccagttgatgatgttgttccactagtggggccagttgaaacctctcttctctaaatcatgataggacagctgtcaaagcaaaggctggcttaaaatccttttggggagggggttcaggaccattgttggcaaacttttttccttcccccattattcatattttattgtatttttccccagacaacaccaccccatgttattggtcagttggacaaactcatcagagaggtaagatggaatagtaaataaaatcattttattttatatcagggaattgaaaaggtggatacttttaatactttattcaactctacctagaattttatttgagggaagttcatgttcttcacaataacatactaggagccataatatagtggcaaacgtggaaaaatatgaggaattgttcaatttggaaatcaaattcacttgaagtgaatgtggaaggtaatggcctaatgaccaccctattataaatgctatgattytyatttattttatttagttatttagktattttttttttgagacagtcttgctctgttgccaggctgtagtgcagtggcgcaatctcagctcactgcaacctccacctcccaggctcaagcaattctccttcctcggcctcctgagtaggtgagacyacaggcgcgtgccaccatgcccagctaactttttcttttttttttgagacagagtcttgctctgtcgcccaggctggagtgcaatggtgccgtcttggctcactgcaacctccgtctcccaggttcaagtgattctcctgcctcagcctcctgagtagcygggactacagatgcawgccaccatacccagctaatttttgtatttttagtrgagacagggtttcgctgtgttggccaggctggtcttgaactcctgaccttgtgatccacccgcctcggcctcccaaagtgctgggattacaggcatgtccacagcgcctggcccgcccaactaacttctgtattttttttttttttttttttttttctgagatggagtctcgctctgtcgcccaggctggagtgcagtggcacaatctcggctcactgcaacctccgcctcctgrgttcaagtgattcttctgcctcagcctcccaagcagctgggattataggcgcccaccacatgcctggctwatttttgtatttttagtagagacagggtttcaccatctcgaccaggctggtcttgaactcctgacctcgtgatccacccacctcgacctcccaaagtgctggggttacaggcatgagccaccasgcccggcctaacttttgtatttttagtagagacggggtttcaccatgttggccaagatggtctcaatctcttgacctcgtgatccacccgcctcggcctcccaaagtgctgggattataggtgtgagccaccgtgcccagcctgttttttgttttttttgagactgagtcttgctctatcacccaggctggggtgcagtggcatgatcttggttcactgcaacctccgcctcctgagttcaagcgattctcctgcttcaacctcctgagtagctgggattacaggctcccaccaccatgcctggctaatttttgtatttttagtagagacgaggtttcaccatgttggccaggctggtctcgaactcctgacctcaaatgatccgccccttgtgacctcccaaaatgctgggattacaggcatgagccactgtgcccagccttttgttgtttttttaaaatatatatataaaaagagatggggtcttgctatgttgaccaggctggtcttgaactcctgctctcaagccatcctcccatcttggccttccaaagtgctgggattacaggcatgagccactgtgcccggtcaaatgctgtgattttttttttttttccagggggtacagggtcttactctgccacccagtctggagtgcagtgccgtgttctctgcttcccaccggctaattgtacttttttagtagagacagggtttcgccatgttggcctggctggactcgractcctggcctcaagtgatctgcctacctcagcctcccaaagtactggaattgcagacatgagccaccatgcccagcctagactttcttttaagttgttacaaatttccacctactaactaatgaagaaataaaataatgaactattttgatgttgaaactattttaaacctttgattgtcagtgtgacagaggccacttttaccagtataactggctactactctcaactagtgaagcctggccttgagtatgtgtcctgtgcaactgtaccagtgggctacacactatatatctggccttggaatttcttctagactcacatccaaacaacatcctgtgttgtgcagagatttgttataagggatttcagagaaagaagtgattgagaaaacaaaaaaattaagtaaaaaatctgataccacaaagtgctagatataaatatattccatattgatatgaaaagaaccatacactgttgaagaaattggttggggtaggggtttaaaactgagcagtggggacctgattctaaaagaattggggcaagcaagaaacgaggaaagcaaggtcttgggtcagtatggaacaaacaggaatggtatcttgagtggtctgagacttctcttagctaatgagtgtccttgtgcaggatttggctgtcattcttaagtttaaactaagtccataatgtgactaaactgcattggatatgttaagtacagacaactctgatcacctctttctgtttttggtaggtatctaccttagatggagttttagaagtccgaaatgaacatttttggaccctaggttttggctcattggtatgttcttttacatatgactttagttataatttaaaatatagtcttccatttttaaaactgaaaaaaartatttccttaaaatttttatagagcctttgattcctagttatgttaagcagagtctaaaatgtacatgaattcaattacctaattgagggattttttggtgtttagagacagggtctcactctgttgcccaggctggtgttgaactcctggcctcaagcagtcctccygccttaatctcccaaacaatagaggaatgtttttattttttttccatcaaacatgttaatgataataatacaggagtgtccagataagacaaatttgtagtcagtgtaatttccaaataagaaaatgttaaaaaaaattaaaagtgcaattgctttcttttttaactgtagttctcattttggagagtttgctgaatattttgaagaactacagtaacacaacttgcttcagcataaaatttcgtattttctaattcagtttgaacctcaataccagagagactttattatgacacggttttactcrtacgttaggaatgatgaggaaaatacagaaaatgtaaagcactataatcttatcatctaaagaaaactgctgttgatattttggtgtttatacatttattttccttagaaaatgagatcacgggctgggcgtggtagctcacgcctgtaataccagcactttgggaagccgaggcgggcagatcacctgaggttgagrgtttgagaccaacttggctaacatggtgaaaccccatctctgctaaaaatacaaaattagctgggcgtggggtgtggcacacgcctgtaattccagttactcgggaggctgaggcaggagaatctcttgaacccgggaggcagaggttgcagtgagccgagatcacgccattgcactctagcctgggtgacagagtgagactctgtctccaaaaaaaaaaaaaaaaaaaacaacagaaaatgagatcatgctgttttataattagctctttttgtttaattaatttatcatgaacagttttctatgtcattaaatactcttctacagtatcattaaaaaaaacagatagggtttgatttttctaatataacacaaattttatagataaacagatcaaagctggtctagcagttcaatgatattacccactttgcagtctttagtttcaggctatgcttttgtagtgggaaaatggttgcttcacctccaccttccccaactctttccctctctcattattttggatgtctaaaacttattacaagaaaaacttgagactgtaacatcccctccctccttactgggaaggtgccaaatgaccagagtgtcaagagaccaaagaatgacttggacaggtccagcatggccagtaggtgagtttgttaggagttacctatggggcactcctgggaagcaggacagctttagagatctacccacctcccatttctaagctgcttttaagctaattttctcgctctttgcctgctgtatgtgtgtaatgagactgttttccttggtagggtctcagatgctctctaaaatctttggttctcagggtcgcttgctcctcgactgtacaccatggctttggctcattgcctggccttcagagttcgggcagcggacatacatcatcgaataacctagtgggggacccaccacactacacttctttaaattctttagaaggggccgttgggaacaatattctctaaattcttgaatgttgaaagcagcttgtggacattataattaaaaattagtttgattggatataaactcttcagtacacatttgtttcaagtttcttaaaaacacattatcccttttatttctggcatgaagcatttctgagacaatgcctaatgatagtcttaatttttttccttttatatgtcacttggtctttttgcctggatgcccaaaagatttttttttaagttcagtacctttactagaatatgtcttggcattggtcattctgcatgagttatttcaggtatgcagtgcaccctttcttctttttttttttatttttatttttgagacggagtcttgctctgtcgcccaggtgggcgtgcagtagtgcaatctcggctcactgcagcctctgcctccagggttcaagcgattctcctgcctcagcctcccgagtagctgggattacaggcacgcaccaccacgcccagctaatttttgtttttttttagtagagatggggttttaccatgttgaccaagctagtctcagactcctgacctcaagtgatcctccctccttggcctcccaaagtgttgggattacaggcatgagctactgcgctcggcccacagtgcacgcttttgataatgctgtttcaaaaataattttttaaaacatctaattgtattttgtaatatttgttctattctctttctttggttttcttttgtggaaacttctgttatgtgcatgttaaatatgttggatctttgcctttcttactgttattttctttcaaattcttatcttttaatttccttttgattttttttaaccttttgtgtctcttaaagtatacctgtatgtttccttatgtttgtgtttgttctgagtaagtcttcatttctaaagtgatctttttttcttgtattacaattgtcatctcatttctaaggttttctaattctgatttatgrtcttgttttatatcttttgattggtttttaaaaagtaggttatagtttttatctgacatgtagttttatctgtctggtgatcttttataatctgttttatagtctctttttcttacataactttgtgtgggatttgaccctctcttcttttctgttgctcatttttatgtgaaattagttttcctgaacattaaaattaggagtggtttagggtagtgtgtacaaattcatgggtctagagctccatcttctgatgattttgtgaacgaagaaagatttttgttctggctttsttcctctctgccatttttaccttttttttttttttttttttttttttttgagacagggtctcactctgtcgccaggctaractgagtgcaatggcttgatctcggctcactgcaacctccgcctcccaggttcaagcgatcctttcacctcagcctccccagtagctgggactacaggtgcatgccaccatgcctagctaatttttgaattttttggtagaaacagggtttcaccatgttggccaggctggtctcaaacttctgacctcaggtgatctgctcttggcctcccaaagtgctaagattacaggagtgagccactgtgtccagcattttttttttttttttttaaggagacagcgtcctgccctgtcacctaggctggagtgagtggtacagatatagctcactgcagtctcaaatgtctgggctcaratgatcctcctacctcagccttcccagtagctgggattacaggtacacgccaccatgcccagctgatctttttaattttttttgtagagacagtcttgctgtgttgcctaggctggtcttgaactcttggccttaagcactcctactgccttggcctcccaaagtgttgggattacaggcacgagccactgtgcctggccctgccttacatttttatctgaacttcttctgtcctttgtctcaactgtactactcagtttggattctcttgccawtgtttctttttgatatggagcttttttttttttttttggaggggagctttgcctggttactttcgagactcatagggctcagactattccagcccttattgcagacccagtgtatttgcccactgttgtaatgtgcaaaactcctcccagttgcagctgcttttctcatattggctgtcctagatttccattaagtcttgttagccgctttggggtttttaggtcagtcagatgtgctgttgcttcctgctgcacagattgtgttaccttgaaggtcttacaccttttatttgggttttcatargggtactaggttactttctttgttttaatggaaatatttgaggcatttcaaacactgccaccactgctgccatcttgcaagaatcccaacataatttttagttttcttagttttacattatctaaatatgccataatttatttcataagtcccttagtgaatatttagattctcttctatttttcctatattaacaggtctaggataaacttttttttttttttktttttkttttgagacggagtctcacactgtcacctgggctggagtgcaatggcatgatcttggctcactgcaacctcygcctcctgagttcaagcaactctcctgcctcagcctccyaagtagataaaaactagaaagaagctatctgtgaaactgctttgtgatgtgtagattcatctcacagagttaaacctttttattgattcaggaggttggaatctctctttttgtagaatctgcgaagagacagccgggattacagatgccccaccatgccccacgtctggctaattttttgtatttttagtagagatagggtttcactgtgttggccaggctggtctcgaactcctgatcttgtgatctgcccgcctcggcctcccaaagtgctgggattataggaatgaggcaccatgcccagcctgggataaacatttttatgggataatctttgtaaatatccatgattatttcttaagattaatttttagaagtttttgtaaatctgaaaatattcacatttttatggcttttgatgcaaattcccaaattgccttctagaatgccttttagaactacacaccttgagtcttatgttcatttttaaccattctttcctttatttttttaattaattaattttttaaaatatggaacgcttcatgaatttgcatgtcatctttgcacagaggccatactaatcttctctgtatcgttccaatttgagtatatgtgctgccgaagtgaccacttaaccattcttttaattgcgttaatgacattggatggcttataaacacaaagaatatagtcatcaactcagaacttggcatctagaaaccacacctatgaagtccctggttaagacccaggaatttaataaaacaagcttttgagctgctaaaagttaatatcacaaaagccatagattaacgcatgcactgtaattataggagacttttcaagttcatactctgaaaacagagtttccttattttaattactttgatttccatatcagactgaaagaggatatggcatctttaatacttaggtagtgacaactgtgaatggtagtggcaaaagaaaagggaaaaatcaaagatgacttgatttcaagaygtggcttgtcttagctaaaagtaataaactggaagtcaaattcaaggaatatagatattttctctgtctcatgattgacagtagctctcttactatttttctgtattttgtatttcaagtcatagattcagatacagtgttactaaacaatttggctaatttatgtgcagtttatgttttgtaagaatttttttcttttttgaaaatctgtgtttatttagagaccaacatggagtgtctgctggacattttatttaattttatttactctctttttttgagactgggtctggctctgttgcccagcctggagtgtagcgacatgatcttggctcactgcaacatctgcctcatgggctcaagccatcctcacacctcagcctcccaagtagctgtgactataggcgcgcaccaccacgcctggctaatttttgtattttttgtagagatggggttttgccatgttgtccagtctggtctcaaactcctgagctcaagtgatccatctacctcagcctcccaaagtgctgggattacaggcatgagctaccatgcctggccatctattatatatatatatatatatwttttttttttttttaagttcttattaggcaaatagtacccaattgttaagaaaataaaaacttgtaactaagtcataaaaaagagagtaaatatccttaataattctgccatctagagataaatattgtcatccttgatacttgtctctgttcttctgttttttatttttctttatttatatcttattttattttttatttattgagacagggtcttgctctgtcacccaggctagagtgcaggggtatagtcatggctcactgcagcctcaaccctctakgctcaagcagtcttcctgcctcagccttcctcgtagctgggactgcatatgtgtgcctggctaatttatttttttttataacgatagagtcttgctatgtggtccaggctggtctcaaactcttccttaagcaatccaacctaggtgcccatcaatcctaggtgttattgggcacctaggttgatgccatgcctttgctgtgtgaatagtgctgcagtgaacatccaagtacatgtgtctttttggtagaaagattattttcttttggatatatacccagttatgggattgctgggtcaaatggtagttctgttttaagttctttgagaaatcttcaaactgctttttagagtggctgaactgatttacatccccaccaacagtgtataaacactcccttttctctgcagcctcaccagcatctgttgttttttcactttttaataataaccattctggctgggcgcggtggctcatgcctgtaatcccagcactttgggaggccgaggcaggcagatcacctgaggtcaggagttcaagaccagcctggccaacatagcgaaatcctatctctactaaaaatactaaaattagctgggcatggtggcgtgggcctataatcccagctacttgggaggctgaggcaggagaattgtttgaacccaggaggtggaggttgctgtgagctgacattgcgccactgcactccagcctgggcaagagagcaagactctctcaaaaaaataaataaataaataaataaataaataaataaataaataaataataataatgatagtagccattctgagtagtgtrggatggtatctcattgtggttttgatttgcatttctctgctgattagtgatgatgagcatttttttcatgcttcttggccacttgtatgacttcttttgagatgtatcttcatgtttttttcccattttttaatggggttgttttttgcttgttcagtttttaagttctgtatagattctgatatcagatctttgtctgatgcatagtttgcaaatattttctcccattctgtaggtgtttcttggttgtctcgcaagattcttacagttttgaggtctgtttttttttttagacgaagtctagctctgtcacccaggctggagtgcagtggcatgatctcagctcactgcaacctctgcctcctgggttcaagtgatttttccttctcagcctcccaagtagctgaaactgcaggcatttgccaccacgcccggcaaatttttttttttttttccatttttgtagaaacagggtttcaccatgttggtcaggctggtcttgaactcctgacctcaggtgatctgcctacctcggccacccaaagtgctgggattacagggcatgagccatagcaccctgctgaggtcttaaatttaaatctttaatccatcttgagttaatctttttatatggtgaaagtgaaggtccagcttcattcttctgcatatggctagctagctatcctagtaccatttattgaataggtagtcctttccccactgcctatttttgttgactttgtcaaagatcagatggctgtaggtatgtggctttatttctgggttctttattctgttccattggtctrtgtgtttgtctttttaccagtaccatgctgttttggttactgtagccttatagtttgaattcaggtaatgtgatgcttccagctttgttctttctgcttagaatttctttggctatttgggctcttttttggttccatatgtattttaaaatatttttttctacttctatgaaaaatgacattggtagtttgatagtaatagcatggaatctatagattgctttggacaatatggccattttaatgatactgatcttccaatccatgagcgtggaatgtttttccatttgtttgtatcatctgtgatttctttgagcagtgtttcatagttctccttgtagagatctttcacctctttggttagatgtatttctaggtattttatttcttttgtggatattgtaaatgggattgaattctttttttttttttcttgatacaaggtctctctttgtcacccaggctggcgtgcagtggtgcagccactgcagcctcgacctctmaggttcaatcaattctcccacctcagcctcctgcgtagctgagtagctggcactacagatgtgtgccaccacgcccagctaattttttttattttttgtagagatggggtttcaccatgttgctcaggctgggggagtctgtgtgtgtgtgtttgtgttaaccaaaataggatcatttgctgattatctactttaaaaacataatttatggaccgggcatggtggctcacgcccgtaatcccagcactttgggaggctgaggcaggaggatcgcttgaacctaggagttcgagaccagcttgggcaacacggtgagacctcatctctacaaagaaaacaaaaaaacaaaaccaaaaaaacccataatttatggtaaacactttttcaagttaacaaatatacttctaactctcattgtaatgcctggtgttctctatcccttagaagccttgatatcatctttgatgagtcaatcttcctcatcctttacttccagctgggtatcaagtccttccattactrcctctggaatatgatatatctgtctgtccctctctgatcccactatttttggcctggctcagctctcctcttttgttttgttttgttttgttttgttttgttttgttttgttttgtgacagagtcttgttctgtctcccaggctggagtgcagtggcatgatctctgctctctgcaacgtctgcctcctggattcaagtgattttcctgcctcagcctcctgagtagttgggattacaggtgcatgccaccatgcccagctaatttttgtatttttagtagagacgtgatttcgccatgttggccaggctggtctcaaactcctgacctcaggtgatccrcctgccttggcctcccaaagtgctgggattataggcatgagccactgcacttggcagctctcctcatttataatctagattgttgaagtttttttcctacctgatttccagtcatctatacctacaatttttctgaactctgattatttatttctgttaggttgcagatgttaaattgaaattcyttatcattttagagtcctctggtagcctctttttaaccttattacctacctatcatttttctttcttccttcttcccttcttctcttcccatgctgggagtgcgatggcgtgatctcggctcactgcaacctccgcctcccasgttcaagcaattcttctgcctcagccccctgagtagctgggattataggcacrtgtcaccacacccggctaatttttgtatttttagtggaggtggggtttcaccatgttggtcaggctggtctcgaactcctgacgtcaggggtgatccgcccacctcagcctcccaaagtgctgggattacaggcgtgagtcaccacacccagccctttcctctgtttctccttctcttctttccttcctctcttccttctctccctctcttctctctccctcctccttcttctgccccctgaaatacttggacttcttttttttctttttcaagataggatatcactctgtcactcaggctggagtgcagtggtgcgatcttggctcactgcaacctccgcctcctgggttcaagctgttctcctgcctcggtctgccaagtagctgggattacaggcacacgccactatgcctggctaattttttgtatttttagtggagactgggtttcaccatgttggccaggctggtctcgaactcctgacctcaggtaatccacccacctcggcctcccaaagtgctgggattacagatgtgagccactgcgcccggccaggacttctttatatattggtattattgcttattcttaccaagtatgccatacattttcattgcttttccctcagtgtggaatgcgtctctactttttgaaattctgtttaatcaccaaccrtagattaaatgccatcttcttttgaagtcctcttcaattggaattaatacctaccttttcggctcttacattgtattttttgtatgtttcatttatattcttccttgtattataatattcctatcttgttcctacatggatatttctttttttgtattttaaagattcacaaattatttaactcattacaatgataatcaccagcaagtagtctttaagaaatattaacattaagctttttctttcaaagaaaatgccaggaacttaccaaatcataaataaaatgttttatctaatgaattttttgttagtataattctaagcaatctctttgttatgattttgccccttttaggctggatcagtgcatgtaagaattcgacgagatgccaatgaacaaatggttcttgctcatgtgaccaacaggctgtacactctagtgtctactctaactgttcaaattttcaaggatgactggattaggcctgccttattgtctgggcctgttgcagccaatgtcctaaacttttcagatcatcacgtaatcccaatgcctcttttaaagggtactgatgatttgaacccagttacatcaactccagctaaacctagtagtccacctccagaattttcatttaacactcctgggaaaaatgtgaacccagttattcttctaaacacacaaacaaggccttatggttttggtctcaatcatggacacacaccttacagcagcatgcttaatcaaggacttggagttccaggaattggagcaactcaaggattgaggactggttttacaaatataccaagtagatatggaactaataatagaattggacaaccaagaccatgatagactctaacttatttttataaggaatattgactccttggcttccaatttatttagtaatccaactttgcattgactgtttaatcatttactctaaatgttagataatagtagtcttgttcacatttcatgaaacctatgaaactatatttttgtaaaatgtatttgtgacagtgaaatcctcgtaaatgttaaaggctttaaataggcttcctttagaaaatgtgtttctttaaatttggattttggtatctttggttttgtagttgactgcagtgtgatgtgaccttacctttataagagccacttgatggagtagatctgtcacattactaagatacgatatttctttttttttccgagacggagtcttgctctgccactgtgcccggccaatacattattattaacttaaggctgtactttattaaggcttccttagtttttgttttgttttgttttttgagatggagtctcactctgtcgcccaggctggaatgcagtggcatgatctcagctcactgcaacctctgcctcctgagttcaaatgattctcctgcctcagcctcccgagtagctgggattacaggcacctgccaccacgcccagctaatttttgtatttttagtaaagacgggggatttcaccatgttggccaggctggtcttgaactcctgacctcatgatccacccaccttagcctcccaaagtgctgggattaggtgtgagccaccgcacctggccgatattttctttaatgaaatttataaatatgcttcttgaataatacacattttgggaaagggaaaaatgtctgttcaaaaagtaaargtctcttttatagcttttccaaacttaattgctaaatttttctttgaggttctcctgaattatgtcttacaaactaaaagcaaaaatttttagcagaaattttggaatacattctatctagcacaatttgaatttttaattatcaagatttttgttaaagtttctctcctttaaaaattttagtacatttgtaaatagtccatggttctcagtgttttattttgattaagtgactacccaacttttggtgatatgcagtgaaagaatcccaattttctatgttacatttaatcaaatactgacataatgaatttatctttcctgacacattttcattcattggctttttaatttcttattttattaacaaaatatatcagatatattaccaaaacacatggagttccatacataatatggaatttgatgtcttttcaagttgcacaaagaatttgagcatatataattttaccaaagcataatggaccttagattatagaatacagcattgttaggtctgcagtgggcagtttctttttgttttgctttgtcaaaaatgggaaattgttaactgtgatgaaatgtgagaattacatagattatgttattttttagttgttttccaaatgcagagtttaaggactttctaacatggctagtattacttccaaaaagtataacaagcagcagtcacacatgacctaggagggttttttattgttttattttattatgcattccataacagttttaaaatgggattttgagaatggacttaactttcctggaatccaatgctcctggagatttatgactttcccagccatcagccagctatctagagaagatttttgtttttcttttgcaacagtttcttcagtcaactcattcactttcaaataggagcagcactttgaaatcctttttcttcactgtggattaaaaacatccaagaagccatctctgtcaagcagaattgtcatctgtggtaataagtgaccatgtcctaaatacctttttcttagtgaggagttggtcattgtctttggcatctgcaacccctgttcaggcatgtgacctgctaaagaaatacagcctacactaycttgactactggggaaaatgatacttcgtaaaatgtaataaggcaacctgttccttggcctttatcttatgttttccaactattactgtatctgttattggtctactattacaggatgattcttcttcctccattgatctcaactaaatrtgaattagggtcatgcatgaaatctgaactgccgtgtcctgagttatggttaagaggtatgtgctgccaccccatgcatgtcttccccatccccataggattttaaagtgttcaggtaccaaacacagttctgtgtgaggttttatgcctacttcctcaacaccaattcagaggcaacacctgtgcatctgtcccamcaaaggtgctttaatacctaccttcactatttgagaaaggacactcacagttgcctgtgggttatgaaagaattggccctacgtcctgcatgtaagatgttacaggggacattgggccaggcattattatatagagaagtcttatttgccaagctctgactaacttctggatatgaaaataaggaacttgcccagcataggcctataggcagcagccttactagtaaatcttgccacagaatcacttgaagctagacagagaaagaagttcaatttaaatatttgtcccattgtttgtgattaggatgtaagctttgtggaatgtaattaaccctgctttacgaagtcaccatattataataggaaaaacactgcctaggaggcaagagatctgaattccagttctgatgctgccactgtgtaaggaagtagttttataacccatgggcaaatcatctgagctttctcatctgtaaagttagggagaggaattaattagttgatctgtaaaataatcagcttcaaaacgttatggctaaatctgtagaatgtatgcccaattgctaaacggatgttgtgcccagaattttatctagtgactacctcaacatacaggccaagcgttacctacaccaacacccaagccattaatttgaggtgccatgagaataggtgaaccacagcctaacaccatttaggtttttgtgtttttttcaggcttgcctctacttaaatatatttagatgagagagttctcttagacttctttctttgtaaggaagggttatttggggaagtgttggaaaaaagattagggcagggtacccttagtttatatagggtacaaaagaatgggaaacatcttccctttcttctttaatctctgaagtcatgtttggaattacatataatgtagcaggtactggagaggacctgaatttcaagcttctgatttagctgtttgtaaacttccaagttttgcttgactaaagaatgctgatcttttttgggagtctgatctccttctaatatcagaaagtgctttttatattccagattgcttgaattaaactgtttggattaaagaacatatatggagtttcctctctggttttaaataatctttctttattcagtagctattaataatttatctcatattcagcgaatatttattgagaatattgttgagaatctcttacatgccaggcactatactaagttaatatgcattcagtataccagttggtgtgacccagaccaaaggtaacacaaagatgaatgagaattccttcaaggcgccgataatcctagtaggagagctaagacacaaaactgttgcatgtttttaatcatcaaattaaacttctttccacgtccttatcttctttggcatccttttgcaagattttttttaactaccaggcttaaaataatgaggtcccagagcacttactggcttcgagtacactttatttaagcagttactagtttaaaagcacctgtaataacactgagatcatcatcatcaaattgccacccaacaagcctagcttcttgcagaaaagttaacttggataacacttggctaagttttctgactaatgctggatcaggtagaaattctttagtactaaagtcaaaaaacactaattgcttaagattctcaaatacacccatgaaggcaagccatccatcactgctcacacgatttcccgccaaattcaactgctggaagtttttcagagggttctttccaaaaaatgcacctgggtaaagaaataagtatattagttggaagaaaaatttttttaaaaaaaaagagaaataggttctacatttattttacatacttttttttcactctgaaatggccatgtttgaaccagtgctttgcctcagaaagaaattattaatataattctctatagctagggcagtgattgtgaatatggtctattatattttcctagagtataagggaatctgataaatagtgattcgtagtgaggtagcaacaatatgtaaatgaattacttttttttccccttttccttactcctaggaaatggaaggttgctttaattaaatattcagtacttgttttcaaaactggagtcaatctttggcaatattaagtcgtttcctcttctgaaaaagtaaacaccacctaactgttgtttctatgggtatgttcctaactgtaaacttgagtaagtgagcctccttcagtatctaaagatttgggtgtttttgtttacctgtttatgtataaccctcctgagcctcttcaggaagttcctccattccttacagaatagggcacctaaagtatttcctacatagggtaggtggatatcctgtctttctgatacacaaagaatgcacacacacacacatacatacaaaggatgtgtgtgtgtgtgtgtgtgtgtgtgtctgtgtgtatacatacacaaatagtttagtgttcattctttatcccatgttaccagtttaggtggtactggaacccaagtgagtcttgcaataagaaaaaatacctttctttcaggttatttaccatcatacagattggccagtatacaacattaggatttcacaaaactagctctgtgttaattacacatattaaattgtgcaaagcgttagccctacccacctacctggccctttctggatgactaagttcaccttgaagtacagagtggacagacaggcagactggacatgggaactcttacttacatgtttatactccagagtatcacacacaaaatgcagaagatgtatgcctggtttatcaatccacattactcggctcatccgagctcatcttagtcttagtgtacctcacccaactttggagggttaatttgttgtatattaaacttgtgtttcttgggagatgtgtaatattagataatgttccagaaactgacccttatggaaatgaaggtccatgattcagtttggattccaagtaggaaaagaggttttaaaagttcctttccattgtctcagtgagaagaccactaaagagttcaagttaaagaaggaaaggttcggtgctgtacaatcttaaggttagcaagcaaagactaaaaggtatctgctaccagtaatgagggcttaatgacagaaatggacagtcttgtccgaccagcttacgtgggtgaggtcaacctagttatgcactgaaactatacccttacccactttcagtaaaggtgtttaccagctccgtagtgagaggagatctgtgaatttggtgtctgatgtcactgcatggccttgtgtagtttgttcagtgcaactaagtacattctagagtgtgtccttagtcaatgtcagccaatgcttttatcaccatcataaggtcttgagtttcgaaaggtcttcaggttcttctttacagacacctaaagtgattggccctgcctgaccgtggtcaagatgctagcggctaaagtgggcaaagccaggtaaggagatgattcacagggttctgccttcatgtctcttacccatggtcagtgtcactgacaccatctttgggccttctttgccacttttattaatttgaaaagtgagacagaggccgggtgcggtggctcatgcctataatcccagcactttgggaggccaaggcgggcagatcacctgaggtcaggagtttgagaccagcctgaccaacatggagaaaccccgtctctagtaaaaatacagaattagccaggcgtggtggtgcatgcctgtaatcccagctattcgggaggctgaggcaggaggatcacttgaacccaggaggcagaggttgcggtgagcagagatcacaccattgcactccagcctgggtaacgagtgaaactccatttcaaaaaaaaaaagagaagaaaagtgagacagactgctagttgttcccaaaactgtctctccttattccatagttaatagagttttatttcggcatatggccactcatatcccaacctcccttgctattaggtgtggctaaatttttgccaaggaagtataggcagaagtgatgtgtgcaacttccatgtcacttttccgcttttcccctcttctactaggttgaaatgatcacagggcagtgacctagctatggccataaagtcaaaaataacactcttaaggaatagaggagtaaaaaaaaaaaagtaggggtctgggcctgaaagactgcacagaggaaaaccaccccacctgcctggactgctcatttctggactgttacatgatagagaatcaagttctgccttctgtaagccatggtatagttgggtctctgttatcacagcgtagcctatgcccagcccaaatagtacctaggtccttactttcccctgccttccacctcctctgttccttggaggatggctttctccctgctctctcttccatctcatgttcatgtcctttctgcctttgccccttctccatatgcttcccagcatggcatgcactcagtccaaatgctggttgccagttgtgtgtctatttaaggctctttccccaaagatcaactttttttctccttctcagctagcagaacatattttcaccacctaaaaggaatttaagaagaatttaaagcccattccaccctcacagggtgagcaatttatagtggttatctactaaggtataaggatcttatcatcaatttaagagagtttcttagataattattggaatgtgtgctagtgcaggaaccaagaacaaacaacatttgtcataagccaagggcatgccttttgttcatttaatctgcagtgcttatgttatgaggagcagactagatccaagagaaacagaatccatgacatttagagccataggctgtatgtgggctgtggagagtgcaaatggcttgattggaattccaggaaaaatctcagatgccctgggtagaagggttctgattcttgggggttcctgtatcccaaacacaactcttcatttgtgttgtcctgtagttcacctgaacgagtaccagagttctcactgtttattcattcagcaacatctttagtgctactatgtgctgcggattatgctgggtgctggggatatgtgtaaacgacagacatggtccctgtctaaatgggcttacaaaatagtgtgaagacatgcattataaagtaattagatgggtggtgggtgctatggtaggtcagggtaccctgggagcacacaaaagcaataggctttcccactccactttgttcccagaacacttgcaattgggcttatatgctccaggaggaagactggaggattcttaggagaaatggaactgccccccgggaaaaggccctacaaagaaggggccattttgcttgcccaatcaccccctagtggagttagcctgtcaaaaattcaccgcctcccttagacacacagaactccctatcaacttgtgtctccctctaaaatgtgaagaggacagtgcaggattatcagacatttgacaacagcctcccacaaggaagactgagactaaaagccaaaacaactcccaaagaaatcaggcactgtagaaaacaagaaaaatcaaactccaaagacctaagtttttcagagatcctaagtttttcagtagactgcatctactcagcaacaataagatgctaagaaagagcttttggaaaataaaatatgatagcgggatctatacagcagaatgattgggcccaggatttaacacagagcttctagaacatgaatagggtctgcgatggctttttttttttctttttttgagacaggttctggctctgttgcccaggagtgcagtggtgcaatctcagctcactgcaatctgccccactggctcaagtaagtgatcctgccaactcagcttcccgtatagctgggattataagtatgtgcactacgcccagctaatttttgtatttttagtagagacagggtttcaccatgttggccaggctggttttgaactcctgacctcaagtgatacacccaccttggcctcacgaagtgctgggattacaggcatgagctctctttgagaacaggctggatagcagagttcagcttcaaacatccaagttgaaagataccatttaacaaagggttttgttagagcaggtgaaattggtcaggcatggtggctcatgcctgtaagcccagcactttgggaggctgaagcaggcagatcacttgaggtcgggagtttgagaccagcctggccaacatgatgaaacctcgtctctactaaaaatacaaaaattagctgggcatagtgcacacacttataatggcacatacttatagtggcggcatggaccggtaatcccagctactggggaggctgaggcaggagaatcacttgagattcagagaagcgaatagagaacagagaatcccaggaagcggaggttgcagtgagccaagatcgcaccactgcactgcagcctggaacaaaacaaacaaaaaaacaggtgaaatagatacctgagctagcaatgatttttatgttgtagtctcagattgctgatgggtaagaaacaaaattttgggagtcaagcaaaacatggcaaagcttggagatcaaatgcaatctctgaggaagaacagcagatagtctagaccaagctttaaggaaaactagaaacatttaatatctgggtagaggaatcaccattgaaaagaagactgagaagtagccaaggtggcatggaggtcaagagaatgttttgaaaagaagggaatgctcagtgtcaactcctgcggaggaatcaaataaattaaacacttctgaaagtgtctattgaaattcagccacatggaggggtgtggagagtcagatgcaatgagtagaaagtagcagatggtcaggaaatggagatgtcataagggtacataaaatttgttttagagcttttaccttgaaggagaggagagatagaatgataaccaaaggaggaagataggactcagggagagttttatttaaaatggaagagatttgagcaactttaaaaactgacaggagggagtcagtaacaagaggcacagtcaataaaatgatgtccctgaactggagtga

SEQ ID NO: 97745 - DNA, 58001 bp, Homo sapiens
  misc_feature (1)...(58001): n = A,T,C or G
atgtctttgtttcttttaatggcatcacccttaattccagtgagtcaaccccgaaacctgagtcatttctgactccaccctctccttgcctcccatgtgcccagtctcgttgatctatcacccatcctctctcttccattctcattgcacttagcttggttcagtgccctgcattcacgatctccttctgctgatttgttttgcatgctgccatcagattgtgtattctaaagctattgtcatgtgactgttggtcaaaaactatacttggctctctattgccaattactgattttcttaaatattgaagacgttctatgatctagcttggtggttcacacatacaacaggccttggcagaataatctagaaaacttgccaataatagagattctaaagccacaccccaaatctactgaatcacactttttttttttttgagatggagtcttgctgtgtcacccaggctggagtgcattggcgcgatctcagctcactgtaatgcctcccaggttcaagcgattctcctgccccagcctcctgagtagctgggattacaggcgtgcaccaccatgcctggctaatttttgtatttttagtagagatggggtttcaccatgttggccaggttggtcttgaactactgacctcaggtgatccaccctcttcggcctcccaaagtgctgggattacaggcatgagccactgagcccataatcacttttggaatctattcaaacttccaaactgattctgatatgcagatagctggagtactcattgatcagggcctgatcaacccttctaattatgctcctgccaaaattgacttctcataaagtgttctctctacttacttcactatttcccttctcctgccctttttttatactttctttgctctcaccccagttattaacctctgtaagtcccattttgtcttacattcaagacccaactaaaatgtcttatttctttcagtcttataggaacatgtagttaaaagtttgacttctaaattcatgttgcatttgacccgtacctctcttttgatacttatgccaagtggtaagcaaccagttttctgtgcacagtctttctcgtgcacttggatcgtgtatacagttcttggactatagtaggcacttgagaaatgattcagtgaacaaaagacaaatcccggttcttcctctttcaggtcatttctactctccccatattccacaaaaatgtcttccactacttgatggcgtttttgcgagaactgctgaaaaattcagcaaaaaatcatttggatgagaatattctaggtaagcagccaaatgtctatggaaagcatttctgcaaactgagagactcgtaatgagaaatgaggttgaggagggtcccaggtcccttgcagtagaactaaaatatcaagctctgggcaaagattttttaaagcagaaagttttgcgtttggacactcctccccactcctaacaacacaagagtaagtatagtcatgggctgggggcggtggctcacacctgtagtcctagcactttgtgaggctcaggtggacggatcacctgaggtcaggagttcaagaccagcctggccaacatggtgaaaccccatctctactaaaaatacaaaaattagctgagtgtggtggtgcatgcctgtaatcccagctaaacgggaggctgagttaggagaatcgcttgaaactgggaggcggaggctgcagtgacccgagaccgcaccactgcactccagcctgggcgacagagtgagactccatctcaaaaaaaaaaaaaaaagtatagtcatgtaccatataacatcttggtcaacgaaagaccacatatacgatggagggcccataagattataataccgtggttttgtgcgtgtgtgtttgtgtgtgcatgtgtgtgtgtgtgtgtgcttgagaaagtctcactctgtcacccaggctggagtgcagtggtgtgatctcagctcactgcaacctctgcctcctgggttcaagtgattcttgtgcctcggcctcctgagtagctgggattataggcgcttgccactatgcccagctttttaatttaatttaatttaattttttagagatggagtctcgctctgtcgccaggctggagtgcagtggcgtgatctcagctcactgcatcctccgccacccgggttcaagcaattctcctgcctcagcctcccgagtagctgggactacaggcgcgcaccaccatgcccagctaatttttgtatttttattagagacagggttttaccatgttggccaggatggtctcaatctcttgacctcgtgattccacccgcctcggcctcccaaagtgctgggattacaggcctgagccaccgcaccctgccttttttttttttttttttttaaagggcagtgaccctccccactgcaggatgggagagggctgggagccagtgggagccagatggtcacccaggccctcacagccaacccttggacaggggccaccgggccacaccctccaacgcccgtgcctcaaccatccctaccacgctcatggaacctcatcgcatcctggggacgagcccccactggggacacggggtggttgggggaggaggcaggaaccagagaggcaggacaccaagcagggctgcctcccccacaaccccccaacctcagccacctctgacacagcaccattccccttggaaagcccactggcagggacaggctaatttttgttatttttagtagagatggggttttaccatgttggcctagctggtcttgaactcctggcctctagtgatctgcccgctttggcttcccaaagtgctgggattataggtgtgagccaccacacccagctcataataccgtatttttgatgtgcctttcctatgtttagatatatttggatgcacaaatacttagcactgtgttacaattgcctgtagtattcagtatagtaacatgctgtacaggagcttaggagcaatagactataccatctagaattgtgtaagtacaggtttgtgaaagtttaagtacacgctatgatgtttgcacaatgatgaaatcacctaatgacacatttctcagaacatatccctgtcgttaagtgatgtgtgtctttagtaccttcttttgctgaatcatttcttttctgtgttttttcttgcagctagcatatttggcagcttattgcttcgaaacccagctggtcaccaaaagcttgatatgacagagaagaagaaggctcaagaatttattcaccagttcctctgcaacccactctgagcctatctctcctcctattttacttgaggctgccaattaccagccccacctgtttcagctcaagagatgccttaagataattatgtgaggccacttggtagcaagaatggcagctatttcctgagcctagtaccccaattaagcccaccattggttagcacactcagcgctgtgagtcgtgaagacacgggagaaaatccaccataataaaactgacattcaattttcaactttagttatttaacacagatttttttattttttatttttttttattttgagacggagttttgctctgtcgcgcagggtggagtgcggtggcacgatctcggctcactgcaacctctgcctcctgggtgcaagcaattatcctgcctcagcctcccgagtagctgggactacaggcacacactgccacgcccagctaattttttgcattttagtagagacggggtttcaccgtgttgcccaggctgttctaaaactcctgaactcaggtaatctgcctgcctcggcctccccaagtgctaggattacaggtgtgagccaccacgcccggccttttttttttttttttcttttttgagatggagtttcactctcgttgcccaggctggagtgcgttggcgtggtcttggctcactgcaacctctgcctccttggttcaagcaattctcctgcctcagcctctcgagtagctgggattataggcgtccgccaccatgcctggctaatttttttgtgtgtttttagtatagacacggtttcaccatgttggccaggctggtctcgaatgcctggcctcaggtgatccacctgccttggcctcccaaagtgctgggattacaggcatgaaccaccacgcctggcctaaaatgtttttaaataactgtacttgtactcactcaccctacctccagggcatagtcagtctgggctgagatccccatgatcagatatttgatggaaagtcctgaaaggccaatgagttggatggcaagaatgcaggcagaagctgctggataaaataggctacagccacctcagatgctttcagtgctctgtctgaggatgtgtatatgcatatgcaaactcgacccccgttcctgcccagataatggctcaataactctgaggctggttgctcagcctctgagggcaatacaggcatttaaaaaattaaaatgaccaggcacagtggctcacgcctgtaatctcggcactttgggagactgaggtgggagcatcacttgagaccaggagtttgggaccaggctgggcaacacagggagaccccctctctacaaaaacatttttaaaaaattagctgggcgtggtgatgcatgcctgtggtcccagttacttgggaggctgacgtgggtggctcacttgagcacaggagtttgaggctgcagtgacctatgaccacatcactgtacgccagcccgggtgagagagggagaccccgtctctaaaaataaaatgtaaaatcactgaaaaaatgagtgttcggtgaaacaagtgggattttctgggccagcaagtcttccaaactgtatatgatgcatcctgtctccatgtgtaatatattttaatgataaatgtatttttaacagtggcggttgtgtatgtttttatgtcttaagagatggcagttcgctgcagctggattttgtggctcaagccttggggccaaagagacatattcctggcagtctggtgggtaccagtcactattcacatacttccagcaagaaatggttatggcactgacctgaaccccttgacccctggtctggtctttggagttgtcccactctgaatattcgagagaagcagcttatggttaaaacaggcagtggcagctgggaggatctaacagctagatcctccaggcatttggaaaggacaggggcataacgaaggcagaatcgcttcctgggtacgaatgcccactacttctgggcactgtgaaatgggtttaagacgcgggccagcaggacaatgtgaacggtgaaaggaagggagtggccggtaggtggcgctaactggcccgggcatgagtcccgccgtagccgcgtcctcttgcaggggaagaaagttgggaccgccagcctgggcaagcgcgtgagaagggagctgggggtcctaggcaagcgcgtgagaaggggaagaggcggcggcgtcctctccagctgggcttagaatactcttagttctgcctttggggtcttgtcttcctttctgggcctcctgcctgtgttaactttgatgggtgctgaagggaaggccggggtcccggcaggagaaacccgggaacgtcgcggccgtccaggctcccctggcgggttggagccagggttctgactgccaactgtggtccttcccgctgcggctgtggctgccagggcgagggcggtcagcgcaaacctggctgaggacatttcggattcttccttggggattcgttcccttctccttgactccggtgccgcgagggcgacaccctccgggccccgcgtggccaccccgggcgcttccccacgcggatgaacccacctcctgggcgccttcccctcggtgccccgctcgccaattggaggctgcagctcagccccctgacaacctgagccaaccagaggcgccagggaggggcggatcctctgtccccaccttcctccggaaagaggaagcggaagtgacgttaggggaaggtgggggcaatcatggtgccgctggggaggggagaagctgctgctgccgccgttgccgggagccgcggaggtaaaaggcgaaactagactcggcctgggcttgggacttaccgggaggcgcgggacttaggctccctcctgaagcatttcccaatagagacctcagtttggtcacyatagggaccccaccccttctccgtttccatggggatgggtatccagccccccttccctgtttccatggagacccggaccctgcccctctcctccttgcttggagacccccagcttgtcttcggatttttctgtgtagccctgtgctgggggctatcccagacaggttccttttcccagcctcctctcaagggggctctgttcgcactcctcgttggctaccctcaaasctcctggtcttgtttgtttcggacagttggtctccgcgttgccgccgagggtgccggggcagcccactggggccctcggtgctcttctctctctgctcagatgcagcgaaatgtacatctgtggggttgcgtaagccagagctaggggtcgggccggtacctcccggatccaatcctttggcctgtctctggtaactgtctagccatcccactaagtaaaggctcactttctaacccagagcagaagagaaagataaagcgcaaagccagactgaaaactaaaagggatgtgctgattattttaaaattctctattctrcctgccaaacccacatttgtagagcctgtgtttgcagatgaaggaagaatcactattccagaacatgaaagcttcaaatgtggtatttttctcaagagaatgtatcttcccaagatagtatatcttcacgagagagtaggtagccatgtctttcagtcatttagctgacatttcctgaactcttatcatagtatcagtgtactatgctaggagctgtagaaacaaaaataataagactcaattgattcagggacgagagcccaccacagaaccataacttcttgttgacaccatattgttttaggacataaatagatacagtgatcttcgttgtttgtgcctgattgaggaatagcccttccacccagaaggttgaaacatctgttctaggtaggggggaaggaattcatacttgttcctctactatttaccaaacattgtgctttacatatgttgcctcttttatttcttataaaaactttgagagaacaggaattactggtcccaccttgcacgtaagaaaaatgaggcacagaaaagttacccatgtagtaaaaggcaaagacaggatttgtaggtagatgactctgcctccaaagccttgctccttctaccataaactgcatgaaaccatttactgcctcgtggtctgatttggaggatatttgaatggatggagtttcccttaagatttgtagcaactcagcctttcagcagctgctgttctgtttgctcttttgtcccctttaaatattttgaccaagtttcaaattgtttgacaggcgtattcagaaggtcttatgaacttattcagtttttgaaaagcattgcttttctttctttttcttttttttttttttttattagagatgggggtctcactatgttgaccaggctgatctcaaactcctggcctcaagcgatcctcccatcttagcctcccaaagtgttgggattacaggtgtgagccaccacgcccagtcggcattgcttttcwttaaaaatgacttgatggttttaaagttaaaataaaaaaattattcccaaggatggtttttcatttgctttggcttgctctttamgtgagagggaaaatgagccttgtggttgctgaggaggtccgtcggtcttgtggtatgactctaactctggctttgttctgttgcagacaagtcattacgttttcatttctcacaactgggctgagcacaactgaaccatgggggaacacagtccagacaacaacatcatctactttgaggcagaggaagatgagctgacccccgatgataaaatgctcaggtttgtggataaaaacggactggtgccttcctcatctggaactgtttatgataggaccactgttcttattgagcaggaccctggcactttggaggatgaagatgacgacggacagtgcggagaacacttgccttttctagtagggggtgaagagggctttcacctgatagatcatgaagcaatgtcccagggttatgtgcagcacattatctcaccagatcagattcatttgacaataaaccctggttccacacccatgccaagaaatattgaaggtgcaaccctcactctgcagtcggaatgtccggaaacaaaacgtaaagaagtaagtaaagcagtcagtgagggcctagtttggttttggggcaagtccttacaaaattcttggtgcaaattttagctggggagtaaaggagtgcatggggttaggacttaagtagttttgctatcaacaacatatgcctcaggttttgttgtgattgcttctggaacttttggtttgtatagccacattgaaatttgggaatatcaaattgtaatttctcgaatttccttccccaaatcataaataaaacagaaatttcacttaagtagacccatgtttctggtgctaaaataactatttagcttatctacagggaaataactggagtttgcttatttgatgaagaaataactatatttggcttatctcctggttgtgtttaaatgatttgttttagagatgagtatctgctggaatatgttttattatcttagtgaatgtttaatgaacttttatttcacagtggcacacgcctgtaatcccagcactttgggaggctgaggcgggtggatcatttgaggtcaggagttcgagagcagcctggccaacatggtgaaaccctgtctctgctaaaaatacaaaaattagccaggcttggtggcacatggctgtaatcccagctactcaggaggctgaggcaggagaatcacttggacccgggaggcagaggttgcagtgagccgagatcatgccactgtactccagcctgggcgatagagtgagactccatctaaaaaaaaaaaaaaaaaaagaaagaaattcaggctgggcacagtggctcatgcctgtaatcctaacactttctgtaatcccagcactttgggaggccgaggcaggtggatcacctgaggttaagagcaccctggccaacatggtgaaactccatctgtactaaaaatagaaaaattagccaggcatagtggcgggtgcctgtaatcccagctatttgggaagctgaggcaggggaattacttgaatctgggaggtggaggtggcagggagccaagatcgtgccactgcactccaggctggatgagagagagagactcagtctcaaaaaaaaaaaaaaaaaaaaaaaaaggaaattcaggcaagagacagtaaatgagagcaggttatctaaaataagttttcattttcatgtttagctaatgtgagtaagctaatgcatgtcaggatgttttgaaaactgtaaagcattttacaaattatattagtggttattattagcagaataaaagttctggtttaaaggtagtgatatacattatctaggaactatttttttttttgagatggagtttcactcttgttgcctaagctggagtgcagtggtgcgatcttggctcactgcaacctctgcctcctgggttctagcaattctcctgcctcagcctcctgagtagctgggattacaggcacgcaccaccatgcccagctaattttttgaatttttagtagaaatgaggtttcaccatgttagccaggctggtctcgaactcttgacctcaggtgatccacctgccttggccttccaaagtgctgggattacaggcatgaaccaccatgcccggcccatccaggaactattacaggtcaattagaaaaaaataagtcactagtagttacagtaccaaggactaagatgttaccaaacagaaatagggtgaatgatttagcaaggaatatcttttttgctgtggttgaggtcttaaaattgcatatggcttattgatggcatatcacttttcctttgctagccttagagagaccatcttgtcccacctcctaccctatgcagaaatctccctatggcatccctgacatcagttaatcttgtttctgcttgaagacatccagaacaacaagagcagagtgtttcataccccaacccaatacatttgttagccagctctgattgttagaaagcttttacttgtatagaaccaaaacctgcctttctgcaggtgctgcccactggttctagatctgccttcctgagtaaactttctcccacagaacagtccatcagctatttgaagatcatggatttttcttcctcttgtacaggctaaccacctccatttacttaaatgtccctctgtgacattttccccagtctctcatcagcctagtcacctttgattatatgaattccagttttccaaggtcctttttttcttctttttttgagatggagttttgctgttgttgcccaggctggagtgcagtggcgtgatcccggctcactgcaacctccgcctcccaggttcaagcgattctcctgcctcagcctcccaagtagctgggattacaggcatgcgctaccacacccagctaattttgtatttttagtagagacagggtttctccatgttggtcaggctgatctcgaactcctgacctcaggggatatgcctgccttggcctcccaaagtgctgggattacaggcatgagccaccgcgcccggccccagagtccttttaaaatctgcagttgagcgcagtctcataagtgtgagtcaactagcactgaatacagtatggctcttatctcttaatctggacactgtactacaattactatatagtctacattttatcagcaacatcttactgttagcttatagttggaaatttctagagtagtgcttcttaactgcgggcagctttgccctcaggagatgtttggcaatgtctagaaacattttgtattgtcatactgtggaggcgatactggaatctagtgggtagaggttaaagacattgttaaatgttttacagtgcacaggacagccccctacaacaaagaactggcccaaaatagtgatagtgctgggattgagaaaccctgctctagattattctcatgtatgcagctgtcagatctaacaaaaatgaaaatggagacctgcatgtaagccttattaagaatatctcccggctggacatggtggctcacgcctgtaatcccaacactttgggaggccaaggctggtggatcacctgaggtcaggagttcgagactagcctggccaacacaatgaaaccctgtgtctattaaaaatacaaaaaattagccgggcgtggtggcagacgcctgtaatcccagctactctggagactgaggcaggggaattgcttgaacccgggaggtggaggttgcaatgagccaagatggtgccactgcactccagcctgggcaacaagagcaaaactccatctcaaaaaataaaaaataaaaatatctccctatgaaattttatcttgttggtttcagtccaatatttgagcttgtaggggggttcatttcaactcaacaaacatttataaagcaaaatgctgttatgctctgtggatgttgcaaatgattgtggtagtcgatttatagcatagaagcagaaattgtttacaccaataatcatagcagcaaacacagtgtggtaaatgtgaaggagaggtacaaatattgcactgtgagcacagggaagctcacccttaattctgggatcagggaagtctttgtgaaaaaggtggcgtttgagctggtcttaaagaatacatacaatttaggaaaaaagcaggagaaggtttttccaagagagaggaacagcatgaaacaaggaatgcaggtgggaaacaggccattttcagggaatagccagttgtcctgttacaacagagtcagcacacttttttctgcttagggctaaatagtaaatattctgggctttgcaggctataaggtctctgttggagctactccattcttccattgtagcacaaaagcagccatagacaatacataaagaatgaacatggccaagttctgataagactttacaaaaacaggcagtggggtggatttggttcactggctgtagtgtgctgacccttagactagaacatagtagtagaaggagataaggatggaaagatagcaaagatccaaacatggaaggcagtggtaaccttctatgggttttgaactgtgctctcctagaaatggtgggaaaccattggaggtgtctaagccaaggctagagtggttagatagagaatgtggttagagtagcattttagaaggattggtctggcagcagaggtagcttggaggcagaggaaaactggagacttcttgcctagttaggagacagttgtagtttatgtttggggtttcatttaaatctgaagaaaggatagtggccttgttcatgggaagaatcaaggacttttgtagaagtacgagagaacttcgtacgtgttattggagtttgatgaatgagccatgagttgggcatgattcaaaggttttgaataggccaggcacagtggctcatgcctgtaatcccagcactttcggaggcagaggcaggtggatcagttgaggtctggagctctagaccagcctggccaacatggtgaaaccctgtctctactaaaaatacaaaaattagccggttgtggtggtgcatgcctgtagtcccagccacttgggaggctgaggcaggagaatcacttgaacccagagggcggagggtgcagtgagccatgattgtgccactgcattccagcctgggcaacaaaatgagaatctggttggaaaaaaaaaaaaaggttttgaatcatgttgattgaaaggattcatccattttcccaaatttgttgagtttctgctgtgtcttagcacagctttttgatggagctcaaatctaggtgaagagttaagcagttaagagtccgttgtggtagatattttaacagaggtgtattcgaagtgctgtgtgcatgctgaggagaaagtggctaactctgctctccgcaccctccaaatggtgatcccattcataggaatcaagaaagatgggaaaaggaaaaagttttgatggggtaattaatgagtttggtaggagtgtattgaatgtatagtccttggagaaaagtaacatgaacaaatggaaagctcattggaaacgtgtatctgaggtcaaagaaatggtttggagttagaatagtagtagaaaggggccttcaaactgtgggtagtttacttaagggagaagtaagagttggcctgagaatttaagggttggaaagagaaagaggaacccaagaagatcacagtagtcaaagagatgggtcgactgcagtgttgtggaagctgaaggaagagagtgtcaacaaatgagaatattcctgtgtgaccctgcagagggattgaggagccccgaagaagcctttagttgtgctggttgtgcagttgttcacatatcatgagaagacttgcagcagagcactggggctgaagccaggttttgagtgatgaagaagtgagtgagtgatgaggaaacaggaggcaggaaatgtcaagttggcttttttttttttttttaaataagtttggtagttagaggaagaagagtgatgaggcagtagtagctagctcaaggagattgaatcatttttgtttagcataggtaatttggacatagtttaggacctaaactttaggccatcctccatcagtgattactgtgtgaaagtgtttcatgagcgaatgttcgggaaacattaagttaaaccaagacagaaatttgttgattaggacttctcagagcctttgatgtgccaacagctaagaaggaagaaaacacagaatttttcaaatgctttaaacttgagaaaccatttttcagatctaatttccagggatcagtgttttgtggaacacattttgggaaatgctgatctaggcagaagaggaggagatggtacagagggaatgattatgcaatcagtgaaaagctgtcacttttccactttgtactattcaaattggtttattctatttgcaagtctggtttgccattcttgtcttcagatcattgataatcatattgaatagcacagggtcaaggatattatgagcactttgttcagtttgctggggatttagctcactccactttcctctcacccacatttttccatgctatccatgagacctttgtggaagatgctatattcttgaaatcagtaggtttggggttgggtggagattgaaggagaagtagcagtagctttagtcttcgaaaatcttgcttaatgaccagacattcaggaggcttgccttcctgaagcactgtcttagcttagcttttgttttggcagtgattttattttggcattaaaatccacttatttggcctgaagaggctgatgtttatgactactcgataacagacttcatgatcctttagctcttccttactccttttcctttcgttttttttcagcttggtttttggttttttcttttccctccatgcacaggtgttactcttgagaaatcaaatcatttgataactagttggtcttcttggcttcccaagcagcttattttctgagtcacattttagcctgaatttcctgtttactcctggttttttcattgtttcatatagtgtggagttggcttacctattacttcattttcttttcttcatgcttgtcttgcgcaaaaaataaaccaaccagaaccttgccacagatagtcttttcctaccacaaggccgctggtcattctgactcgaatttcacgtatcttattctcatacttgttatttcattactgtctccctactgatttggtagctttgagatctctctctctctctctctctctttctctctcccttttttttctctttctctctctcattcccttcctccctcccttccttccttcttttccctttctgtctttcttctttcctttctctcttgaaacagggtctcactgtgtcacacaggttggagtgattacagtggtgggatcgtagctcactgtaacctcaaactcctgggctcaagcaatcctcctgcctcgacctcccaaagtgctgggattataggcatgagccatggcacttggccagcttgcaaaatttctaatcaaaatattttcattctgcctaaaaacaaaagctttttttttttttttttttttggttgagacagggttccattctgtagccaggctggagtacagtggcacgatcatggctcactgcagccttaacctcccaggctcaagccgtcctgccacctcagcctccacagtagctgggaccacaggcatgtgctactgtgccggctactttttggtggttgttttggtagagaggggtctcactatgggctggttccaaaatcctgggctcacgcaatccttccaccttggcctcccaaagtattgtgattaccggcatgagccaccatgtctggccctttaaggcctttctactccaagtctcgaagcagctgcgtcttgttgtttgtttgtttgtttacgtattttattttatttttttaagacactgggtcttgctatgtttgcccaggccatcatcatagctcactgtaacctggaacttctggcctcaaccaattctccctccttagcctcctgagctgctgggattaaaggcatgagctaccacacctggcaactgtgttttctttagttggtttgtgcagtccattcttgaatctgtgcccttccatagaacctgccaggacggtctagttacctgttcatctacctctgtctgcactacattggtgacgtgatgtatcctccatggctaactgaccttgccagttttctatagagtagttggccaaggagcatgaaaaaaccctaggaatcgtatgcaaaatttattctacatgatgcaccaaagtattccagcacattgattaggaaaggtatcattttctaccaacaagcacagttacagcaatttttttttttttttaattgaggtgaaggcttgctctgttgcccaggctggagtacagtggcacgatcttggctcactgcaacctccgcctccagggttcaagagattctcctgtctcagcctcccgagtagccaggattacaggcatgtgccactaggcctggctaaattttgtatttttagtagagatggggtttcaccatattggtcaggctggtcttgaactcctgacctcaggtgatccacccgccttggcctcccacagtgctgggattacaggtgtgagctgctgcgcctggcctacagcaatgtttttaggctgcttggtatattgcttctagacacaccatgaactaattgcatggccagtggcattccaagaggagagttatttcttttagtgtgacagattttaagtataacaggaaaaatctgactccagtgttttggagcctttttgcaatgtatgtcctttactttgggagacctagttccaatctcatgcctcattataaattcctcaggcagtggaatgatccactcagacaaaccaagatgttgttgactctcctagaggggaactaccgactttttagtctttgcatactgtgattacatttctttgcaggttcccttctgaactctgatggcttgtaagtgtgaggctctgtaggaatccagagcaagaagcattttccatttacccccatatgaagccattttatcagtgtgtctgcatgtgtattatatacctctccttagtaatcagcatttccatcactcaggtccactggcctggaaaagggactagactggttttgtgtacaattgggtttcaaacttggtgctataggaattataggtctcgatttacatttcacataggttgtacatattaagtactgccaacattttgctgttatatgacattggcaaaagaacctgaattttatttttttctcctcatatttaaatcaggcttacttgtttcttctgtgatgtgcaaagggatagtttcaacctaggttccagctttgttctgttatgtactagctatgtggccttgggcaagctgctctgtttccttttttataaaattgaaatagaaatatcccattgcattttgtgaagattaaatgagatttattcatatgtaatatgtataaaacatttagcatagtgtctggtgcatcatgattgttcgctggatgttcatttgctttcttttcctcatagacccccatggttcttgaaggaggtaaagaggtaatgtccagtttaacaagaggttaaaatgttctttgttaggcactctttgggaggtgttttctccttgagacaagcttacatataaattgtgattaggttccaggatagcccatagaaatcttggtaacccctaattagctgaactgttgtattaatactgccatggaacataaaccgccatttataactgtgttttattcatttaattttttgagacagggtctcactttgtcacccaggctgagtgcagtggagtgattacggctcactgcagccttgacctcaccagctcaagcgatcctcccacctcagccaccacacctggctaatttcttatttttttggagagtcgcggtcttgctatgttgcccatgctggtctcgaacttctgggctcaagtgagcctcccacctcagcctcccaaagtgctaggtgagcacttacaggcatgagccacctcactggcccatacaacagtgttttaaaatgagaacctgtctgtagtcccctgcaggcgttctgtggataccagctcttgccactcctctctcttatacttggcttcctttgacttagtatcaggccactgaaaattatttccatggtgggcatttggggcaccaggcagagctaagggctctcaaagaatgaggacttctattatgctggcaatggtggtggagagaggaagatggctggctgttgaatacctgatatgtaccgatcactatgttatgggctttaatatagttttgtatttaattttcttagcaatcctataacatagatactattagcccccattttacagatgacagactgacacttagaaacacacaactagcaactggtagaaccgagatttgaactgaggactttctggatgccaaagcctatgctttctaccatcacacaccacttttgcaaagatacaagaatcaggtattgagacctgttggctgtgaaaagggctaagaaatgaagggacagcagtacttgttctgtaagggtaaaggtttgaggtgtggggaacagctggatgaagtcagctctcatggtgggggatgggaggcctgtcgaaatgagatcttcagggttcttatatttctgagctttttggttgtccattatggagaagaaatgataccagtgccggtgtggggaatggagtcggacacagagagggaagggaagtcactagtgatggggaggaaaaggcagtttctatagccataacagccaggccagtcatttatttatgagaatgttcatgtgctaggtgcccagaagcaggaactctcttgtggaatagggggctgtaaatgtgtgtaaaatctgcttctcactttcactttcttttcctccaggaaaaacccagccttttttcttttttctttctttccacaggtgttgacttttttctttttctaatttttttaaatttttgccttctggggtcacagtgttttattttctcacttttgcttatcccattcacctttcttctctgattctgttatcttaacaaggcagtcatctttgttaaatatttctgtattctagaactgctcagaacactttgtaaatcagcatcaattctctgaaagctcctactttgtgcccattactagcatgagatgttatcctcagtgcacctaacctgtgctccctccatgttccctaacagggtaatcgacagctgtttgaggccactcaggaagattaaagttatgcttagagcctgaagctcttttggaggaaagcttttttttttttttttttttaaatggggtctcactccatcacccagctgctcatgtctttaaattcaggttggggatcaccaccttcaagaagcctttctaaggtcactgaagtctgttacatgtttctttggtatattcccatagtatgctgaatatctgttatcagtaaaacttctcaaaccatgttgttcttgtctgattttccttttgactttgagctctttgagagtagggacaatttttatatgtattcctagcacccaggacagtataatttctggaacataatttttaggatgtatgaatgataaaccttagttgtattgaaatgttccaaatgttgcaatacctcctgtatgtaaccatgaaaacctacacgtttttgcaatttcctgctctgatccagtttgaggaggtttagttttccctttttgtgaaattttgtgctattttaaaatgattctgaaagacacagaatagtgacttcttcttctccctccaaatgaggcaagagattactcatttattcagcattttatggggggagcacgcatttgctttgacagtcaactgtctcccccacttttaaatacaaatattttcaggccgggtgtggtggctcatacctgtaattccaatactctgggaggctgaggtgagaaatttatttgaggccaggagttcccgaccagcctggcctaacatagtgagaccccatctctacaaaaaatacaaaaattagccaggcgtggtggtacatacctatagtcccagttactcaagaggctgaaatagactgcttgagcccaggaggttgaggctgtagtgagctgagatcatgccactgcattcagcctaggtgacagagagaaactccatctattcaatcagtcaatctgtcaatcaatcaataaaaatcaaacaaatactttccccaatctgtgtccttttctaacttgctatccgccccctcccctctctttctctcctcagccaaatttctggaaagtgtagttgatattcattgtctcactttctcacttctgttcctaccattccagtgaagctggttgtgctgaggcaattatgactttgtgagtcagctaaatccaagaggtgttttatcaatcatctgtgttacatttgacctacttgaccattctccttgaaactattcctttgtcacatgtcacttgtagtccttgtcactaccttttcagtcccactggttttgttcatttgttcattcattcaaaaaatataaatcaagcgccacttctccacaatgctagtccyggaagttgtgtcagtgaacaggataaacgtagtccttgctctcatggagcttacagtccagccgggaagtagctattcacccatttaattggacaaatatttatttagtgcctgttgtttttcagataactgttgtgcctagccatgaaacataatgatgtaaatggtttaatcaggtaattattgcatcttaattttatcatgtgctttacaggaagctctgaaaacctataattaggatgcctattctagtctgggatagaagtaagggtcagtcaggaagagttcctagaggaagggtcatttagtggaggcttgaattgtgcaaatgaaaaaacatgaatgggagtagagtttggcagggcagggagacaggagggggtagttaattatttattgcagttacttataaagttaacaaaagctgtagcatcttaagagtgaaattctgctcttatcattcagcattgttgtaagctttatgattgatacatgcagactcctttatcccagcatccacaatcccatttctccttagtggtgagtgatcattttcaattctctatctggcagcacaaaggaggtttttagtcttgatgggaagtcagaatatatgcatgagacaataattaacagtataaactaagtgtcaaatgagtggtatagtaagtattactggcatttagagaagggcactgtcatgtagacatggaatgatggtgaaggagcgtgtagttcctgaggctcgcgttaaaggaagagaaggactcagaaaagcggagaaggaaggaactaggcatttccagtggagaagaaggagagaacgaagtcagggaagtaggaattcagtcttgcaaatgggtaagagtgtactgttgcttataggcctagacagagtcttctgtttggctgcttactgagtaatgtgatagaagacagaagcagccctggaaagatctttgaatgttaggctaaggaattgggactttatcatttgagcagagagatggaatgtgtggaaaactgttttagacttaatctggcaacaaatgactgcaaaactaggtcctgagacgtgagaagaatgcctggattagtgattcaataaggaattcagtttaacaaatatttatggagcttcttctgtgtggcagtggaaagagaacacaatgaacaggtgagagcacttgactaaggaacctaaagacttgtgcaagatcagatgggggttggatggatgggggaggggtgggaggggagacaggaggagtaggggccctccctactaccctaccaccacaggtttcagaggttagcatactgtggcctacaggccaaatccatccagttacttgtttttgcacagcccttgagcctaagaatggtttttacatttttagatgatttttttaaatcataagagtatatcatggtatatgaaattcaaattttagtgtccataagtaacgtttttgaaacagagccttgctggttcatttacgtattgtctgttgctactttaacatgcagaggtgactagtgacacagaccataaggcccacaaagcctaaactattttttgtttagccctttacagaaaactttgtccatccttgagtcacactcatccttatctcaaatctcttctctgaaactaaatgtccctctcctacctgaggctttcccctcctcccgggcttttaaatcttgctcttctttattttcctccttaaatcctcaacttctccttcttccaggacttttctgcctccaaatatgttcaagaactgacttactttaaaaaaaaaaaccaggccaggcgtggtggcttaaccctgtagtcctattgctttgggatgccgaggcaggaggactgcttggggccaggagttccagaccaacctgggcaacatagcaaaacatttaaaaattagctgggtgtggtggcatatgcctgtagtcccagctactatggaagatgaggagggagggtcacttgagcccaggagtttgaagttacagtgagctgtgaatacaccactgcactctagcctgggcaacaaagaccctgtctcttaaaaacaaaaacaaaaagactttatcaactcaggagttcacttgtgctgccgtacttcatctctagcctctacctccacttcacctttcatttagtcacctgcatccggaccctgaccccagtagtccgctgaaactagtcttgctaagtcattagtgaattcctagctgctggatccagtcacttccccagtctttatcttccttgttttctctgacatttaacatgttgatcatgtttccttgagaccctttttcctttagctctggtgacatcattgttcttggtttctctgtctcaaacaaaaaaaaaaattatgytgaacaaaagtgccagaattcagtcttctgctgccaagtctagtgcttcttctaccgcatcagtatagatatgaggatctttgggagatgagagacaaaattgggaatccctacacctacacttagaggttaagggaaagaagtatctcagagaaggagttaaagagtgccccaaggcattactatgttgtgaaggacaagttttcagacattgagggtatcatcaatgagacatgtttgcgaatagtcaaggaaaatagggaaggacgaaagagtctgactaccgggaagttaagagaataatttcttacagtaaagccatcttgccaactggttaagaaatacatgggcattgatggaaatggtgtcaactgccattttttaaatttttaaaaattctttttcttttttttctttcttttctaaatcatccagcccaaaatgttattgktattattattttttctgtcatctaggctggagtctagtggtgtgatcatagctcactgcagcctcagccttccagactcaagtggatcttcccacctcagcctcctaagtgctgggactataggcatgtgccaccacgcctggctaacttttgtattttggtattttctttattaatatttttatttctattattgtttatctagttttttttcccccttttttttcttttttgaggccaggtctggttctgtctaccaagctggagtgcagtagcaatcatagctcactgtaaccttgaactcctgggctcaagcaatcttacctcagcttcccaaatagctggaactataggcatgtgtcaccatgctcggctgattttgtggttttgtttgtttttggtagagacagggtcttgctgtgttgcccaggttgtctcaaactcctggcctcaagtgatcctcctgccttggcctcccaaagtgatgggattacaagcatgagccaccgcaccctgccttcttctttttcttttctttttttaaacaggctcgattcactttatttttcttgtgtaaaattcctgtgttatagccacagttggagcctgggtcctctgcacagagactctggtgtgggtcttgatgaggtggtcagtgaattcctgacggggagacttggtgaatacagtctttttccagagatcaggggtcaggtagctataggtcttagaggtggcctaaagggtggctttggtgaagttgtccagggtagcagtgcagcccatggcagaggtatagcagttgtcaataccatccatcagcagccgtttcctgggcatgggccaagatgatgccattgccttgggtggggtgggggagggataaggcacaccagcacagagccacagcagcctgtcaccttgcaggggacggcgtggggcttgctgatcttgttcccctagtggcctctccaaacaggaacagtggagagcttgaccaggatcatggccccttggatgacattggcaacctccttggagcactgaacatccagaccgatgtggccaccgtagtccccgatggccttgaacctggtgtgctggccagcgcgggtctgcttttgcagaggtgtagtcttcaaaagctcatcctcgagaggtgaccccagcaaaaagtcaatgatctcagactccttaatgggcagggagaagagctagaccttctccagggacttgatcttcatgtcctggaccaggcagcccagcttggtgatgggcatccactccttgttctcagccttgcctctgagagctccatggcctcagccctggctccaggccaaccacagccatgaccctggccccaatatccctgccaaagtctctgaggaagctgctgggcctcccattccaggccctccactgcactagagtcatctgccatttgatatttgtcggagaagcagcttttttttttttcttaaccttctgccatgaggtgaagaattgactcccctttcaagaagtttgatggtgaaaggaaacaagaggctggcagtttgagaattatcacatcaccaaatcttccaagaaatttgcaatatgttgttgtcattttgtaggcttgaaaatatgcagtggaaacaatctagggaaatatgtttgatgattaagtatgtaaatttccagatgttttaaactcaatttaatattggtaattccaatcaagttgtagttctggaggtcagggtgtttagtcaagccttaaaacaaagttaagatcttatctgaatacaggtagctgtaacagtatagtgtacttttagtgggtagatgtatatagagtctgaaaacattcttatgttcatttagaatattcatctacatatagacttatttcttccccataaatcattatgtgttgtccaggtatgatttgatcaacaataaggtttttccactttgctgctagaggctgttttctgtgtttatgatgaaaacccagttgtattgtccacagcatctcttgggagctgagctctgggtgggggagttaagccctgggcagcatttttgtcctgttgatgaggtatcttttctctgccaggtaaagcggtaccaatgtacctttgagggctgtccccgcacctacagcacagcaggcaacctgcgaacccaccagaagactcaccgaggagagtacacctttgtctgtaatcaggagggctgtggcaaagccttccttacctcttacagcctcaggatccacgtgcgagtgcacacgaaggagaagccatttgagtgtgacgtgcagggctgtgagaaggcattcaacacactgtacaggtcagtctcgtctccaatgctctgccagcctctgaccttgacctygttgtgatggcagagctctttccccttgcagaggagttgttttcactttcagggctttaaaagagcgcagctgtgttcaactacgtaaaattcatttctgccagatctcagaaaatgaaagaaaaaaatttaaaaatgcattagagaaacctgttacttaaagatggacgtatcttgggctggttagaagcgacagtacatttctgtttagatttgcatctcatggagcagcattctggcctgggcatttcagtgcttggcatagagtactatctccccttggctcaggatctttgtgctaaggcttctgtcctacctaagcttgaaggacttttctatcctgagaaatggggagtggcctattcagtagccaattctctttttcacgtttgtatcaggagacttaatagtcttcagtattgagtataaagtaatagaaataacagtagctaacacttaaaaatactcactgtgtgctaggcatgattccaagtgctagtccccacaatagctgataagtaaatggaagcacagaggggttctataactagcttaagtttccccatccaagcaggatgtggggtcaggatttgaatcccaggaagtctgtctccagagtcacactcataccactrtgctattctctgcgtttcttttggggcaaaatatgttggatactaatatgttatgggtatagaattcttacgcacttgatcctgaagcacattaagctggcatggggaggctctgtagaactttatgacaaagggaggccaggcrcagtggctcatgcctgttatcccagcactttgggaggccgaggcaggcggatcacctgaggtcaggagttcgagaccagcctggccaacctggtgaaaccccgttgtactaaaaatacaaaaattagccaggygtggttgtgggctcccataatcccatctacttgggaggctgaggcaggagaatcgcttgaacctagcaggaggaggttgcagtgagccgagactgcrccattgcactccagcctgggcgacaagagcgaaactctgtctcagaaaaaaaaaaaaaaaaaaaaaagaattttatgacaaagggaatttttctggaatattttgcaggctgaaagcacatcagaggcttcacacagggaaaacgtttaactgtgaatctgaaggctgcagcaaatacttcaccacactcagtgatctgaggaagcacattcgaactcatacaggggaaaagccatttcggtaggtcttactgttttctatttgtcactgaccaggtttcasctgggggtcttgatatactctggaatttttcaaaaaagaaagaaaactccctttactagctcytgatttagcagtgttagctcaccccaggacagctataaccaaccactgcagattagaggggtgctgatggagtccaagaacatccttactctgtggatgatggcctttctgcctcattttttcccatttatttccaagaagcatttgttgaaactcagttatgtggtgggtacttttattagtgctagagaaatactccgaagcaggccttcttcttaagaacctttgtctggtgacaaaaaaccacaaatttgtggataatatctgaggctgcaagatggccaaagtgccttaagcccagaggagggatacctacctaagaatcaaggagggagggaatgaggagacaagagaggaaatgagaggtagggatgcttagcttagtggtgcagttgttacttgttcaaattattgctttgtaatatctcgtgtgtatacacaaacatataggagcatccatttttattcatatatgtcaacatatgtatatctaatagatacatttactataaacttgaaggagggacttgggttatctactttcttctctgctcatagtatatagcatgattccaggcattcaacaggtattcaaaatcagctttgggatgattatatgacatttttaatgagataatcagtttgtaaggatttcccctaaatgtaatatagatagatgtattgccaaaaactgcccataaacaatgtctttgaggccgggcatggcggctcatgcctgtaattccagcaatttgggaggctgaggcaggtggatcatgtgaggttaggagtttaagaccagcctggccaacatggtgagaccacatctctactaaaactacaaaaatcagccaggcgtggtgtcacatgcctatagtcccagctactctggaggctgaggcaggagaattgctggaaccagagaggcggaggttgtggtgagccaagattgtgccattgcactccagcctagatgacagagtgagactctgtctcaaaaaaaataaaaataaaaaaaaaataaacaatgtatttgaattttggcaggggatattcaaggcattagatatgctacctgttccttcttaaaccactcgttttgttagggtacttagaaataaaaagtcgttagagacagtcaactcttagatgccaatcaaatggaattgtgggctgggcttatgtctgtaatcccagygctttgggagactgaggtgggaggatcacttgagcccaggagttcaagaccagcttgggcaagtgagaccctgactctacagaaaattttaaaattagttgggagtggtggcgcatgcgtgtggtcccagctatttaggaggctgaggtgggaagatygcttgagcctgggaggtcaaggctgtagtgagccatggtcatgccactacactccagcctgggcaacagagagagaccatgtctcagaaaaaaaaggaattgtgtttttaagttacagatgcattcctgagtcatgatccctttaagggcaagagtagttagattgtaattggttactctacagatggatgctgtgaagcttaggttattccccgccsccccccttcccgtaggctgctgagaggactctgatttctatccagtcacatgcatttatttttgtgatgattaaaactgcatttttcttgaatattcaatgagactttagacatgatgatgattgcatgtaattaaaaatgaaaatgctttagagaagctttctatttaaagaaataaaatattttggtttataagaaaatgcattcattcatataagtaattaaggaatgtctgctatgtgcaggaactacagaaagagctacgtggatcctgtactcaagtagtttacactctaggagagcagataccagatgtatccacagagaaaataagattggaaatgagagttgccataaaagaaatgtaaagaaaagccttaggagttctgaggagggaaagattccttttagctttggttatcaagacagtaaaagagaatgaagtagatctcgacacacaagattatagataagttacttgagcctatcttctgattgattttgttcttatgttacattgcaagccatgtacatatttgagagccactttgcttactcttgatattcctaatgttccactggcagatttttcatatggactgtcactgtcaacagaggtctgttaagtaattcatcaaaagacttttgttgtcagggctctcaacatggaccttacctgtaggacaagaaatacttatcctgggctctcagttctctctgatcccagatatgccaccttactttttcaagaacctctcatcattcccatctctaaaaccagtgtcattgatctgatcttagtgttctgaatatttgttttagtttctatttataagagatgttcagaggccaggcacagtggttcacgtctgtaatcccagcacttgggaggccgaggcgggcggatcacaaggtcaggagatcgagaccatcctggctaacatggtgaaaccttgtctctactaaaaatacaaaaaattagctgggcgtggtggtgggcacctgtagtcccagctactcgggaggctgaggcaggagaatggcatgaacccgggaggtggagcttgcagtgagccaagattgcgccactgcactccagccttggggacagagcgagactcgatctcaaaaaaaaaaaagacgttcaggataaagatctattagctaatgactcctgtttctctttccttaacaaatttaggtgcgatcacgatggctgtggaaaagcatttgcagcaagccaccaccttaaaactcacgttcgtacacatactggtgagtttaggccaatttttgtttcatcaagcctgtaactatcaattttccattgagacctgtagagctaggtggatatacagagatatagancctgtatatattcargtgagcataattagytcagccttacctagaatgtttgggtttctttcagaggcggacctcaggtattcaaccttaagagatgaaaccaatacagagacactctaaaaaaaaacaacctgtgagaaacaaatctactctttaaacttcccagcagtaggcattcccaatgctttgctcagcattgagtttgaggactgagatgattaatgtgtaatttattgaacttttaacaactgttacccaaactctcttaaaaatacttacttacctctattagggaaaggtagatttcttaatccagtgaaatgactttatggtaaattaacactactttgttattcttgcaggtgaaagacccttcttctgccccagtaatggctgtgagaaaacattcagcactcaatacagtctcaaaagtcacatgaaaggtcatgataacaaaggacactcatacaatgcacttccacaacacaatggatcagaggtgtgtagtgtttttgtctcttgatctgggtaccatagaacttcaacagttgtttgtgtatcacaatcaaaggttaaaatgtcttctctgtatatctgttagtgagcgggaagaagtcagggtcaagatcagtgtcttgacttgtgtatttaaccacctactcgacgtcttcacccagatatcatctactcttgtcaaacttaacatgtccaaacctgttcttcctgcagtcttcctcgtcttggtaaatggcggctctggttttctagtggcaaaggccaaaaatcttatagtcattcttgactcttttttccctcacactccacatccgccagcaaagtctgccagctcatccttgataatttatctagaatcccatcacttcttctgattacttcattcagtctactgttgtctttttgcctggattattgcaataacctgttaagtgagcttcttaggaccttttccccctcttctgtccactccacaatagactgtcctacatatatcagccagagtgatctttctgaaccataaagcagataatgtctgtcctctgctcataacccacagtagctttttaaatttttattttatagatttttaaaaattattttaatagagataaggtccaagcagtctttcccttcccccacccccgccgcccccaccctctgtctcagcctcccaaagtgctgggattacaggcatgagccaccccacctggcctcccagtagcttcctgtatcacttgaagtaaaagtcagtctttatagtaggctatagggccctacacattctggcctggttgcttctctgatctcatctacctcgcttttatttttgttttatttcattttatttgaaacagggtcttgctctgtcctgtaggctggagtgtagtggtgcaatctctgctcactgtgacctccacctccctggctcagggatcctcccaactagctgggaccacaggcatgcaccaccacacccrggttttttttgtgtttttagtagagatgtggtcttcaccatgttgcctgggccggtcttgcactcctaagcttaagtgatctgtctgccttggcctcccaaagtaccgggattacagatgtgagccactgtgccctgcctacttttcttcctctcacttcagccatatggtcctctttgtggtttcttgaaccaaggagtgtccactcctgcccctaggcctttatacttgctgtaccctctgcttggaacatcttctctagatatgtgcatggttgataccctctttccttcactctctactcaaatgccacttacctaaaagggcttccctaaccacccaataaaagagcaactcctatcccagagttccctactgcccttactctccataacacttatcctcttgcacattgtatatttatttgttttttgtcctctctgctagaacgtaagctctacgtggggaggagtttagtttgttcattaatgtatccctgggtctggaacggtgtctaatacatagtagatgcattatgaatgtttgttgagtgtgtgcatgaataggagcatctgaggtaagcagggctaccacctaaagtgtgaattgtgactggcattctgggactccagagttcacttagtctgggcagtggaatttgaattctaaatccccagtaccactctgagtaaggagcctttcagtgcccatgtgggaaacacagtggtggaaggaccattgacttttcagtcagaagcactggatttgtcttctgctaattagctgtgtgtttgggggcacttgattcctactgtctgagcatcagttttctgatatttaaaatgggaatataagtttgtggcaatttgttacaaaaaraataaaaaatggggatatagagtaatacttccaagrtttatatgaatggcaaatgaggtcctgtgaaatcactgtaaatgatgagaccaggtatacagatagtattaatttcacattattataggtttgttactttggagccttagtcataagataatgttaaaactctttattattattattatttttttttttttgagacagagtctcactcttgtcgcccaggctggagtgcagtggcgtgatcttggctccctgcaacctctgccgcccaggttcaagtgattctcctgcctcagcctcccgagtagctgggattacaggcacacaccaccgcgcctagctaattttttgtatttttagtagagatggggtttcactatgttggccaggctggtctcgaattcctgaccttgtgacccacctgcctcagactcccaaattgctgggattacaggcgtgagccaccactctcagcctctaaaactctttattaatcatttttaagaaatgtaagatattcttgtaagaatatcaggatttttaaaaattaactaattcacggggtggggcaggggagggatagcattaggagatatacttaaygtaaatgatgagttaatgggtgcagcgcgccagcatagtacatgtatacataatgtaacaaayctgcacattgtgcacatgtaccctagaacataaagtataatttaaaaaaaattaattcatttagcccttgctttggttggcttatacttcttcagataatacatgtagacatgtggaacattagggactttgtaatcaaatgttttgttacatgatatgccactgtaaatcctgatttttgttactcaattagaattttttctctttcacaggatacaaatcactcactttgtctaagtgacttgagccttctgtccacagattctgaattgcgagaaaattccagtacggtaagtgtacctgtaataccagtgctagaaaaataagggcaagaattaagcactccctttggtgggaaaattgaggcaggccagtctttgaagttttctaaatttaattgtgtttaattactgaccatgtaggattttttcttcttctgataagagttctattagagcctgttctctctgatgcctgattccttttgacgcaggtcactcactcggtaacctggccccagaaaatttcttttttttactcatttagcaaatatttattgaccaggcactgtgccagtactgagcttatagtagttaaaaatgttggtatagtttgtccttgaggaacttaaagtctagtactgtaagacataaccagaattctagtttctggactttctcaaatcctatctatatgacctggcttggtcttttcctttttcattttaattttatttatttattttttttctgtgcaatggggagagaaaaatttcccttctttaggtttattagctttttgaagaaaacctcttacacatatasaggcctctatctgctaaaggacaagcccactttatcttaatctgattgctttgattcaagctgttaggaaatttgactgccattcccatggctccatgatgcaacttacaaaccaatgcattgagtctgagcttatgcagcctcctccatgttgaacatgagagttttatagtattgctaacactaattttgagtttgggttttttgttgtcgtttttcctggtaaataaatatagcataggctagattttctgtgattatgtgcataatgaataaatatgatgggawgtatttgaacagagactgaatgattcaggaatgctgtgaaagagtggttagtggagtcaattacagcacttctgaagttgtaggttcttgggcctccccccaagcctgctgagtcagcttgtctgaccgtggcatctgaacctgcatttttatgtaagcacgacaaggcctaattctccttctggtagtggcagagttgctcttatgagaccaactctcccgcagaaaacagctaaaaattctagacaaaatataaaaaacaactgtggaaaggcactggtgagcaaccaatagcaagcagaggtaaccttggaagaagggattgcttggaagatggtaaaggcactgggtaggcttgcaagttttatggcttatccaccttgggcaagccccagttggcacccaacgaggcagccaaacttataaaaactcaatcttactggcttgaataaccagaggacagagttcagggtggccacagcacctggaaagtgaaggcaggtagcctggaaaggaaagagtcactaagggggagccccaagttctgtgtataaactctctccgaatctctggctgacccctgcgccatggatgtgtgggatagactctaagcagcccagccaaggctaaagatctacacaaagatcatagctgcatccactgcaagggagatgaagttaatggaatattcagacaaacaagtcaacacacttccaagaagtgtaacagagtccagagtctctaaaatatatcatttgtagtgttcagagcaatcccaaattagtaaacacgtgaagaaacaggaaaacatgatccctccacaagagaaaaggtaatctgtggagatggaccccaagatgacccatctaatgttaaaattaacagacaaggattttttttatttttatttttttatgcgacaaggatttttaaaagctattatatgctcaaggacataaaggaatatgcttgtaatgattgaacaaataggaaatctcagcagaggaatagaaaccgtaaaaagtgtaccaaatggaaatctaaaacggaaaaatatagctgaaataattcactggatggggcttaacagcagattggaaatgacagaagaaagaatcagttgagttgaagatcaataatagaaatgaatcaaactaaagagcaaagagaaaaagattaaatgggtacatcacatgacttttatgcatattcctattttacaactaatgttctaaaagaaatttctgcactgggtggtctagatgccctcaaagctacccagcctaagatttctaggaataatatccctttaacgtgtaactgtgttaaatagcttaggagtctattctctggccaagactatgacatatgactaacgagctttctggagccctagggtcaccaggaaaataycctggcataaggggacaccaagtacttatgaaaaagggaagcctttcctatcacaatttatataatcaagagagagaagcactatcccttggggtttaattatagatcatgctcctggtacccagtgtttatctcagatgtggaaattgattttagcctttcaaactaaggccacaattccttgaagcaataggattaatttttcttttttctttttttttttttgagacagagtctcgctctgtcgcccaggctggagtgcagtagcgcgatctcgcctcactacaagctccacctcctgggttcacgccattctcctgcctcagcctccccagtagctgggcctacaggcgcccgccaccatgcctggctaatttttgttgtgttttttagtagagacagggtttcaccatgctagccaggatggtctcgatctcctgacctcgtgatccgcccgtctcggactcccaaagtgctgggattacaggtgtgagccaccgcgcccggccaggattaaattttctttgcttgaaaaaaaaattagggacatgtgcagtggctcatgcctgtaatcccagcactttgggaagcagaggtgggtggatggcttgagcccaggagtttgagaccagtctgggcaacacagtgagacctcatttctagtaaaaataaaatattagctgggtgtggtggtggtattttctaataaaaatattttttttaatagagacctcatctctagtaaaaataaaatattagctggtgttgtcccagctatctgggaggctgaggcaaaaggattgtttgagccctggagtgagccatgatcacaccactgcattccagcctgggcaacagagcaagaccctgtctcaaaaaaaaaaagaaaaaaaagagagaatcaggacttgttaaaatcaaatagtaaatttatatgagataatgattttatgggtttctcagcagccatatgtatgcatatcctagaaatgaactttggtttgctcagatcttttgttagaggagagttgaaggtgctagggaatggccttctcraagccttttggctgctcagctccaggatccatcctggtcccagacagctacctgtattctcctcttctttgccctttgctctttgctccttgctccaggcctggaaagctcagcctgttcttgtcttctctacttgtgaaagttgttcctacccactttgctcccagcgtttttgccctgaagcttggcaggggcttcagcattttcctttttttaaattttaacaagctttttattgaggtacaatatacatacagaaaagcacatgtattataaatgtacagcttgatgaatcatcacaattcgtcacacccatgtaaccagcaccccggtcaaaaagaacattcccagccaggcgtggtggcttacgcctataatcccaacactttgggaggctgaggtaggcggatcacctgaggtcaggagtttgagaccagcctggccagcatggctaaactccgtctctactaaaaatacaaaaattagccgggtgtggtggcgggcgcctgtaatcctagctactcgggaagctgaggcaggagaatcacttgaaccgtggcggcagaggttgcagtgagctgaaatcgtgccattgcactccagtctgggtgacaagagcgaaactctgtctcagaacaaaagaaaacaaacaaaataacattcccagcaccccagaggcccccccctcacatacccccaaaagccatgatctctccctgcagacaaccactattctgacttacaacaactaagattagtttttcctgtttttttttttttaatgcttttatgattggaatcatatacttgtttatgtgtggcttttcttctcataacattatgtttaagaaattaagccatattattacatacagttacaggtcattcattcttcttgttgaacaatattacactaagtgaatataccacaatacactaaatgaatataccaatatttgttctttctcctgttgggcctttggatagtttccagtttggagccattatgaatagtgctgctgtgaacatttttgtacatatgttttggaggcacacaagcccattccttttcttttccctagtattattgaggtattaggttggtcaaaagtaattgccattgaaagtaatggcaaaaaccgcaaatacttttgcaccaacctaatatcattgacaaatatagctcattcgtttttaattatgttactacctataatgatttataaacagaacaaaagtaataactatggctggtcgtggtggctcacacctgtaatcccagcactttgggaggccgaggagggtggatcacgcctgtaatcccagcactttgggaggccgaggcgggtggatcacgaagtcagaagatcaagaccattttggctaacacggtgaaaccccatctctactaaaaatacaaaaaacaaaattagccgggcatgatggcaggcgcctgtagtcccagctacttgggaggctgaggcaggagaatggcgtgaacctgggaggtggagcttgcagtgagtcaagatcatgtcactgcactccagcctgggcaacagagcgagactctgtctcaaataataataataataataataataataataataataacaactatgaggaggttgcaaagcttatgctcagtggtagttgttagtcaactatttttcaaactggattgcaccttttcattgggttttaaaatagtggtttataatcagcatttcaaagacatcaatagaatagaaaaaaaatcagaggacattgcacatagtaaggataaggtctgtttcatagacttgtttcagttacacatatggatatgtatataatatgaagaatgtatgtatatacagtgtaaaatgtatttcttactttgtgtcacaatgaaaatttgaaagtcacactattggcctatgagttttaactctgtccggactggaagttggaagttgtcccacatagatttgagatggagtcttgctccatcacccaggctggagtgcagtggcttgatctcagctcgctgcaacctccacttcccaggttcaagtaattctcctgcctcagcgtcccgagtagctaggatttgaagcacgcaccaccatgctcagctaatttttgtacttttggtagagacggggtttcactgtgttggccaggctggtttcgaactcttgacctcaagcgatctgcctgcctcggccccacacagtgctgggattacaggtgtgagccactgcgcctggcctcacataatttctgacttcaccttctatcatattggcaatcaggatcactgaaatgaagaaaaaaaaaaaaaggaatcactgaatttcccctccttcagctgatagacgtagaagagaatcatcagctggtggtggtggctcatacttgtaatcccagtgctttgggaagactgcttgaggccaggagttcaagaccaggctaggcaacgtagcaggaccttatctctactaaaaataatttttaaaaagcagccaggcatggtggcgtgcgcctgtagtcccagctacttgggaggtctaggggaggatcttgaacctaggagttcaaggttgcagtgacttgactgcgcctctgcactcccgcctggataacagagctagaccccgtctgaaaaaaagggggggaaaagaagaattgctcccttttggctccagtgggcaatttaatctttgagcacttctagattggtggacagccccactcatcaccacacttctacccaatcccaaagtgatccttctgagttctgccttctagaagcagagttgttacaaaatgaccttaaaacgtatgttggcactagggcaagatctgccctaaaaagaggttttagtttggtatatacagtgtgtttaagttattttcaattacatgtgacccttgaacaacacaggggctaggggtgctggcctcccaacccataaccccctgcacaaccaaatcctagtataacttttgactcccccaaaactgagctagcaatggccttagcctactgtgattggaagccttactgataacataaacagtttagattagcagatattttgaatgttatatgtattatgtattgtattcttaaagtaagctagaaaaaawaaaatgttaagaaaatcacaaggaagaggaaataaatttactatttattaaggggaagtagatcattgtaaaggtgattcatcctcatcgtcttcacattgagtaggcggaggaagaggaagaggaggggttggttttgctgtgtcaggggtggcagaagtggaaaaaagtcccaagtataagtccacttgtgcagttcaaatgcatgttgttcaagggtcagctgtacttgcttttatttacaagttggtagatttcatgtaaaaatcaaaatttctgggtctgatgtggtggctcacacctataatcccagcactttgggaggctggggtgggaggatctcttgagcccaggagttccagaccagcctggacaacatagtaaaaccctatctctacagaaaaattaaaaaatcatccagatgtggtggcccatacctgtggtcccagctacttggaggctgaggtgggaggatcacttgagcccgggagttgaaggctgcggggagctatgatcataccactgcactccagcctgggcaacagagtaaagaaaccctgtctcaaaaaaaagaaagtcaaaattttgccacttgagttctggtaatccctggcctgcatattcccatggcagcattcggctgaagcccttgaggtgactggcatgcattctctccagtatgccacaacccacctcccttgcttcacgtatttcttttccctctctggactttgtaggcagttgcccttaccactcttgccctacgaactgtaggggtagaggtggattggaggttgaccatggatagaagaactgtagtctttccccttccctgaactaaagtgaagagtgctcgttttagttagtgcctgtggggaggcaggccctcaggacattgtgttgggtctcccccctcacattttacctttttgtttttaatgcctctgaccttttattaagtataaaggtatcactattgttcaccattgttgtcttgtttattaccatgcatacatactagaatatcatagatattatgaaaaatattcacaatgttattattacatgaggaaagcaagttgcagggtaatgaatattatataatttttttgttgttgtttacggagtcttgctctgtcgcccacgctggagtgcagtggtgcgatcttggctcactgcaacctccgcctcccaggttcaagcaattctactgcctcagcctcccaagtagctgggattacaggcgcctgccaccatgcccagctaatttttgtatttttagtagaaacggggttttaccatgttttccaggctggtctcaaactccttacctcaggtgatctgcccgccccagcctcccaaagtgctgggattacaggcataarccaccacacctggcctgtaatctcattttttaatgtaagatttggtcttttagatcagaagtcagcaaggttttttttggtaatgagccagacagtaaatattttaggctttgttgattccatggtctctgtcacaactagtcaactctgccattgtagcaaaagtagcacagataatatataaatggatgcatgtgcccgtgttccaataaaactttatttacaaaaacaggaaatcaactggcaagtcatagtgtgccaattcctgttttaagtgtttgaggggctgggcatggtggctcatgcctgtaatcctaacatttttaggagtctgaggttgagtggattgcttgagcccaggagttcaagaccagcctgggcaacgtagtgagattctgtctctattaaaaaataaataaataaaaataaagtatttgaggacccaaatctttagtgtctaaggcttaagaaaatacatgttactttawatagcagaaggtagaaacaaaatgcatatcaaaagattttcattctagttctgctgctttgaatgtgttttctcatggtgaagaattgtctcaagatggccaatctcacatctttgtctctctccatcagacccagggccaggacctcagcacaatttcaccagcaatcatctttgaatcaatgttccagaattcagatgatacggcaattcaggaagatcctcaacagacrggtttgtcacacggactctttctactcacatctaagcacttgctgacacactgagtcacaggcacaatgaatcattctagttagcgtaaatgaagtgagctttctatawagggtcagaaagtttgggtctttcagtttaattccatcttttcccctacttccctcagtcctgaagaagagaatctcctttcccagaatcttctgttggctgtaaaaccaccaaaatggggaggagctgtgagatttttcttctacattttttttttttgagacagcgtctcattttgtcacccagatgggagtgcggtggtgtgatctcagctcaccgcaacctccacctccaggcttgagtgatcctcccacctcagcctcctgagtagctgggaccacaggcacgtgctaccacacccagctaattttttttttttgtatttttggtagagatggggttttgtcatgttgcccaggctgctctgaaactcctgagcttaggcaatccacccgcctcagcctcccaaagttctaagactacaggcgtgagccaccatgcccagccttgtgagctctttcttctgatgtgatacactgtctgtgaatggacaggacccacaaatccacaaacttcagctgcatatatcatactgtgtttcatgaaaatttgtctgtaaaacttcccattagtcagaaagtatagtcactagtcatgtcaaaaaaaggatgtttagtctcttttccagaaaagccttaagacacttttttaaatggttagaactatattgggtcttcacatttaggaagtgaggttgatggtgaaacgtgatactttgaccagaggtgtcactaaatgaaaatgacagaaagctggccygctagctatgaagagatcagctcagtggacttcagctgtgttttgtttagcccataatgactgtttttgtggctcatctaaggcttgggatatgtatatatatttctatttctttttcttgccagcttccttgactgaaagttttaatggtgatgcagagtcagtcagtgatgttccgccatccacaggaaattcagcatctttatctcttccacttgtactgcaacctggcctctccgagccaccccagcctctactacctgcctcagctycgtctgctcctccgcctgctccctccctaggacctggctcccagcaagctgcatttggcaacccccctgctctcttacaacctccagaagtgcctgttccccacagcacacagtttgctgctaatcatcaagagtttcttccgcacccccaggcaccgcagcccattgtaccaggactttctgttgttgctggggcttctgcatcagcagcggcagtggcatcagctgtggcagcaccagccccaccacaaagtactactgagcccctgccagccatggtccagactctgcccctgggtgccaactctgtcctaactaataatcccacaataaccatcaccccaactcccaacacagctatcctgcagtccagcctagtcatgggagaacagaacttacaatggatattaaatggtgccaccagttctccacaaaaccaagaacaaattgtaagtattaygtatgaatatacccagtggggtgaagtgtatttacataggtgacatgttcagaagcttttacttcaaaaagaaaagtggctgtcatatccaccgtgaaacatgtaattctaccttttagtcattttccacataatcaagtggtataaacgtaggaaatgctgtggtcagtacctatagtaaggaggcagagaaacagtctttatctagcaggaggcactcaaacaaatattcctactgatactggaatctaatcacatcatctagtataaaaaagcagtcagcaaactccagaggtcccagaatattccagaaaaaggttgttttcaaggcagagtcagactgatgtgagggactgatgtgacccagtcagatggcaccggacagcagtggccaagtcagagagctaacttgtgctcccacagcccatcatagaatcattttctgaggaagtacttggtcttgatgactagggaaatgacttggtcattcagttaatgcttcatcgtgaagaattgtctcagggtggccaatctcacaactttgaaagcctaatatttgccagacactatactgagtatctggaggatacagaaaagagaaaaaacatgatttattttttataaaaacatatattctagttaaagaggctaaaaatgccaaaaagaaagttaatattaccagtaggttaaatattaaatactaataatggtaatttaaaaaacatcaacagctattattcattgagtccttactatgtgtaaggacttattgtgctacatattttttaaaattgaggatctgcaatgtgtcagttattacctacgtacattatttttagattacttttttttggactttattgaacagatggtacagagagtttccataaaccctttccccacccctagtttctcctattattattattattattatatattttgaggctctgtcacccaggctagagtgcagtggtgcgatctcagctcactacaacctccacctcttgagctcaagccatcttcccaccttagcttcctaactgggactacaggcacccaccaccatgactggctaattttttgtattttttgtagagacggggtttcgccatgttgcccagactggtcttgaactcctagacccaagcaatctgcctgcctccgtctcccaaagtgctgggactataggcgtgagccatcatgcccagccctcccctattattattattgttttttctccctatcatcttgtttttttcccctattactaacatcttgcaacagtgtggtacattggttacaactgatgaaccagtattgatacattattgttatctaaagtccatagtttagggtccattctttgtgctgtacagttctattggttttgacaaatgcataatgtcatgtatctaccattaagcaatatccagaatagtttcacattttttaaaattccttgtccttcacttattcatcccttctaccacttccctctcccctagcaatcattgatatttttactatctctgtatagctgcagctctatatgtcacacaaaacacattttaacatattacaacaatcctaggaggtaggtctaattttcccaatggagagcagaggtccagagaggttaagtgactggctgaagttcacagagctcacaagtggcaaagctgggatttaagcataagcagattgatcccagagttggtggctcttggccactgcgttgaggggttcagacactaatggtttgttgggtggccatacaggtcaggtcagccttgagatatgggtaggaattagatggagaaaaggatgtactaagttggagaacctagaggtggatgtatgctactattagacacactagaaaggcmatttggggctcaacagggagaacactcaaattccagaactagggtgccaaccccgtctagatctagagagcctatgtccatttctagatagctagagtcattggaaagggctttccagtattgtgacccagcccgcctccatgtggtttttattgttttctctggccctgtcctggggtgctgagtgaaacaagtcatccattttcttttcagatatttagggtctcacttctccttttttttttttttttttttttttttttttttttgagtcagagtcttgctctgttgcctaggctggagtgcagtggtgcagttttggctcactgcaacctccgcctcctggcttcaagcgattctcctgcctcagcctcccaagtagctgggactacaggcatgcaccagcacacctggctaatttttgtatttttagtagagacagggtttcaccatgttggccaggctggtctccaactcctgacctcaggtgattcgcccacctcggcctcccaaagtgctgggattacaagcatgagccaccacgcccagcctccattattattttatagtgtcatctgctataacgtagccagaagctttcactttcctcccacactcatcttagaggcaattttaaatttcctttttagcgagataaaagacaaagctgcctcaagataagacttcaagaaagtggaaaccttttagcccatgtaataggaagtatactagagcgaaaagggtgattttctgggcataggtttatagtcctacttagtaataatataaataatgttctggaactcctgacctcaggtgatccgcccgctttggcctcccaaagtgctgggattacaggcgtgagccaccgcgcccggtcttaaataatgaatgtttactgaatgttcaccatgtgccaagtgtcctacgtgcatcatctcatttcatcctcacagaggcctttgaagaggtttttggttattgtcttagtccattttctgttgcttataacagaataccccaaactgggtaattgataaagaaaatacatttatttcttacatttatggaggctgagaagtccgaagttgagaggccacatctggagggccgccctcctggtgtggaccctctgcagagtcctgaggcagcacagggcatcacatggcgaggggttgaacatcctagctcgggcctctcttcctcttcatttttttttttttgttttgacacggagtctcactctgttgtccaggctggagtgcagtggtgcgatstcggctcactgcaacctccgcctcccaggttcacaccattctcttgcctcagcctcccgagtagctgggattacaggcacccgccaccacacccgtctaatttttgtatttttagtagagatggggtttcaccgtattagccaggatggtctcgatctcctgacctcgtgatctgcccgcctcggcctcccatagtgctgggattacaggcgtgagccaccacacctggcctttttttttgagatggagtctcgctctgtcacctaggctggagtgcagtggcgcgatctcggctcactgcaagctccaccacccgggttcacaccattctcctgcctcagcctcccgattagctgggactacaggcgcccgccaccatgcccggctaattttttgtatttttagtagagatggagtttcactatgttagctaggatggtctcgatctcctgaccttgtgattcacccgcctcggcttcccaaagtgctgggattacaggcgtgagccactgcgcctggccttttttaagagagagaatttcactatgttccaggctgggctggccttgaactcctgggctcaggtgatcctccttcagtcttccaaatagctgggactataggcatgtaccaccacaccctccttctcttactcttcttataaagccaccagtcccactcccatgataactcattaatccatgagtgaattaattcattcatgacccagtcacctcttaaaaacccagcctctcaatactgccacactggggattaactttcaacatgagttttggaggggacagatactccatccatagtagttattattcctgtttttacaggtggggaaacaagactcttaagaagttaaatcacatgcccaacaccaacaactaataagtggcagagcttggacttgaatccaagtgtggctgaatccagggcccacccttgaactatgctgtgcaccttacagcacaaggcctttacagggctgtctacctgtgagaggaagccttaacctgtccttggcatgcagcttaatctctgagggggaaaaaaagaactttccagctttcttagaagtactagggggcagcagggaatgtggagagcctgaaggaaagctagccctgggatccctctgagaagacaatctgcttgagaaaagcaaccttggaggaggaggagcctttggatacagaacctactggattaggcagctgggagccagccaactagtggcgtacaaagctaactacgttgtcagcactgaatgtcaaacagtgcagtgacctcatgtcagagcacaaacaaaacatcactcagtacaaaaatccctgaacactaagggttttctgtcttcttggatgaccattacagttggtgaggcttcaggtccctggggatctgccatattacagtggctataaatgagatttctttttcttttttcagcagcaagcatctaaagttgagaaggtgttttttaccactgcagtaccagtagccagtagcccaggtatgtaattccatgttagccttaagagaaggcaactctgtgggtcccttgaggcacagctaattattgctttgtcccagtttctaaaactttaaaaatctttaaacagcctcagttaaattcttcacattgtattgttggctagagtatttcatattctcacaactattagaagttagtatacgtctggccaaaataccgtgtttaacattctttaactagtaacagttctttccctttcagatacagctttaaaatgtagccagaaaaaaatttttgaatcacagctaatgctaaagagggcagttgttaattcactggactcttttctaattacagtaatgaagaaatagcatctgggtcagagacacatatagagctgaaagttccttttattcaaattctttattttatagattaagacactgggacccagaaaaattaattgactcccccaaggttgtaagtgaatctgtggtggaaccaaagcactagttgtcaggcctccccgttcccaccctgttctcctgcccactggcctttgttttgttttgtttttgagacaaggtctcactgtcacccaggctgcagtatggtggcacgatcacagctcactgcagcctgggcctcctgagttcaggcaatcctcttgcctcagccccccaagtagctgggaccataggcatgctccaccaccatgcctggctaattttcttttttttctttctttttttttttttttttgagatggagtcacgttctgttgcccaggctggactgcagtggcgcaatcccggctcactgcaacccctgcctcctaggttcaagtgattctcatgtctcagtctcccaagtagctgggattacaggcattcaacactatgcccagctaatttttgtatttttagtagagacaaggtttcaccatgttggccaggctggtctcaaactcctgacatcaagtgatctgcccaccttggcctcccaaagtgctgggattataggcatgagccaccacgcccggcctaatttttctttattatgtgtagagacagagtctcactatattggccaggctggtctcaaacacctgggctcaagagaatcctcccttctcagtctcccaaagtacagggattacatacaggcatgagccactgcacctcatcctgcccattggtctttagctctgtcaagacacacaaagcctggctgaatatggagcaagtgttcgtacaacacatgagagaaagagagatgagtaagatgtcctaaaggagctcagagtctcctgggcaggcagaaccaagcaggtcctgtaccgcaaggagagaggtgtggaaggaaaacagcagcactgtgcatgtgtgccgggaggctgggtaccggcttcatccaagctagtcctctgcataggcctacagagagtgggggagtgagctaggtcttgaaagatgagtgtcagttctccagaagagaggtgtccagggattttagtcgtaaggaagagcccacaggcccaggggtataaagaacgtgtcaggaaaagtaggcctccacagggagggtgcaatggagaatgactggaaatgaagctggaaatacagggtgcatctagatcgtgtgtgtgactttctaaggaaacgggactttgtctcgggctggggagtgtccctcttttacctcagagggcatgtggtccaatttaaagcagaacgaagccckaagtgtggcaaccatccttcccatggttcccatggcactctgctctcacctagtccatgtatccctgtccctcatgctcctgcccctgcagctacttgaagagcagtctctcttgcctctctcgcagggagctctgtccagcagattggcctcagtgttcctgtgatcatcatcaaacaagaagaggcatgtcagtgtcagtgtgcatgccgggactctgcaaaggagcgggcatccagcaggagaaagggctgctcctccccaccccctccagagccgagcccccaggctcctgatgggcccagcctgcagctcccagcgcagactttctcttcagcccctgttcccgggtcatcatcctctaccttgccctcctcctgtgagcaaagccgacaagcagagactccttcagaccctcagacagaaacattaagtgccatggatgtgtcagagtttctatccctccagagcctggacaccccgtccaatctgattcccattgaagcactactgcagggggaggaggagatgggcctcaccagcagcttctccaagtgaagggcccatgtgtgctcacctctgggaaaagcgggtgagcaggaggcatgaggtacaatgcctgccatcatgggtcagaaatttgaaggatgaagaaatctactgtttgaaatcctcacctttcagacgtattttctttattcacatcccaggagcatccattttaaggaactattctttggaaaaaaacaaaaaacaaaaaaaacaacaaaaaaagctaagttataagtgaactgtttggctgcactgtatgtcacttttgcttgttgtcatgtgaacttggaaactaaggttactcgtgtgcataaaaattctaaatgaaagggtgtggtttccatcaatctgatgctgcccatcgcttgcactggggtctttgtggatcgggcaggagttttcagtgtgttgggtgttgctccttcctatgtgtcttttgaatctgaggctgacatttgcttggaaggccagacccttgctccatcagagagggcagtggcaaaggccagtgaggcagctgtgagttggacagggttcaggtgagatggtgttgtcatttgtgcttagtgttggtggtgctcagggtggataacacgggtcgttctgcagcccgcttcagcacaaataggcagcttaaggcctggctcacaggctgtggggttgatctggctctgcagaggccctaggcagcttgttgactgctgtctgttgatgacgtgtgtgcaaagcaggctctagcaacatgatcactgtccttgccttcctggttctttctctcggttggttgccagggcttgcagatcgcagtgaattttccttggggaacrtcgctgttttgtcctagagtgaacttgtggcttatggccagtgctgtttggtggtctgccttctttttaatggtattttcttcctcagagcagaagggctgcattttgcttatcagaagaaggtgcagatttaagggaattcatatgaggtggcatgtaattggcaggccaggtgtcctggttccaggttccagccaggctttgggttgccccctccatctctgcccccctctggattttgcatacagcctcatacagtgcaaacaaggatgtgacttgctcagcttagtcatgtgatttatttaaaaaaaaaaaaaaaagaaacacaaaacgatgatcttctactcagggtatagcaaaacaaaaaaattccctttccaccaaaaagcctgaaatgttgcaataagttatctcatttggaatgtttcattaagttgtgttataggaaaaaattgtgtgtgtgtgttatagaattatatccatatgtctgcctttggctccaagtcattgcctcttaaaataaaagatacaatccatactagcatgaaaagtttccctcaacaggctatattaacatagtcatgagtgctgaccaaactcaccgagctcagaggccaggcatggcctgaggtgcagaataggcctctgcctcccaagagccctttccttgccctgagcaaggagtggtgttccacaaacaaggctgctcttctaagccaacagtgtcaggcaggaagcagccataattttgccttgcattttcattccctaatgtaaagggatctgcattggtcactctcctgttctctgagccattgctcagggccagccaagatattattgagaacagataatttaccttggagccagaggccctccctgcctttagcaaggatgttcagggacagacaaagagggcagtggtggtgaatgttgttactgccatgaggagaaatggcagtaagaaatcttaactacaagcagccaatttctcattccaggaccctagccagaataattgacttctttttttttttgagacagagttttgcttttgttgccctggctggagtgcagtggcgcaatcttggctcaccgcaacctccacttcccaggttcaagcaattctgcctcagcctcccgagtagctgggattacaggcatgcgccaccacgcctggctaattttgtatttttagtagagacggggtttctccatgttggtcaggctggtctcgaactcccaacgtcaggtgatcctcccgcctcagtctcccaaagtgctgggattacaggtgtgagccaccatgcctggtctagggaattgacttctttttgaccttctgcactcccttccccaaaaggattgtggcttctgttgaccattgacctcagcagaagttgataaggcaggaggtttccagtcctcctggaaaaccaactgctgagcatgagttgtccttggctgtctctgggcctcgcacccatgggaagttttgaggtagggcccttgctgtttacaacttctgagagagtagtgatgggaccccaaagtaagcttgtatcagagggcagtaatgaccttcccatatccccatcctgtggtcacctgggatttgggttccctggggcggaagtgggaaataggagcccagggaaggacatctgaagcacccacagtttaaatagcgactcttcttggttagccagggctgtgctcatgttgggccctacccaggtcagtggccttttcactctcaaagatcgggggtgacgaagcagcatcttaaacagtgtttaggctgacagatttttccagttgaagaagctgaagtatctgccttttgagggtgactctagattacaagagagactatcagatccaatcagcttttgaaaaatcaggaatgtgcttaaaatgccagtgagtggttgtgaagatcaggtttatttcccaggataggcagtctttctttccctccttttccagttctcttttcctacctgtccttccataagcctggtctctagtgccgaggaccttggagaagagagggcccctagctaagctggagccagaaagaaccttcatggtgagtgtggtttcccaaacttgggaaatgaacctagggtgaggttagggaggatttgtagaattctagcaggtaaaaatcaagcctttttcccctcccatagtaaacttaaccattttcaccctgtacgttatcttctagctcctactaacatctccaattagacaaccgcttcaaagggtgcttagcaccagggattggggttcatggacttaggaggtggtaaggaaactggctggcaccaccaaactgccttagtgaacttggcccttcccaggcaggtaggttgggcattgagggaaggtggcccagtctttgctggcagggtctggccagtctcatgggggcaccaccagtttggtgacagaagtggtgtcatttattgaattccacctccgtttagaaggagatcatggtacaaagcccaggaggggccttaagatgtgaagatctctctgagtaaaaggcaaggggcttctcttcttcacctctgggatagttggtagatcggagagttttattttcagggtcaaggctgtggactgatggggatattggagggtgggtgggttttcctgagagactttgtataatgctgaatgtgtccagagggacaagtttgcagaacctcatattggtatattaaagaaataataaaataaaaaagcactttaggttattttatctttaacccgattgctgcaatttcttttgtgtgtatatatacatatatatactttccacaaagttttattttttgctcagaataaaaagttaaattgaggtgtgaaaagaaaagcacttaccttggtgcaatatgtgtagcttgatggtcgttgtcccatgtggccctggcctggcagcgtttttccgctcaatcagccctgtgctgtgagactgtccatagggaaacactattatgcattctcagcaaccgctcaatctatgcaagccttccctgtgtgccccagggcgccccctcaggctctctgaagaactgctgtgggtcctgttttctgctgactgttgaggccctttttcatcacttcttggtctctcgccatcttttccctcttcaccattacaaaatgatgcctgaaaggaaggaacagattgttcctaggtagaaacctggcaccttctagacttttatatttgtaatcacatccattgtccttaaagacttttccagagtgattgaaaccattgatttgtggaactgcaacaatatttctcaagagtttacaattgtcttacaccaccaatcagaaatatgtttggggaggcatgggtggcagggggcaacatgagccatttccatactgctccccatactacctgtgttggttccttaagcaaaaaggcctccagccttcattaaatcctataaacaaacattacatcccatgaatcattatcaactttcttcctttactccacctcccccattttatcttcaattctcaggctatagaatagacaagttttagaatatacttcagccaaagcagaaagattttcatagatccaatatgcaaatagttctgctgtgacatagatcagaaattgtctgttccttaatatttgggggtggaggcaacaaaactgaagcatatttctgattggttagccattttggcctgtttcctcttgcatgttttttagggagagagggaaacagtcctgtatttcttctgatgccctttggggaagccgacgaccactgggcatttctcactgttactcctgttcaagagagggcttctcagtctgcactgaaaaatgcaaattaaactggatctttatgtcaatgtgtacatagtacaagcttttttactggaattgaggtttaaaaccacacactgcccttttggtggtgtgcctgttgggccaaaaattgggtgataatgtagtgtcactttctcagctcaatgcagtttctactttttcttatgggaaaatttttcataaaacctttttgcaccaaaacccaggggtgttttttgcaatatccttgttatcctcgtagtgtgccaagtcagaggctttctcttgcccttttcctgctgtgttctcaggcctcccaagggctgtttgactcaacagtctacatccttcgttgtgttttggagaatgtgggggtgggggtcagagttcaaggtgtctgttcccttttcctgtgaactctttctagtccctatttggggagggtggctggaaacagatttttgctgaatttctggctcagatcttctagccaggaaaggcaagagcccccaagagcccttttttttgacatacactaatcattggccggggtcttggtgacaacttttaaaatcccaaatagttttatttggattatgtaaaagtaagtgtgaaacatgggaacaacggacttccactgagcgatgtgaaaacgttacaggttcagtacttccaaaggaagaaacctccaaacccaaaaaagaataaatatgaatttgtatttttgaagaatgtgaaataatggtgtttgcttaattgctcattttgtataaacttaatattgtactttaaaatatctgctaaaaagtgaaaatttaactttttggaattgaaaaagcaatattaaatactaatgaaatcctaattaaatgcttatttaaatctggtagtatctgtggcatttcttaccaaccctgcccatagttgacatttttccaccactccccccttcccagccatcagtcttggagaggggacagaaaggaaacgtcggtcaccaggagagtctgcaggtttccttttaatcaaggctctactgaaggtgttttgtggggctaaaagcccccaaaacatgaaatggacatgtaacaccacctggatcccccatagcaggccagaccactctggcgagcactgctggtctgcccaaatctgggtaatcagactgggtattcattggctgcatttcaaagcacagcactgctttcagccaggatgaagtgggagtgaacccagctgctagcagagctgccactccaggctgagagccaagtaccagccactgccagtgaagactggcccctttactgaagggagttgttcagagtccagccaccggccctggggagggagagaagtcagggtattctgctcggggatggtcagggctccgcagctccatcgccagcatcctttggaaagccgcctctggcggagacagccggctgggggggcgctccaggtttggctgagacgttctagttggaacagaaaggaaaaaagtgaggctgggaggcaaggccttggattaggccccacaaggatgtggccatttggcatttggatagtattaactttttcgaaacctctcaccagatcaaaggaggttagggataaagcggcggagacatacttcccccctccagggtaagctagggcttggccagcctagccagtgggcagaccccaccccaccccagcccagcccagggtgggcactaaccccgccaccagccggctccgggcgccggcggcccagctgccgtaacatctcctcgcaggctgcgatggtgtccaggagctgccgctgccgctgctccaccgcgtccagcagctgctgggcgcgctcctcccggggcggctgtgggggtggcctcccgccgagccccagccccgccttcccgcggtccacgccggcagcctccctgcccgggagagagcgagagacagacggtcagggccggcgcttgcgcggggccaagccccttcctcccgccccgacgggccccctctcacccccgtgaccagtctgagcccgggccccattccatctccgcttgcgcggcccgaccaccgcccccctttcggccgcccccctccccagcgctgcgttagggcttcgcaaggctgcgccccgccccgtccccaccggtctccttcaatcctcctgggggtcgtggtccctttaagctgcccggcgcagaggcggggccgagtctcctggaccggaagctggctgggagcgtcacttcctcccggaagcgggcctgggcggatgtctccggcgcgtcggtgcagggggatgagggccgcggtggctgccagcgtggggttgagcgaggggcctgctggctcccggagcggtcgcctcttccgcccgccgagtcccgctccggcggcccccggcgcccggctgttgcggctcccggggagcggggccgtgcaggccgcgagcccggagcgcgccggctggaccgaggcgctgcgggccgccgtggccgagctgcgcgccggcgccgtggtggccgtccccaccgatacgctgtacggcctggcctgcgcggcgagctgctcggcggctctgcgcgctgtgtaccgcctcaagggtcgcagcgaggccaagcctctggccgtatgcctcggccgcgtggccgacgtctacaggtaaggccgccccgacccggccccgctaggggcggcaccgcgggaggggtttccggtgacaggcttgggagactgaggcgcagagagcgggaggggcttgtccaggctcaccaaggaatccggaactggaaatatgtaccgaggacttaacgtgccccgggccctgaactac

SEQ ID NO: 97746 - DNA, 57095 bp, Homo sapiens
gaagtctcactatgttacctaggctggtcttgaactcctgggctctaagccccaatagtcttttcatggctcttaggataaaggccagaactttcaacttgtccttcacctggccattggttccttcactagcctcatcttaagtattttcttcttatctccctctgcaccaatcacactgcccttcccagttcatccaatctgtggccctgccttagtgtctttataaaaattatcctcagcccatcccacccccatccagcaatcactcctcatggtttgaccctcagtgaaagcggtgcatgcacacagagaccatccctaacactgcccattcagctcgtgttaaagaacgaattattcaacggtacttgctaaagcacggtaaggccacctttactcaggaccatcatgaaaggtataggaaccatgacaatggaagtttgagtacagagctcaactctaaatatagcatgggcaagtgggaatttatagccaaggagcagggtgggggtcagtggatggaaaattactataagaaaccatcagggctgatggaggattctggctaaattgacctaatgggcttcttgctgaagacaggtatgaaaggaaaataaatcttggggccctcaaatcactaagccaaagggaaagtcaagctgggaactgtgtcaggcaaatctgcctcccattttattcccacataagatagctacaaatataaaaaaagctacatacctccctcataattttcccacaaggaaattccttgtggacaaaggacagacaaaactcaaagttgtccctctggtcacaagagacaactgtatatctgatggctttctctgccctgttgtttcactaagccagacttaggcataagtgactattcctctaccctcctctcatatgtaaattgttgtattcagtgaaaagctaatcagagactcaaaggaatgcaatcttttatctcttatctccctatgacctgagtgaaccaatgtacatcttaaacatattgtgtaggatgtctcatgtctccctaaaatgtacacaaccaagctgtgccccgaccaccatgggcacatgtcaggacctcctgaggctgtgtcatgggcatgttcttaatcttagcaaaataaactttctaaattgattgagacctgtctcagatattttgggttcacataggccaaggtaatcagacatcacctgggggacggtagagaatgaggaacctgatcagatatggagggtgatcagacactgaggacactgactgactgacttagcagtgttgccaaactgacttagcagtgttctttgctaaaaccggatcttacaaggaagggcgcagacaagcctagggaaaggctcagtagcctgacgaaagtttgaccaggcagagaatctttgtcactaggcgaggatcctaacataagcattcatactatcatgtttcttttcttcttatttcaatctataattctatttgcataatgatgttgttataggaaaggggtcctgatccagaccccaagagagggttcttggatctcacgcaagaacgaattcagggtgactccgcagtgcaaagtgaaagcaagtttattaagaaagtaaaggaataaaagatgatatactaaacaaggagtggattactcatgcctcccctttttagaccatctagggtaacttcctgatgttgccatggcatttgtaaactgtcatgaagctggtgagagtgtagcagtgaggatgaccagaggtcactctcgtcgccattttggttttggtgggttttggccggctcctttactgcaaattattttatcagcaaggtctttatgacctgtattttgtgctgacctcctatttcatcctgtgacttagaatgcctaaccatctggaaatgcagcccagtaggtttcagcctcgttttgcccagctcctatttaagatggagttgctcttgttcacatgcctctgacatttcccccttgtcttttataagagaacccttaatcctaagggttgcagagggacgaagatccatcttttgtaactttttcaggctgaataggggcgatgatattcctgcctaactatgagggtctcttgcattcagggtagagaggagttcagtcagagaacatcagtatggtaaggtccattcataactgttgagttttgacaaaaggtgatatctggaagattaatacgtgtttaagaaaacatttagtaagcttgtcctgtattcctacacaaagagtataacagcaatatattccacaagggtagagcaaaataagtaaagttgttccaagtaagctaaattagaaggcttttcatgaactgggcagctgttggaactaagctgatatggggttattagctgaatgtgatgtgcccggaattagaatactgatccagatttttacattacccatcccttttgtttattctgagcagcagtcagagatcattggttggttcacaggaataagcagggttagcctaaattgcagaaacgaacttaaaaacaactaatgagactagaatttaataacaagtataccacagtacttgaaacataatatttctctctccagtttctcatttttactaaagacaaatcatggtaaggctgatttgctttgttatacttggcctgattatttgtataaagtgcaacaaaaataattatttttcacataggctctttttaaattagctttgatggaactctgctctatagaagtaatcttagacaagactttgtaaagccaagctcggccatgtgtttgtatcctcaaatatctatgagttgagtaaattcctgttctcttgaggtcccaagataacttaggactcctggacctgccagaaagtgacattctttacttaccacaggtcattctttacttacctttacagggacagttgcagacaagatctgaggccaattctccaagtggcttttattggctttacaagtcaagtttgattccttaaaggaaagcacaccattccagttaaagccgtggtgaaataaccaatttatccaattgtgttctgctacaaaagaaaacagatccttattgcatgtatgcaaataactatattgccataaattaagaatactcacaaatagtttccaaattttggaaaaatcaggtagagagaaacaaatatactccaaattttgttcacagaagtatactcaattgctaaaagctgtaaatagctcaaaagaaaagtttccttgactctgatattcatgaacattccagctctacatgagggttctgaaagttgtttcctctattctaatgttacaatttccaaagttattggaaacctgcatttgggaacacctgctggagttctacagttgattataaaccaccttctaaagaggattagaacaagaaaacaattgtggatgataaaaagttttaggatagccactattaaagccacaattgataaggaaacttggttacctatgtggcacacaaaattttacataacaattataattattaataatctacactaagtcatattagaattataagagtttctcataactttgtaacatataccaataacacatttatgcaaatatagtccaaaaaaagcaaaaaaccatttcatatttggcaatgcttcctatatgatttttatagcaaataagccaaattttacctttacattaatgtgctattaatgttaaacccaatttttaataaaaccttatagacatatttacccaattttaatgttaaccataaggtaagagtcttataaacctcgtataaccctttacaattgtgtgtgtgtgtgtgtgtgtgtgaaagagcagatcaactctaagaaaaacctgttgtgcttttattccaatgtttaatttatcgaaaaactgaataatacccctgtaactttagccagtatgttcacatacagaatctcttacaattaatttttataaaccttccacaacttatttaaacctttagttttttttttacttaaagcaatcctttaacacttaaatgtaggcagagaaaaatccacattcccattacttcttataatctttcaccaaaaacacattttactttctttacacaccttgcatgtaaaactgtttctttagtagttttaattacatgttataatgttaactttttgcaacttttatttttggtgaaaaccttggtaagtaagagattttaattgtgtactaggtgtggagcctagcctaggacacaacaggcagaagtgcagataacagctgactctctagcatagctagagggcatagctaactccacatgtccacagggctcacccttacttaagcaggcaagttgtacagtaagagtcatagggcattgtatgaagcatttaggaggcctaacaatccgtgaattgtacaacatttcttgcataaaatcactttcataaatcctttcacaacttacacagaccatctgagaccatgtggatatctagcccaactccctggatcccaccagtctctaagttccaagaaggaagaaactttatttgtttttctattttttccaagtgactagcacatgcatgaatgcatgcgggatgctctgtaaatatttgtgaaagaaatggagagaagaaagcaagacaggaaggaaagacctaaagaaaggaagggaagggtagagaagggaagacgactgaagggaaaggaagaagggtaagggagggagtctaagggaaggtatgggagagaagaaggaatgacaagctgccgaccattcaatcaggttacttccagagctgtctgcttccctgaggaagcaagagggtacatttcaaagtgttatatggtacttaagggcttggagctctaaattagctagacctgcgtttaagtcccactcagggctgggcaaggtggctcacgcctgtaatcgcagcactctgggaggccaaggcgggcgaatcacttgaggtcaagaatttgaaaccagcctggtcatcatggtgaaaacccgtctctactaaaaatacaaaaaattagctgggcatggtagcacgtgcctgtaatctcagctacttgggaggctgaggcaggagaatcgcttgaacccaggagatggaggttgcagtgagccaagatcaagccactgccctccagcctgggcaacggagtgagaccctatctcaaaaataaataaataaataatataaataaataaagtcccactcaactttgtagccatggacaaattatgtgcttctcttttcctcacgttacttatctgtaaaatggggctgatgggagatgtgaagacgttgcaacaatgtttggcacagtcagcactctaaatgaaagtctgtttagaaatttattaatttttaaaaataattatttatttagagacaggtctcgctctgtcgcccaggctggagtgctgtggcgtcatcccagctcaccgcagccttgaactcctgggctcaagcgatcctcccacttcagtctcccaagtagctgggactacaggcgtgcaccaccatgcccggctgctttttaaatttttttgtagagatgcggcacgggcgcggcaggtttcgctatgtcttccaggctggtcttcaactcctagcctcaagcgatcctcccgctctgaccttcgaaagcgcggagattgtaggcatgagtcttacttgcaattattggcccggacctggggaaatttgttaaaatgcagattctgattgagtagatctggtgtgggagccaagtttctgcatttataacaagcttcccaggtagcaccaatgttgctggtaaacagaccacactttgaacagcaaggggcccgcccctcgcttggcttgccgctcacccattggccgagagcggcagaccttccaccaatctgctcggctcagaagggagcgggccaaagcgcagagccaatgggcgcggggcttacggtctccgggatacgggtgtacacagcagcggcgtcgcggcccgcagccccgcggcggcggaaaggtaaccgacccgccctggggtgctgcgtgcgctgcctgctcccgcctgaggaaaacactgcccatggcgcaaggccgggagcgcgacgaaggcccccactccgccggcggcgcgtccttgtccgtgaggtgcggtgttcacggccccgcgaccgatctgggtctcgcggaacmtcctgccccamgtcccctcctccctcctctccctccggttccttagggcggctttccccgcagcttcgacctcttcccctctgcccccagtgccttccctcagcctccctccccgtgtgacctcccctgtccgctccccatccccttgttccttgaccccgtccccagttgtctttcccactccttattctgcgaccctgaccctccgtctcttacccagcaacgtcccctgcacccttcatctcttccttctagctcaggattcccgctagtgatccgggtcttctgatcacatccccctccccctccacctggcgacagcccggatcccgtccttgctacctttggtgattttccccaaagttaggtccctgaatcctttccttctaactcctatccactagctttggatttatttgcatttatagtagcctttgaaaagcatcaagcactgcgcagatataggtggcattttttcccctacattctagagtgttcctcccagcmcccacctccactctatacagcatcccctgctagtcctggacactctaatgtctcgaggtttctcaccaaaccagtgtccttcacttgccttttccaccatcttcaagcatacctttaatatttaaataaaaatagaatctccttcatctcctctcctttctagcatacacctagcacgcactccttacttgagagtatgttctttttgtgtgctagcctttcattcacgtcgacttcattccttttattttctacgtttatctgtatttttaaatctaaaatatrgccacatactcttcatctgtgtaaataagcaattttcctactctgctaacaaccacaaagcaggctgtcctatgcaaagttgttttttaaagtttatttwaaaaaatcaaactaattataaaagaatggcccaggatgccactgtgttgagatcaagctcttttctctgttattttcactttttgtcttccaagtatagaagaccccagaagtccttctgagactttctcaggtttggtcagagagtttcctttgctgaaaaagttatctgaagaaggcctgggagacctacggaactttaggtctacatttaaatttctataattcattgactcaaatggatctcacagccagcatgtgtgttcttttatcttagaaattgggggcagaaaggacatgaaaatagaaatgtttcaaagattttgatgaccctttgctttgttaaaaaaaaaaaaktatttgaaatgtattatattgatgttgacatatcttttcccaaagatgggtgcaaggattccctaagcagaatgttcattttgtcaacgacaacaccatttgctacccttgtgggaattatgtaatatttattaatattgaaaccaagaaaaagactgtactgcagtgtagtaatggaattgtgggcgtcatggcaactaacatcccctgtgaagttgtggctttttctgaccggaagctaaaacctctcatctacgtatacagctttccaggattgaccagaaggaccaaattgaaaggtattctagagaacccttcctctgcccataattgaaggattttgtttaaagagttgactaaatctattataagtgaagatttattttttgaaaggttttttttgtttgttttttgtgtttgttttgagatggagttttgccctgttgcctaggctggagtgcagtggtgcgatcttggctcactgcaatctctgcctcccaggttcaagtgattctcctgcctcagcctcctgagtagctgggattacaggtgcgcaccaccacgcccagctaatttttgtatttttagtagagatggggtttcaccatgttggtcaggctgttctccaactcctgacctagtgatccgcctgcctcaccctcccaaagtgctgagattacaggcatgagccaccacgcctggccccatttttttttttaatatacatttttaaagaaggaatcaagctgatcactgaggatttaaattatgttagctagagccttgctgttcaaagtgtggtctgtttaccagcaacattggtgctacctgggaagcttgttataaatgcagaaacttggctcccacatcagagctactcaatcagaatctgcattttaacaaaattcccaggtgattcatatgcacattaaactttgagaagcactgggctagaagactattgcctttttcagagcaatgayttttttttctttcctaatatttgttgaaaatccaggtgaattgatgtttgtatagcttctaaagtcaagtctctgagcctcaatttcctcattcatgaaatagggataaagatggtgtctaatgtgaaggctgcrgtgatgatgatagatgaaawtatataatatgctgtatgtgtatgtatgccaagtgctcaatgttgcctaccatttgaattattagtgtttattttatttattttattttaacagagtctggctctatcacccaggctggagtgcagtggcatgaycttggctcactgcagcctccacctcctgggttcaagtgattctcctgccttggcctcccaggtagctgggattacaggtgtgcgccaccatgctcggcttttttttttttttttttatgtttttggcagaggatggggttttaccatgttggccaggctggtctcgaactcctggcctcaagtgatccacccacctccgcctcccaaagtgctgggattacaggcgtgagccactgtgcccggcctaatgactctttcttagatacagctgacccacactgagctgctgcacgtctgctggagccaccagctaatgattccttcatttaacaccccatgggcagaaagctcatgcttgaggctggacttagctctgtagtcttaagggtcaaataagtgtttggatgaagtcagggaacttcactataatttataatactttgtttgtggtgaaatttgcattctcaacagtttaagacaattttcaaaacataacccattcacatgttggggactatctaggtggactataccctttatctttaaaatttccccaggttggttatttggctgtagttctgtttgaaccaattgaaagttagttcaaaccaatacccaggagtcttactgaataatgatgccctaaaggaattcccagtaatactaatcagtaatattaatcagagagacctgttatcactattatttaatatcaacctggaagttctagccaatgcaacaaaatataaaactgaaaaaaatatagctatgggaaaggggatgatggataatgcgatagtctgctaggactaacaaaagaatgctcagtaagatgctggttttgaaataagtacccatacaattagaacatatacatacttagaaataattcaaaaaaaagtgtgagtgacctaggggaagaaaactacaaaaatcattgatttaaaatatttaaatatatagaaatatattcctggatggaaagcctggttattataaatatatttctgagatttgtcatagaaagtaatttgtaggtttatcctatgttttagacagcaaggagtactcaaatgattccaaaattcatctgggaaaataaaacatagagaatgagaataatttgaaagagaatgatggcaaggcagagggtcattttaatattatggtgccatagtaattagaagtatggcactggtgcagggatcaccaaatcagtgggagagttgaagacttgggacagaatctaaagtatataaaagctgagtaaatgaagaaagaggctaccaccaaaaagaaggaggaagagaaggaggaggaggaagaaagaagaaaaaatatagattattcaacagtggttaagaaaactgcatattttaacaaaagtatcaagttagatactcatggtctatatcagatgaaaaaaagcattaaatataaataacaaatccacttgaaaatagtagaaaatatgggccgggcacagtggctcacgcctgtaatcccagcactttgggaggccaaggcaggtggatcacgaggtcaggagatcaagaccatcctggccaacatggggaaaccccatctttactaaaaatacaaaagttagttgggcatggtggcgcatgcctgtaatcccagctactcaggaggctgatgcagaatcgcttgaacccgggaggcggaggttgcagcgagccgagatcacgccactgcactccagcctggcaacatagcaagactctgtctcaaaaaaaaaaaaaaaaaaaaaaaaaaaagtagaaaacatggtagaatagaggagtgattccaggaaggggaagaacttttcacacaaaacaaaaacttagaaaagacagacatatttgattgtatatctgttttaaactgattaacatcaaaaacaccatgaaaaattaaaagggaaataataaaccaggtaaaatatttggaacaaatatgatcaaatattttcagagcattaatgaaacaagaacaaaacaaacagcctcttagaacaatggaaaagaaattaacccagacaaatcactaaactccaaataaccaaagacatcaaaaaatgtttcatctcaagatttgttttaaaaagtgtgatttaaaccaagatgctatttttctgcctatcaaggtcacaacttttttatgatcataattgctaggtagaatgcagtgaaattggtagcactcttatttgctgaaggtgggactataaattgatagagtctttctgtgaaataaatattgactctatttgacccagtatactcacttcaagacgaattcaatttttaggaaatggttagaaatatggtcaaagatttacatgcaaatgagcttaaaaagcactatgataatagcacaaggttggagcaacctacatctccagtattatggatatagttaaataaaatatactataaaggggtattatgcaaacattaaaaatcacacttttaaagaagtgttaagataatgataaaatggtcaatataacgtaaataaaaaaccaataggaggcaacactatgatccaattccatttaaaaatggattatcatatattatatatatatgaygagacagagtcttgctctgtcccccaggctggagtgcagtggcgcagtcttggctcactgcaacctccacctcccaggttcaagcgattcgcctgcctcagcctcccaagtagctgggattacaggtgcttgccaccacacccggctaatttttgatttttagtagagacgaggttttaccatgttggccaggctgctctcaaacttctgacctcagtgatccacctgccttcccctcccaaagtgctgggatttcaggtgtgagccatctcgcccggcctcatatataatatttaatctatggctagtatagctataaaaagcaaagttatatttaaagaaaatatatatgtatgtattttttcaagtaaacacagaagaaaagactagaaagaaatttaccaagtttggtagtaggattatagagggtatatttttctctctttttttttggcattttcttcaaataccatattttctaagatttaaagaatatctaaagttggtcatcttcaattgtggggggaaacgtctgtttagcaagcatttaaaaatcattaagatctctgcctacagaaaaactagtttttgtagygaatgctcaataaatacattttttctttgttgattagactatgctaaatatattcaataaatgacaaaagcaaaattttaggattatattatggtcaattaaaatgagaatgagaaaaaaagcagaaaacagctattaaaaatccacagaacaagcaatagagacacaaacatacaaagacagactgagatgagggcaaagcttgcacctgtggaaccccactgaagaacagcagatgaagaagagggaaaatcagaccactctgtactgggaagcagagacaggcgcttcttgttttggcctccccatgatacgcattttaaaacatgttgttgctaagactttggaattcatgttgctttttgtcaactataggtacaaaggagtatgtcactttttatagctgttccaaaagctggcagatattaagctaagggccagatatggcctaagataatagaaataaggaagtaagctagaattattacaacttcccaagatatttaaagatgtctgaataactattctaattacaatgkctcatatatttatgagattattcttgggtcatttcagaccatgctgggacatacatggtgcggtatgctcagttctgcattgaagtctagagacagtaacctaatggtcttaattcactttaatatattttacaaatggatcttagctttgctctaagctttctgttcatggtcttagaaattagccaggatctttcttattytaatagttaaatgcttttgaattacgtgraaatcattagcaaaggaaaataaactgtaagaccatagttaactgaacatggtcttaacataatcaaatcctgataatggattttatattttaggcaacattctcctggactacactttactttcattcagttactgtggcacctacctggctagttactcctctctcccagaatttgaactggccctttggtaagtttcagcatcctgtggaattccttttactgggttacattttcctcttactcttctggattttatcgaaggaaatagacatgaaaaatctgaaacaaggaaatatagaaggaaaaaatgccaatcacaagttttaatacagttgctatgtttaggcataaaatttggcagtcagagcaaaaactatataagaactaaattagttattgtcattctctttcattaacatgctttatgtattctcagatagagaatatatttataaatacataaagtttcacttaaaaaaaacaaatggcatcttggagttgttcgtatgtttcctgctaatattgaaattgagatggtctctatattagagttcagtttaaagtaattgttgttagagacattagaacaattatatgttcagagagtggaacattataccacttttgcccactgtatgggaaatcctgtggttaagacacatttctagtctttcctggatcatttcacgtggccaactttaaggctatactcccttttctatccatgatataagccccttcaagaggatatttttcttattaaggggaagtacaaaatattccagaaatgattaaaggataacatactaacatttcttatacaaaaatgtaagtacctagattcagggagccacatttagtttatgtaaatttttttttttttttttttttttgagatggagtctcactctgtcccccaggctggagtgcagtggcacgatctcagctcactgcaacctccatctcccaggttcaagcaattctcctgcctcagcctcccgagtagctggggttacatgtacccgccatcatgaccagctaattttttgtatttttgtagagacggggtttcaccattttggccaggctggtcttgaactcctgacctcaggtgatccacccaccttagcctcccaaagtgctgggattacaggcatgagccaccgcyctaaaatttttttaaaacagctttattgaggtataactaacagataatgaactgttcatatataaggtaaatactttgataagttttgatttatgtataaacccatcaccgtaatcaagataataaatacatccatcggccaggcgctgtggctcacacctgtaatcccagcattttgggaggctgaggtgggcaaatcacgaggtcaggagatcgagaccatcctggctaacacggtgaaatcccatctctactaaaaatacaaaaaattagctgggyatggtggcaggtacctgtagtctcagctactcgggaggctgaggcaggagaatggcgtgaacccgggaggcggagcttgcagtgagctgagattgcgccactgcactccagccttggcgacagagcaagactccatctgtaaataaataaataaattcatccatcaccccaaaagtttccttgtgttccttcagagcttcttcattagcctttgtcagtaatgtagtttctgtcactctagtttgcattttctggtagttcatatacagggagtgacacagtgtatattcttttgtcgggcttctttcatgcaacataattattttgaaattatcttatgttgctgcatrtatgtgtcagtagtcattcctttctattccatggtatggatataccatactttattcacctgttgatggatgtactgtattagcttgctagggcttctgtaacaaagtatcacaaactgagtgtctygaataacagaaatgtattatctcacagctctggatacacaggataggaagcagctggrrgagatgacaagtgcataaattctgatagttccaaaagcagaaggctccaattgtccttactaagarcaatctgtaaatattaaaaaagcagtgaagtggaatgagcacaaatgtgttagtgtaacagacttagacctgaatcctggctccacaaattactagctgtgtgatcttagaaaggctgagccttagtttcttcctctgtaaaatgggtacatcaatgtctcctaaatatggtttttctaataattcattgactaaaagtatgcatcatacctaatagtgtctattacattatgtttatttaagtcagagtttcaaaaatgatgattgttaggctaattctgggccaccagtgtatttttttttggccataaaatatttttaaaattggaaaaatttagagaaaaagttatctgtataacctttctcaaacacaggcaaccctggacctgtattcccacatggtcacagtctggttgggctagtaagtgggtgctcattctacatgcccaccaccttgagcaggggttggtaaacgatggcccataggccaaatctggcccaccacctgtttttgtaaagttttgttggaacatgtttatttgcttatatattatctatggctgsttttgctctatgatggcagacttgagttgtaatagagcccatatatggtctgcaaagctaaaaasattaactgtctggtcctttatagaaagagcttgccaacccctatcctagaggtgtttatactcagtacatttcattcatttacattaacttcctggcccctataagcatttgagtttgctcactggatttaattcattcaatacatttgtatctcctgcttcctgctggatataaaatgtatctcaggtacattttaggtatatctgagccttctgtagagggcatttttgataagctgaggtgagactgagactatgggtaggtagtatctcctcccggtcccaacccttcccctagatttgtttgcatgtcttaatattcatgcgcacttctatttaggaaatttgagtcagaggggagagacaagggggcaggagtgaggagggcaggggaggacagggtagatgctgtgcagaggaccagacactgctctctcatgaggagattctcagtgaggctctgcggcagcagaggtgccctggggcccaagaatgagtatgaacagagctgggagacagacactcttccagcctctgctgtggaaacccaagatgagaagctttgggagcaaccccgatggcaccctcgggtgctgcatagaaatgtgagtgggatttaatcctgtgatgaggcccaatagtcctcttcaccaagtagctttgccagcagtgggcctaaacacgagggagctagaagatgaacagggaggaggatgcaactcacttggtgacagcagttagtccgtggaccctggggactcccagaaataatttagtaaaagttcaaaagaggtgaaacttctggaagtcagaccaggaggagcccaagtaccatgatttgactcctggaagtaaattgatctaagaagactttacctttatgttctaatgttttaaaagagcagaatggattcatatattatttgtgtaattaaaaataacaattctgaaaaagaatctaaagtaggtggggaatggtctcatggttatagtcccaggctggtggggtctgggacatctggggttcataagcaaagacaatgtgctatacaccagcaataccaccaccagcagtttcatcagagaggcattcactgagatttccaatgggttagtgcatttaatccctgcctccccmctgcagcaacccccatgagacatctatgatggtcctcattttaaagaaagagactgaaacttcagagagatgggatgttaaaggagaattttcaaacagattataagatgtaagatggtttcatataactccttaataatggaaccagcaggaaaacaaaagaagctggtccctgtcttagtaagctgtcacaaaatcccatagactgggtggcttataaacaacagaaatatgtttctcacaattctgaaggctagaaattccaagatcaaggtgccagcagcttcagtttctggtgagggcctgcttcctgattcatggatgataatttccaccatgtcctcacatggtagaagggatgagctagctctcttttataaggacacttatctcaaccatgggggctctgcacccttgacctgatcactccccaaaagtcccaataccccaataccatcaccattggggttaggatttcaacatataaatttggtggggggaggcagcacacaaacagaccatagcaattcctgagtgcttaaaagaacacacacacagctgggcatggtggctcacgcctgtaatcccaacactttgggaggccaaggtgggcggatcacctgaggtcaggagttcgagaccagcctggccaacatrgtgaaaccccatctctactaaaaatacaaaaattagccagagtggtggtgggtgcctgtaatcccagctactcaggaggctgaggcaggagaatcacttgaacctgggaagcagaggttgcagtgagccaaggtcatgccactgcactccagcctgggtgacagagcgagactccgtctcaaacacacacacacacacacacacacacacacacacacacacacgctcactcatatagagttagaaaaagtagtggttacataaaatttctaggttagatatgtgaatgattatctttccagaggtctctaaaaccttaggaccttaaacttaactgttctaccagggcatacaatcatagcattgaacatgttctagagtttaacctgtaaaagcatgcctgcctttatcacatcgaggctgttagtatgtattatgacaacaaagttacattccccaggagtgtcagatatggggcaaagcaaggtacaaagtctggtttttgttcgaggaggcttgctggaaaatgcttcccagcatgatatgagaaatcaagccaacacaatttttcttttttccaagtttcattttttttttgttcttatagctacttgcctaaacttatatagttggtgagttgctgagtgggctttaaactcatttggtttctaagctcttttatagctttcattgatctaaggcacaatgggaacctgtagtaggggcatctcacatagtctgttggtggaggggaatggtcagggaaggcttcctggaaggagaggtaatgtttaaacagatacttctattaattagctaggcctgccatagcaaagtaccacagactgggtggcttaaacagcatgcgtatattgcctcccagttctggagactagaattctgagatcaaggtctcagcarggttggttcctactgagggctgtgagagagaatctgcccccgcgcctctcaccaacttctgctcacttgtttgctggcagtccttggcttacagacacatcacccagatctctgcttttattttcacatggcattctccctgtgtgtgtctgtctccaaatgttccctttatataagaacaccagacttattggattagggcccatcctaatgacttcattttaacttgattaccctctgtaaagatcatatttccaaataaggtcacattctgaggtgctgggggttaggatattaacacgggaatttgggggaggcacagttcaacccatagcaatacctaaaggatgaacaggaatcagccttgtgacgrgaagaaagaacatcctaggcagaggaatggcatgtgcaaaggccatgaagtagaaaaagcacagcaggtttcaatgaaaaggtcatgataacgggaacaagagatttgccatgagagaggcaagcttggagggacagtcagaggtgagcttatgagcagccctatatgtaggtgaccatgtggtttatcatccaaatcaggatgcttttgagagtgaaagagggtgttgctgatgaatgcagggcactttagcctaaactgggtttctcctaggcatactgggaaggatactcacactccatataagctaggctaatggacaaattctttatcctaaaggcagtggggagctactaaagggttttaagcagggaagtgacacaattatatctgcatttaagaagattcctttcagccaattatttccaatgaaagtatctccaatactttcgtactgtggaaggtatattggaaggaaacaaggcatgaacatcaattaggaggctgtggtggtccaggtgagagatgactgtgtcatggactagggtgggagtagggatggagggaagtgaaactatttgggaggtgtttaggaggtagcatcatgagacttgtaactgactaaatattgggtgtcgtgctgaggaagagggatgggtctagggttatatccagagttgcgtgtgacttgggcaacttagggacactctgatgctattcagagagatactgagggcttgggggcagggaatttaggggaggcaatgggggaagatgagctgggggacaaactgaactgagagtgcttgagatgaacaaacggagatgtctagttggcagctgatatatcagttaggacttaggttcatttgtggtcacagaaacccaaatcaccaacatgtgtttccttctgtcacatgcagttgtctgggcacgagcagctgtggwtggtgtggtggctcctcggggtcagcgtccagtctcccgctgtcatgctgctcggctgttcctagggtgtttctctcatctctggtctataatgggttaaatagtagagatgagggcaacaccctaggaacagcagaggaaccctaaaccaccggtgtattttgggagccaatggggagggaaaaggatgaggggaagggcacaaaccttctgttgaaatgcagggcttgcatgaaagagatcattgcctgacccagggactacctcaagggcttttggtgaggacaagtgacagtaggaagatgcaagagcctttagtaccaaggttctcaacactgactacatgctggaatgacttgtgaagcttttaaaaaatgttagtgcccactcttcccctctcccctcggccagttaaatcagaacctcagagagcaatgtgccttgagatgccttgaaccactgcttgagaaggaaggacaaacacattattaccttggaagaattgcataaggcttatgacttgaaaaaaaattctttttggaaacacaagcatttctttcctttttttttttttgagacasagtctcactctgtcacccaagctggagtgcagtggtgcgatctcggctcactgcaacctctgcctcccgggttcacgccattctcctgcctcagcctcccgagtagctgggactacaggcacccgccaccacgcccagctaattttttgtatttttagtagagacggggtttcaccgtgttagccaggatggtcycaatctcctgacctcatgagccgcccgcctcagcctcccaaagtgctgggattacaggcgtgagccactgygcccggccttggaaacacaagcatttctttaagaatgaccaggtgttgccatatgtatttacggcgsaagcaagtgttgtctaagcagtttctctgtttgcttgtcatagcracatttagaaactcgaacatgctttcatttatgtaaatagtttatgaagctttgacaacaaatgtaaacagacctgaaattataaatctgctaaatttgtattaagggtattaattattgagagaaagtccccttcctccacactcaactcctatggcaattatgaactccattttacccagaacacttaagtgcctcagcatctgtatgatacagtggagcaggtgctggcataggtaccagctgacctgatgtatcactagctctgcaggatgattgccacatacatggaacacctgggagtgctggaaatgtaccgggatcgaagctacaaagtgtgttttcattcgcagtggaggccatgtcaagcaacggaaggtccagccctcttgcgggtgtggtgagaggctctactagcaaagacatgggtgccggagtgggtcctatgtagcatgcgagtgctgtagagaaaattcagtgatgtacatggctctgatcctggacacaaaatctatactggagaggaaatgactgctgaaataaggaaattgtatgaatatttaaaatgcctggaacactaaagtaatgatatttcaaaaagaaagaaaaagaaagaaagaaagaaaagaaaagaaaaagaaagaaagaaaaaaatgcaaggcttggaaggtgcacacatgactgccactaacattcattgactggctcggccataagccacagccagcttcaagggtggctaggtaatattaggtcctcattgtgagtggccatatgtgcctggctaatattcagggggttctgttactcagagggagaaatggagaataaatgctgagggacacatgcccttgccacagatatccaggactggtgctcaggagagagggctggagataaacatttgggaataattaagtcaatggatagccaaagtgtgaaatgtaagtaagaacacctcaagaagagcctagggtggaaccttgaggaatatcaatggaagggacccacctaggagactcataggagtagctatgaaaggaggaaggacactaggcagggagggttccagaatgtgcctcagcctggttccttggaaagcagaggctgaggcaagagctcatgcatcccatctttagcagggtgtgtgatcccagggcaggagagccagtatgagggcgtattaccttgctggccaccacttggtaccgagtgcaactggttactctatctcgaaggtggtcttctgagaggttctatgaactgctrtgaatcaggacagtcctcaggcagtgacagactgtgggtggggaaggggagaggaggagatgagaatttatccaccaactcctgtatcccatcgattgaagcttcactgcacagggtggtaattccttcacactttcaggtttgtcgtgattgtccccaggagccccagtgaagccccagtgaagccactgggcgtgtgaagtgggtgtgaggcgaggcacaggtggggtgtgcctacatgaagttagtcaaagtgcacacacagttggacagccactgagtcagcgaggcagaagacggggtcaagggcccagacacaatagagaggatctgtggtgtcccataagaggtgtgtgacagagagtctaagagtgattccagaaggtggttgtggtgaacagtgcccagttctgcagaggtaaagttaggcaatgactgagaagtgccttttggatttaggatgaaggcaggtatctgtggatatagctatgtcaatggaatggtggtgacaggatgcaggtatcctgggatgaggaaagtgtagctgaggaagccatggcggtgactttagaacaacttgctcaaaaagtttgactctgaggagaggggagagacatagaaaggtaagactgagggaaggcttcttttgaggatggtatggatgagcacttgtgtgttggcaggaagaagtcaggctagagggagagttggaagatgcagttatcctgagtaaaccaatgtccctaagaaggcaagactgtgggacccagagcacaggtggtggaattggccttaggtaggaggaaggacacaccttccattgtaaggggagaggaggcggagagaaccatgcagacccaaatgggtagttatacttgagagcaagaattctcagctgatggcctctattttattcatgggaatcaaagccatttactgagattgagaagggagtagaggggctagaggtttcgggagaggggagaatattttaaatgcccattttagagaatgagagagagagaactggccagagaaacatagcaggattggagatcctattgagggtctggtggggggtggcaaccacaagtttatggtgtcactgccatgcacagtcctgtagtctttgttcccatgtctctagcagcccaggctttcagttgtctccatccagggatgacggtctttgccaggtacctgatgcaaaaagtcaaaggatcaagggaaccagagattccagcaagagtgtggttgatgtgttgggcagggcatttgtgatagggaatgaaggatgagggcaggagggagtgaaaggcaagctaagctcaatcaatattagctccagtttcctaatcacaactctgaatggagttctggcccctcatttgagggcatagctcacatttaatttttttcttttccttcatctagcaagggactttgttcatggtaggagttcaggatattctcttaaatgggtaaatgaataaatccattttaaaatacaccacwttatttatttatttatttatttatttatttatttatttatttttgagatggagtcttgctctgttgcccaggctggagtgcagtggcacaatcttggctcactgcaacctccgcctcccaggttcaagcgatgctcctgcctcagcctcccaagtagctgggattacaggcgtgtgccaccatacccagctaatttttgtatttttagtagagacaggtttcaccatattggccaggctggtcttgaactcctgacctcgtgatccacccgctttggcctcccaaagtgctgggattacaggcgtgagccaccgcgcctggcaccactttaattttaaaaactcaataaatgatcaattggcatcgatgagaacagtacccccagatccatatggagtactcacatgtagtacttacagattcaggcacttacacttgttttgtarcaaatgtgatgatatatttcattttctaggtttggctgagttaaattgcaaaattattaaagaagataaaatagccttggtatagcatatgacagtatagtgtttttaaaacatagtttttttgctttcttaggatacaatacaatgataagcataaktatttataaayttgacattaaggtcattgattatataaattgtatcataaattatatcccaatttatgtaaattaaaaaatagataaatgttctaaatacatgaaattcaaatgaactttttttcatcaaatgctatttttctctaaggaactgggaatcgagtatcattttgtgtaagaaatcacagcctggaatggatgtgaaccaaatgtcttttaaccccatgaactggcgccagctgtgcttatcaagtccaagtacagtgagcgtgtggaccattgaaagaagtaaccaggagcattgtttcagagcaaggtaggagcctttgttacaacagtagcaacatggtgstctttgtttgcattcgtgtaatgtgattgggtcaatttgatgaattaagtggctttatacatacatatatatgcatacacacacatacacacacatacgttcagcttatcttgttataacatctttctacatgcgtgattaccttggagtggttgtttgcatttcaaaagaattctctatgacttgtttcccaattaatttatttaaaatattaagttctctgagagctttttccaacatgatctaattttctaaaattttatttgtccttactattttaaaacatgcctgttgtataaaaaggagagttaagacttttgctattactcagatgccctactggaatttcaaaaataagaaatggttagatatagaaagtatgcagattggccgagtgcagtggctcacgcctgtagtcccagcaatctgggaggccgaggcaggcggatcacgaggtcaggagatcgagaccatcctggctaacacggcgaaaccccgtctctactaaaaatacaaaaaattagccgggcatggtggcgcatgcttgtagtcccagctactcgggaggctgagacaggagaatcacttgaacccaagaggtggaggttgcagtgagccgagatcgtgccactacactccagcctagggacagagcaagattccatctaaaaaaaaaaatatgcagattatacattcagacacattatccgcaagcaaaagggtagttgtgtatagtggagccatgggagttacctgtttaaatagaactgggtcaaagagaaattctgtgacaaatgccgtggtgataatgggtgcttttgttgagaaagagctcggagactcaaggtgctactgagctgaccattttcagtgtactccatgaagtcaaagttgaagagatgttggatctcttgatttttaagagatctcaaaagtattcccttgaaattgcaattttgataaatcgccttaagagaatctaaagctagtaaataaagcttttgaaatggagagccttaagagaagcctttctgctcagtgctctttatgtctcaacttctttttcacagtaacccattgaatagccaaatctgtctctagtgagagttgacaacactgcaccttttaataaaagtgggtgatatctctatcagatccttgtgagggcaggcaagtaatttatcacacccttttctccctttgcctccctcaaacgttctactcaagttctgaatactgagttgtgacttttctgtaagcaaataaaatgggagataaaacgagtggattgtcctagttcacaaagcaagcaggattcaaacacacttcagccttacatttgagtagtaggtgctgtttttatgtgattgtttttcaaaattgtttatcatttataaaatctaggcaaggaagttttgaatttaatgcatgaaaccacaaattctctaaattaacctttataaccatattataaattaaaagtagatatatgataaatttgaaaatgaactcaatatcagagattataaaagtagctgaatacagcctgaatatatgtttaaatatatatttattttagtctacagtgtttttcatttgaattagttgccaacatttaaagtttaagagatttctcataaatatccaggttatagtattctcttgaaattttggaatcaaaattctcacatgtcaacaaccctcttggcttgaactgagtggtccctgccaccttgaggagggacaaatattttcccattttccactgtcctcaccagtcacatatcacctgcccgaccctcatccagtattcaaatttacaactcctgctttagatattaactttcaaaaatttttataatccctcagtacttaatttaaaactgtgtaacttgtctttttacaacctgttatatatttttaaatctatcatttggcttttatcttcttatttgatttttgcaagttataatacctccccacctcacttaaactgatatgcagtggttgcatcaataagaagtttctgttcatctcattgttctgatgcctyttttgtctacaggtcggtgaaattacctctagaagatgggtcattttttaatgaaacggatgtcgttttcccccagtcgttgccgaaagatctcatctatggtcccgtgctgccactgtcagccattgccgggctggtaggcaaagaggcagagactttccgggtaattacctggcacctcttcctgtttgcctaatgggttgaggtctaggaagcctgatctcatttgattggcataaccatcccttgagaaatgcaggatacagaggatcatcttggtttttaatatagattagccacagagactgtgagagatgaagactctggagttttgagtttggatgactgggatgatgacggcattgctaacagagacagggggcccaggtgtgatttccattttgggcatactcaatttggggtgcagggaagacacctaggtggagatgctgggcagaagttgggaaagtggacctagtgttagggaggagaggtgggactgtcagtgtcattctcacagataggacggtgggagcactgaggggatgtgatgagcaaagagagaaagggtgcaagggaagaaaagagagccagagccagctgactgctgaactcaggggcgaaaggaattctgagaaggcgcagtcacagaagtaggagcaaacccgggagggaggaacaaggccgtaggaaacagcagaagaaagtttcaaaagggagtttgccaggtgttacacacccattcattcattcattcattcaacagagatttatcaagtttcttctatggagcagacactgttttaagcaatgggattcgcatggtggccaagcaggctccatgtaattctcatggagcttacattcttgtcagggagacagaactacaacaacaaaagtaaagagtattgttcttttgtaataattatcacattttgcaatgatatattgaatcattacaaaatgtggtaattattacaacagaataaatggagacagggcagcaaggatgggatgggctggttaaggaaggcctctggggagatgacrcttaagctaagatttgaaggacaaggaggcattactcatgttacaagcaggataaagagtgtttcctttgggaggccgagacgggtggatcacgaggtcaggagatcgagatcatcctggttaacacagtgaaaccccrtctctactaaaaatacaaaaaaattagccgggcatggtggcggacgcctgtaatcccagctacttgggaggctgaggcaggagaatggtgagaacccgggaggcagaacttgcagtgagtcragatcacgccactgcactccagcctgggcgacagagcgagactccgtctcaaaaaaaaaaaaaaaaaaaaaaaaagagtgtttcacgtggaaggacctgcatgtgcaaggccctaagggaaaaagagaacttggtatgtgtaaggaactgagaaaagatgcatatggctggagcatgataaatgaagtggaagtgaggtgtggggtgctattcaagagacaggcagggaacagagggcagcacctgcaagacctttgggatgaagggagaagctccacttttttggccctcttgaacctgctatgctttacccttgtgttaaaaattagctgggcatgatggcagatgcctgcaatcccagctactcgggaggctgaggtgggagaatcacttgaagccgggaggcggaggttgcagtgagccaagattgcaccattgcactccagcctgggtgacagcgagactccgtctcaaaaactaaactaagctaaactaaaataaaaataattcagtgtgaagattagttcattcaaaaatctctgtggcaagcaagagaaagggttacatgcccttaatatttcctctaatgaatgtcaatgattcacctttttaaattatggaaagagattatagtcaatctcctgcattcgtgggttccacttctgtgtattcaacccactgcagatcaaaaatattcagaaaaaagttgtatggttgcatctgtactgaatatatacacacttttatttcttctcgttatttcctaaacaatatagtataacaactatttataaaacatttacattgtattaggtattataagtaacctagagatgacttaaaagtatatgggagaaaaaataaaataaaataattaaaaataaagaaaaaatttacagggggatgtatgtaggttatatggaaatactatgccattttatgtaaggaactggagcatccacagattttggtatcagtggggggtcctggaacccatcccctgtggatactgtagttccttttatagcacaggtctcagccttggagatataactgcattcagccacagtggggcagcaaaggaagaacaaagagatcagccatcaaggtttgcaactcaaatttttctatgtttagtatttggtgccagagcccctaaatttctactctctcaaattgggtttttctgggcagaaaatatgtgtaggagcccttatatttcacattttgtacaaacataacgaactctgcataaaacatttaaaattcaggcaattgtccttgtcatttgagaaatgctatgaaatgccttctttaaatactcaaatgtggagttattattttaaaatgctcataatagacatctttattttaaaaccttttttatttgtataaatttaaggggtacgcctgcagttttgctatgtggatatattgtctgggcagacatctttatttcctaggacttgtgcactcagtgtattttaaatttttctgaaagcagaaatgtaatattatagtttgacaaccctaaatcattcatggattattaataaagccrtatattttgtatttaagttagacattttcccagtagtttactttttcattttgtagcaaaataaagtgaggaaaatgtttaaaacattaattaatgtctgtacaatgagtgaaagcataaccaaaaatagatctcaaatgtcttgattctattccctccttcaatgtcatttcttgtgacctgggtaccaatggcaagggaatcaataatgactcgatctgtataaggtcttaaaaatggataagttgtggacttttaaaaaattacaaacatcaaataatcccattatctattcatagctaatgccagaagggtacattacaggactttaaatagccctgagtcacattacacaacttatttagggcgttagaaatgtatccagttttaagtcgtagcatgggggaaatcaaaggcagatgttatctgggcagaaattggatccaagatcatgaacttaatctcaagtgtctaatttctattttccatctacctttttaattttttcaaacagatgttgctaaataggaatctcttttagagactcaaatattttgaaatatatatggatttttacattttctaaagcaggattaaattggactgcaatttttcatgttttgtcatcatgtgatcaaaatgatttctgattctagaggactgaaaaaggagatgatattatcaacaaacatttctaaacactactggtaccctttatttttaaatatctcagaattataaactattgtttctgcttacataatccatatactcacattcatttttaaatgtcatcaaatatatttattgatgaaaaagtaataggaagacaagcccaggtttgtcttaaagaaaaaaaagccacatacaatactagtttaacataccaaggccagaaaatttcaaattttaatcttcacattttgttttatacacacagattcactggtattgtgcaaatgagagacatggtgttttgttgttgttttgtttaagattttgatcctattgtcatttcagttaagtctgtctttgtgatttatagtttaaggttagatgtcataaaaaaaactcaggaaacttttcaataatggtgataacggtgaataactctcttccttatgagtcaaatctcaatcagacaccacagaagtgtcactattcagcagcagtttaattttttggagtgggaaaggtggtttgcctttttcttgatccactgggtgaccagattgttacccaactatttattttctaactatctaaggctatgagggcatgaaaggtacaaataataaattaaagtcagtctgtccttaaaaaaaattattatgatgaatgctcaatgttcctatgttttctgcgtctatrgggttaagtatggttcctttttgtcagttgttctggtgagtatttctcaggcttttagccrtgattgttttcttaacacaaggttttattctctccctgaagccgaaagatgatctatatcctttgcttcacccgactatgcattgctggactccaacaagtgacttgtacattggctgtgaagagggtcatcttttaatgattaatggagacaccttgcaagtgactgtacttaataagatagaagaggaatcgccattgggtaagaaackgtcctacttcatattcctgtatagccatgggtgttggtttttttggttttccctatttttctctttcttggagacatctttgaatcctccttcttcttaatcctctggctgttactgtgctgttggcattctaccatcactttatatgcatatttcatgtaatcctcagaacaacattatgaggagagacaccttaatctccacgatacagaagagatatgttaggaaacatggcccagtccacgtaaactgtggagctgacacctgaacccaggcaataatacctcagagtccaagttcttggctactgtgctgtatccttttctatacatatgcccattctgcttagtctgctaatcataccctttcctgcccccaccccaacccttttctccaggctgatcatctgttaagcccaaaagccatcttgaaaattacctttctattgctcggttagaggtgttgtttttttggtttttttttagacagagtctcattctgtcacccaggctaggatgcagtggtgcaatcttggctcactgcaacctccgcctcctgggttcaagcgatctcgtgtctcagcctcccaggtacctggaattataggcacacactaccacgcctggctaatttttgtatttttagtagagatggggtttcgtcatgttggcccggctgatcttgaactcctgacctcaagtgatctgcctgccttggcctcccaaagtgctgggattacaggcaggagccaccacaccctgccatattgctcagctagaatttgaaagataacctgatctattctgccctagatatagtgtctattcctgaccctatcagctgtggccatggttgggcctgggccacaggagccactgtccactcattgagcagtagatgtagaccctgggaggagggggccttgccaagacaagctcctcaaacctgtccaaagcactctctatttcaattgctcttactatttcacaccttgatttctgtaacaacyttaggatggacttcactgaccttaatctacatctgacccaatctatgcagtttatctctgtcaaattgcctctttgaaggccacttttaacacccagctcaagaactgctctgccttgatttcacgctctccctaatctgatcctacctactccattaatattatttccaactatgccctggtatgagttttctgagccagtcatttattttcaccatttcacagacatgcctctagcccattcccttggcacttactgtctctgaatctgccaatgcccagctcaaataccaccccctccagcaagttttccccattgcattgtccctcatctgccttttttsctattctctgactcactttccctgtaaaactgaggccatgaggtttcacttccctcccaactccctttctctcttccctttactcctactataccctccagccttgctcctctctctaatctagcatctatgttagttacatagatctgatgatagagaattcaaaaacaacttataagatttacatcagtaaaagtagcttttattattcattgttacattgtacttttaattacgtcacctgctttaccttgtttttcttttccagaagacagaagaaattttatcagtccagtaaccttggtatatcagaaggagggcgtgctggcttctggaattgtaatgtattctttttttcaaattaattggtttaaagaaaattcacaattcccatttgttgccatttactattatgagccatattttaggatgtcagatctgtcacattattaattaaaatggtttcctctttgggtactattaaaaaggatttattatgaatagcttcaaatctatacaaaatagaggggacgatataatgaactaccrtatattactgcaaacaaacacaaatagaatttaaaaatccattgcccttccgcaatgaaaaaatacctaatatctgtaacccaattccatgctcatttctacacttaatgtattagcttatcagacacgaatttggaatcctttgtctaagctgcagcttagactcttgtgaatgcccatttaacttacatgtatcataatgttattgttgatattcgaatcagtattaatagcctccatttacttggtgcttgctttgtgccaggcaccaagctaagtactttacttgtattatcttataggtccttacaacaaccttatcaaatagaaactattgacatcctccttttacagacaaggaatctaatctcacagagttcaccagcaagtaattggaagagttagggcttgaacataggtgtatcaaactccaaagtctttgctgtcatttattagaactcagcctcagtaagtaataaaaggggtcagaccatatttttctttttcttttcttttcttttttttttttttttttttttttgagacggagtctcgctctgtctcccaggctggagtacagtggcgcgatctcggctcactgcaagctccaactccygggttcacgccattctcctgcctcagcctcccgagtagctgggactacaggtgcacaccaccacgccctgctaattattgtatttttagtagagacggggtttcaccgtgttatgcaggatggtcttgatctcctgacctcatgatccgcccgcctgggcctcccaaaatgctgggattacaggcgtgagccactgcgcccggcccagaccatgtttttccatgccattgtaatcaatgtaaacaatgctaaggtgtggaactgacctacactaaaacataggtctagttgtaactatcccagatgttagcatagtccatttcactgccacagatgacatctccaggaccttgagggtagctaggcagtgacatcagggtgagagacattttaccctcaggaagccatctggagcacatacacctacacttagctcccccaaccttgcagtggactatcccctcctcctcctccatttagtcagcatttgtgccttttatgactcttgtcctcttcaagaccacccttgatgtttgtttaaccccctttaaagtaactattatarcatttgctctggtgagtgatggagaatggagatgagctcaaaaaaagcaccttgcctgctttcccttccagggcccaagcatttgaaaccagccatctaaagtccccatgcttagttataacagatctaatctagaaaatgataaataaatttcctcagagtgttttcactattgtaaaaataactcaaattcctcttgagaataataaaattaacctaaatctattcacaaccagmcaaccaamcaacccgtttctattggatacttgccatgttctactactgtgtgaggaacagaaaaagaggatccgaagggaataaaaggcacactgcctacccttgggtcatttagggagataagaaatgcacataataatgattaaagagcatacaggagggctagtgtcctttgaaggaaagaaactgctatacacaagccacacaaactctacttcatttttcctacctcctgtgcagtgaagaatgtagtaagaagagggatactagagaaactcaaaaaaaggggaggtcagtaaaattttaggtaattgaaaaatgcatcacaaaagagatcagactgaagcttgaccrgggaacatagttaaaagttgtctaaataaagatgagaggacagtgcatctatgcaaacatagatgatgattccaaataagcagtagaagtaatcaataagccttagcttgtctgatgaggcaagtatactatgcattgactaagactgattttctatgtttatctcactcatctctaggatggcttygtgtattcttttattattaaagatagaagttacatgatcgaggattttcttgagattgaaagacctgtagaacatatgacattttctcccaattatacagtgttgctgattcaaacagacaaggtatgttggatggtaatttcttgatatgtgattttcagatagtattattatcatcattacatgacaggaatgaggagcagagtatgctgcacagtggtactctacttgtcaagactctaggttgtaaatgaaaaaatacccaatttaaaaggcctaaattacaaagagctattggtttatttttgtgcatgtaactgaaagggcaaggagtgaatctgaataaaagagctaccatgatgccaccaagccttgtttttttccatctcttggctctgtttcctctctgctgcctccatttccatgcagactctccgcttatggtgttaacagttatatgtagctctagattatatttctgcctgcttgatgtccctggtggaaagataccagctagaaaaaaaatcttggaatctagactcattggactgactgaatcacgtgtctaccccrggtcaatcacttgcaccataggaatcctaaactctgattggccaggcctaagtcaaatgcatagccttggatgctgggtagagtcaacccacttaaatgagaactgagattggggcataggttgttctccaaagaaaatgtgtgttctataagagaagaagaaaaatgaattattgcaagattaaaacaaacatttacttcaattatactgctaggaagattcctaattaatggaatgatcttcagacatcaagattagcagatatttatattgttagacaatcattttagatgaattgcaaacaaaattcaatgactttctgcctgaaagaaacttaaatttaagtatggaaagacttttgtttctgataattaccagaagtttttttwaaaaaaaaaaaaactatgctaacttatgttttaataaataaatgactaacttaaaatatctatggagaataggaaactaggaaaaagatatcataaaagaaggaggaaagacccaaatagaacttctaaagaagaaaaatacactagcaaagtaaaaattaaatgaacatgtctgacaaaaggttggacatagccaaagagagaataaatgaattcgaagatagatcagaagttattcagaatgatactagaaaagcaaaagggtaggaaatacagaagggaacataagagataagaayaatacagtgaaaagatctaacatatgtttgattagagtccagagaggagaaagtgggacagaggcaataattaaagagatattgactggggatttcccagaattgcttaaagacatgaatttacagatttaagaggtccagtgaatcccamacagaatacataaaatgatatccacacttagacttaccagagtgaaactgytgaaaaccaaagacagagaaaattttaaaagcagtcggagaaaagacagattacttctaaggaatttcagttagactaatagctgacttctctgtggcaataatgtaagaaatagtggaataatatcttcartgtagtgcagggttcagcaaattgtggctccatggggcaaaactagcctgctgcatgtttttcaaataagattttattggaacatagccacacccactaacgtattgtttatggcttctttcacaccactatggcagcattaaatagttgtggcagagactacatggtttgcaaagcctaacatatttactgtcagcctatttatagaaaaagtttgatgacccctgatgtaatgaaagaaaataattaccacctagaattctatacccaatgaaaacatcttttcagtatgcgggtgaaaaaagacattttagacactccaaagctaagagtgtgtcagcagctgactatcactagagaaaattctaaagaatttacttcaggcagaggaaaatgatcccaggtgggaaggtctatgatgcaacaaaaataaagagcagtagtaataggtggagaatgacacattgtagaagatgtacagtaaatgaacactgcatacaacagcaaaaaaaaaaaatgtgaaagtagktttaaaaataatattgaactaaaatcccaaataacaataatataagttggggggggcagagcagggtatatagaataaagtgttccaaggatctcatataacccaggaggagaataaagcttaaagtaacttttgatgttgataaattaggtacacatgttacaacttctaaggtaaccactaaaagaataggaacagtagatgaaatttccaaactagagaaagtgaaatgtaaaaaaaaagtttaacccaaaacaaggtaaaaaagagaaagaaaatgaaatgcaaaacaattgagataaacaaaaagcataaattaaaatctatgtttaaacccaaatataaaaagatggaaaaagatatgtaaacattaaccaaaagaaaaccagtggaaatatattaacattagacaaattaggcttyaaggtaaaaatcattactaaagataaatgggcttatttcagaataataaaatattaaatttaccaggaatatatgaatacttaaaatatgtatgtacctaatagcatagccttagagatttaaaacaaagcatgacagagtgacaaggagaaacaaagcattgatattaatggaacattttaatacacttctttcattacatgatagaataaacaatgtattctcaacatagcagccaaggtgagcaaagcatttttctctactaggcaaagccctccagtgatttcctgtcattctgagaaaaagccaaaatccttactatgtttttaaaggcccttcatgacgtggactccaatccccacctctggccttatctgctactactgtgaactcttgtccatcctgctccagccacactggccatcatgctgtttccttgaatctgccagacatgcttctccctcagagtctttgtactggcttttccctctgtctggaatgctcttcccacagaatctacatgggtagtttcctcatttcctttgggtcttttttttttttttttttttttttttgagacagagtcttgctctgtcacccaggctggagtacagtggtgcgatctgggctcactgcaacctccacctcccaggttcaagtgattcttatgcctcagccttctgagtagctgggactacaggtgtgcgccaccatgcccagctgaatttttgtattcttagtaaagatggggtttcaccacattggccaggctggtctcaaactcctggcctcaagtgatctgcccacctcagcctcccaaagtgccgggattacaagcatgaaccttcaagtcttttctctaaagttacctttgttcccggaccgaactgagggttgggctgtttgttctcctggcccaataacgagatgcagatgaactgggaaagaagggagtttatttctgtaaccgggtgcagggagaaggctgggaaaatatcactggaccaactcaatattacaaagctttccagagcttatataccttctaagctatatgtctatgtgcaagtgtgcattcatctaaagacgtaagtgattaacttctaatatataactaaggcctgagtcctgaagaccttcctctggagcctcagtaaatttacttaatctagatgggttcaagtgccaggtatgattacccttattttgtctcctgctaaatcatggaggtttggggagttccttagacccccaataaagcttgtttgtggaggtctggggattttcttcagaccccccaataaaacttatttaattctaagtgggtcctgttgagaattccttcgttatcttgtcatgcttcaaggcccaggaaaggcctaggcaaaactcttggtggggttttgttacattcaagcgtttgtgtaagggcactggctctattagcttttaatatttaacttaaccactcagtcattgctgaaacagttgtcatggaggcctgcctgttcagctgttagtgagacctggcctgccacaccttctcactgaagtctttcttaaacatgcactttaaaatttcaccctcttattttgctatataatgttctccttctctgttatattttctttttcttcttacaattatcactgtttaacttacagtatattttatttggttatattatttattgtctgaatctcccagcagaaggtaagttccgtgagggcaggggattttgtctgttttatcctctgctgtaaccccagcatctaaagcagtgactggcgctgtgtatccacttaatatttattgaagaaatgaaagaaagataacattagtaaatatctaccaaattttgaactcctataaagtcattttttttagataaataacaccagaaatatttatgtttaactcaagtaagcgtgaagaacttgtgattagctgaaagcagacttcttattgctggttaagtgaccatattatattaccagctacttggtagagatgcattcattacagaacagatttttttttagaggtgagtttgggagctgaaaataataagcataaagtgacagcttcagccatacctcaactatttctacaaaggcttgtttaaatgtttagtgttccttccattatatttagcatgtggtaggatttagtacatcttaacaactttttgggttttacacattttccaaattttctacataaatagatattatttttgaaacaggaaaaaatgttttgttatgttttgtaaattaaaaaataaatgtctgggagaccaggcgtggtggctcatgcctataatcccagcactttgggaggtcgaggaggggggattacttgaggtcaggagtttgagaccggcctggccaacatggtgaaaccccatctctagtaaaaatacaaaaattagccgagcacagtggcgggcacctgtaatcccagctactcaggaggctgaggcaggagaatctcttgaacccaggaggcagacgttgcagtgagccaagattccgccatygcactccagcctgggcgacagagrgagactcagtcacacacacacaaaataatgaaattttaaaaaattaaaaataaaaaacgaatgtctggaattgaagaagaaagtcttatggttatttatgaggccaggcgcagtggcttacacctgtcataccagcactttgggaggccgaggtgggcggatcacctgaggtcaggagtttgaaaccagcctgaccaacatgttgaaaccctgtctctagtaagaatacaaaattagccgggcgtggtggcgcatgcctgtaatcccagctactcaggaggctgaggcaggagaatgcttgaacctgggaggtggaagttgcagtgagctgagattgtgccattgcactccaacctgggcaacaatagcaagactttgtctcaaaaattaattaattaaaataaaataaaatgatgaataagtgaatgaatgaatgaatcaaccgatcaatcaataaacaaacaaacaaatcaagtgtctggattttaagcccttcagggtcaaggtcttactgagttgatctgtgatttcccatattctgtttccacatagagccttggttacagtaggcatttaataaatattygttgaactatatacacaacaattacaatgtgtttcttttcttttgtatgtttatcagggatctgtttatatctacacttttggtaaggagccaaccttaaataaagtcctagatgcttgtgatgggaaatttcaggcaaytgactttatcacacctggaacccaatacttcatggtaaagaatattttactgtgtcacagtaggactaaagatacgatgatgttgcaagatttaaatcccyatttatatgttattgggtaactttgaaagttcatgggcaaagcaatgcgaayaggaggcagaggctgtccttgaagactgtggtggagatgccagacacttccatcttcaaatctaccccccggttagaatgataccctcatattgtgacttcataatatcatcttctgaaaacagccaacacaattgagatcttaggagccatcttttggttttcaccacccaagctctgcaagccaggctttaacacgtttttaaaacacattcattgctaatgagtcatcagcactaagtaaactgttagtatttatttagtatctttttttccaggtaatgcagcagcaccacctgaggttgaaaatgaaatagttgccatgtataatacattaattcagtctaaggagtcaataataatatgtcaatattggctcttcagttgtaacaaatgtaccacactaatgcaagatgttaatagtagggtagtaggtgtgtggaggggaaggtgaaggagaactctactttctgctcaatttttctgtaatcctaaaactgctctaaaaaaataagttctagtaatttaaaaaagaacaatgtatagtttcctatttctacatttgttcattaggcaatagttttactgatttttataagcaacttttatctttaatatgttacatgaaaaatctttattttacttttctaatactaattagttatgtattaaattgcattaaagataatagttaatatttgctcagaaacaaagcattggcgttgaaatgataaaataagtatttataatccacgtaagtaaaatgaaattttatactaaatcatyggcacactggaaagggaggtagaacatgcttccataggaaagtcttattttccatgtagagtttttgtttttctttttttacagacacttacatattcaggggaaatttgtgtttggtggctggaggattgtgcttgtgtaagcaagatttatctgaataccctagtaagtatacttgataaatggattttaaaaaaatactgaattctaatccaatctactttttcatattcacatgtcaatagtctgtagaaatacttgttaccgaagcctcactgcatttttgccttctagatttacagtaatccttgtgtgtaaagtatatgccacagccccaagagtggaaccatagcatacaatattggttatagaaaacaataagtttttctgtggtggcagttgtttttgaaaccccagtagtttatatcttactcatgccataagttcattgtggattggcaggggtccctcttgcacagtctctcagggagccaggctgatgggggttccaccaaagaatacttcctctgtgctgtgtggcaggagaggaagagagtgctgaaaggtcttttggagggagagggggtgctgttgaatcagcaagtaagtgctttttctcagaaatgaaatatccctttggccataattggttaaatggtcccatttaatggaaatcaattagaaatgaaagaaagttgccactctaaccagcttaagccaaaaattaaaaagtaagtgttattggcacaatcaactataaagtacagaacttgtctggcctcatgtgtgcctcaatccagcagtttaaatgatataccaaggaccttgtctttctgtctccacactatgcctttagtttcatcttaggcttcattgaggtacacccagataccacaggtgccaacctcacatcatactgtcagagagggaagaaaaattcctgctgtaggaggaggaagaacaaagatgcttcttctttccagaaggttcagtaaatgtcttgcaatgtcttaataacatctgtgaactaatcatatgcacaggggatgagaaatgcawttaagtgcataattaatgcacaaactcagccctggaaatgggagttagattcattccactcatccctgaagataggggagggatagtttctcagtgaatattcaagagattttccaggagggcgtatggatgctgagttgcaaaccacactgcccaaaacacctaccacaatgtgataccattatttctgccatgttcacagtgcattttgcataaaataacattttaaaaggaccaagaaacaacggtaatgctttctttttttaaaaataatattatttgctgcattacacagttctagttgagaaatggatcttggtattaggtagggaagtttcagtccttcccttttataaaactaaaatcttaattataaaagactaagcatcatattttacataagatgccaaagatacataattcaatgtgataaataaaactttcccacaaaagtaaagataaaaattcttactgagaaaacttgaaatatgaaaagactccatagtctatgtgaccaagggttatatgtattcatttctattagaaatagtaaactaggagagatcttacaagtgcatttaatcacatgtcctttcacacattagagacacagaaacgtttaacaacccacccaggggcccatataatcaggatataccttgttcctcttgggcaaggagggatacaggtaccattaccctatagagaattgatccagacacagtaatgctgatgccaggtctctctgcctgcgtccgggactgtgttgccttccttcaggcagtggtcctgggggatcccagtccagcagcacagtgtcaagatacctggacactagcagcatccgctgatggtacctgcaagggtacataagactcctctggcccttgctgtacattttcagactagcacaccatcgccctggaatgaaggagaatttcagctgattatttttattttgggaacacatacacatatacacacacttcccacagaggttttcaattttacaaaaagcccactcaattgggagactgtgtgcattctaataaggcaggacacctggstgcttcatctgaagtttgtcaccacatatgggatccttgggcaagctgctggacttccttggcctgtgttttctattttgcaaaatgatctcttatgttctttttcagtcctgagttccatgattttattcaaaacaatctacaaagtgttgatagagaaagaatactgatttctctagtattatgaaagtcaatttattctcttagacatcatattctgtataaatcattgtgagataaatgggaatctgttacgcatttctttggtgactgaatacatcttccggtgatacagttattttcttaagtcttccttagtcataccagcatctcaggatctataaaaatgttttaaaaagccaggtgtggtggtttgaacctgtaatcccagcgactcggcaggctgacacagtaggatcacttgagcccagtagttcaagacagaggaagaccccatcgctaataaataaataaaaatttaaaaatgtttaaaagatgctaagaatttcttttaaattccttatttttcactattattggtctaattgtttcacaatcacttaaatagattattggcataatcatttcatcatcatttagggataaaaatgaagccatgatttcaatttcaagaaatctctctctaatttttattactctaattttaggataaaagaataagatgtacagattcctgtgccatcttatgcagttgatcagctcaggaacgttgagggtataatttgaaagaccccaccacacaacacttgccacttttctcatcctgcaggcttttcaagtacactgtataatagcattcttacgtgtaggagagcaggcacaatagagatacgcatctggggtttattttaaacaggcaacggttctggcttgctgtccatcctccctctctgcagccgtgggcacggaggatggctcggtctacttcatcagcgtatatgataaggaatcccctcaggtcgtgcacaaggcctttctctcggaatcgtccgtgcagcacgtcgtgtaagtcctttctgcctccaggagcggctccgtgtcacacccgtctgttgaaaattctagtgaagccatcctttcttttaattttaagttttacgtgtttcatttgttttgaatgttaatatattcacacagttcaacactcaaaaggtacagagggctgtgtagtaaagtaccccccatacccaggtctgtccttgcaggcagcctggtaccaatttctcatgtctctcctgagatgttttatccatgaacaagcaaaacataataagcacttctttttacttgtatcaatggccatcatgtgtgtatagtgtgccaggcacttctgctgtattaactccatgaggtaaacactcttgttgtctctatttgacaggtgaggaagataaggcacaaggattttaaataacttgctcaatagtacacagatagtgaatggcaaatgttgggatttgaacccaggtagttgggctgcagagtcactgcctttgctcttaaaaggagaaaactatgtacaatgcctcatttcttttttcacttaatcgtatatcttggagaatgttttatatccacacataaagaccagcctgattatttgtatagccacatagtattccattatatgaatatactatcattttttaaaaacggtatattaatgaacatttagagtatttcaaaacttttgaagcaatacttttaagatgataatatagagacattagatttggacttgtaggtgctatcattattactgtttctttttaatttattatattattaggtattaataagaacagacatttgtattctgctttacagcttgagatcactgtagcttgtggcatgtgatcctcaaaacaccagtcagaaaggtgttattcttatccctattagacaaattagggaattcagggttagagaggtgaggaaaagcattgtccaagattacacattacacagctagcacactgaggagctggccctgccactgtggactgcccagctccaccaccctagctcagtggggaaggatggataacctccttccatttaccccctgcctttctgcactgtcatttttttgtgcctttcctttctcagatcctcttattctaatttacatcttcccactttttctaatttgataaagttgtagacatgtttcactacattcttcctcccactgccaggtaccagacacagggtaatgaaatgtcacacccaccactaatttgagaattgcttatttgcgcttgaaacatcaagaaagctctaccgacagacatgtttcattcacttatgatgaaccaactgcccatctttactgaatcttcttgactgtatttattaaagttgcaatttggaaatatcattggcctaaagtacaatgattatatccacatgtaatcactccactttaataaggtcagagaatattaaaaattgcaaaccgtaaaaatgactggctttgaacatatctctgtggccattcaataaacttgttcaccatctagctggtgaaacaattgggatttgatcatcagatttcttcttttctagttatgatcagcaaggaatatttctgttagttggaacagcagaaggaaaagtctttattatcaatgccaactcctcaagctcatttcagattattggattcacaggtacaacatagaatgctgattaatttaaaatattgattatttcaaagaatttaaggttatgaaaatggacttttcatattgaatattgaaacaattatttgtggcatattttctgaaagagaaacctttaaataactaaagttacttaggagaattctcacattatattttgatgtatttggaatattagagttatctgcttggtacatagttggtgctaaataaaytttcttgaatcaattattaaatacattaatgaaatggctgaacatttctaatattaacatacagagaagttgggttgatttctcttgaaaatattttttaatattttatctctaatgaagaattttctctttattttctctctggctttacatgccaactgtatatgtgtttcccccccmcacacacaattttttttaaaattctccttaaaaaaaattttttttttgctcctcacactttgccaagtcccactcctaagtttttaaatttgtttatcattgacttataaaaattagtgagtgcctacaaggtgcaaaatgccaaacctaggccttgtagggggatgaaaatattaaggagacaatttagtagaggaggaaaatgcagaatggtgtgtaggctcagatactgtgtaggctcagatacagcagcaattcattctgccaagtgtgaggagaggagtggaggtgaaggtgggcactggtcagggggtgcggaggattggaggagttttccaagggcttaaagtagtgggtttgaaggattttcataggtgtgggataggacatattagtattcctgctcaaaataataacccaaacaaaggtacttggaatggtaaaaaagtctggtataacaggtaaatggaagagtttactagaagatgactatggcaatgaagtctgaaagaggaaggaccttgaatatcattccaaagagtctggaattgttctgtggttaatgagccatcatcagtggtttcaagatggagctggcatgatttgacttcgtttttagagactgactctgataccagtgtgaaggatggagtagaaaggcaaaagaatgaaattaaaaagatgagattggaagctataatactagccaaggcaagagatgatcatagtcataatcatagcaacagccaacacttattgaggaatgcctgactatgtggtagccagtattctaagccctcagcatgtctccacccattgaattcttagacaactttcatgaaattgatactactattatctctccacatgaggcaattgaggcgaagcgaggctaagtacttgttcaaggccatgcatctagttagtggcagagcccrgttaaggaagtccagtttcagggcgtgtgctcttatccacaatgcacaaactcatgctgcagttacagaaagagaaaagagggcacaaccacragtgatggaattggtaggacttggtatttgatgcgaaaggaagggataagtgatgactccaaaatttctagcctgaatggtggaagtttgcaatgccattagttgaaagttctagaggttgaggaataggttgagctgatgagttccataggtttaaagccaataaactcttcatttgggcatatttagcttaagtttggaaatcgggatatgtagttcaaggcttaatgatagaattctgatcttgaaatcatggtagctgatgagatggctcaacagagtrgaagtaaacctggatgcttaataaggcaaaagaggtaactaaatatgcaaattagatggcactgagtgtggtacagcctgtggctgacctcagagtggatgtatatcctgcctaaatattccatttcatttattttattttattttccagagtcttgctctgtcacccaggctggagtgcagtggtgcaatcatagctcactatagccttgaattcctaggctcaggcaatactgctgcttcagcctcctgagtagctgggactacaggtttatgccccaaagcctggcttgttctctgttttgtttttgtttcctttttttttttttttttttttttgagatggagtctcgctctgtcgcccaggctggagtgcagtggcgtgatcttggctcactgcaagctctgcctcctgagtagctgggcctacaggcgcccgccaccgcgccaggctaattttttgtatttgttagtagaaacggggtttcaccatgttagccaggatggtctcgatctcctgacctcatgatccgcccgccttggmctcccaaagtgctgggattacaggcgtgagccaccacgcctggcctttttttgtttgtttgtttgtttgttttgttttgttttgttttttagtagagaaaatgtctctctatgttgctcaggctggtcttgatctcctggagtcaagcaatcctcccacctcagcctcccaaagtattgggattacagacatgagccactgttccctgccccatttttaatgtrtctgtttggccagagggtgggatggaagaagctgggaatagaaccctggtccacattttatattgaagctgtggacagaggaagatgaggcagtgaagaaaactgaggctgggccagagtaataagagaactgggagtcattctctccagaaacagcctaaagaaggaaggcagatgaaagtacaggctgacacagaagtgtgggtagggagagggctgagataggctctcatatatttgccagtcagcaggtgatccctgagagagctacttctttggaatgaagaaggttagggagggaatagaggtaagaaaattaagtcagaaagtgccaaaactattttaggaagtttgcagtggagaaaagagagtcagatgttaactgttgtgggacagcagagttggaggaaggttcttatttgaagacaggggagtcatgagggctgaataaaaggaaccataagggacacaagaagctaaaaagaggtgattgataatgtatggtctaataggagattggaggaatgggctcaaaaatcacagacagggaggggttacattttgttcctacatcaatgtcaggaaatgaatggagaaaatggaaacagacaaggggaaagtgtgagtctcaggataagaaagttgagattgagtttatgtagatgtccttggtcttccttgttaaggaagagggaaggtcatctgctgaccgcctggggaagggcctgagaaagtgggcacctgcagcacagtcccatgaagaatgggagagtgaatctggaacaaatccaaggtgggctccaggcctggcacaccttgyagaggttagatcagctggctttctagtggagcaagctcataaagtcacgtttccaccacacccacagtccttgaccacagatgcaaagaaggccgatgcctaagtttacccaatcttaggattaggtaacctggctggagtggacttgtggggaccagctcatgcagatgctggtttggagggatagggggtggagatggtgcactctggggccaccctggctgggaaggaaacccagacagactgggctggtttraatctgccagtctagacatctaatcaggagaatccctcatccattcatcaaaaatgtccctgtaacttatgtttaaaggtcactttaaatgtccagcaaataatttgattctaaagatatagtgaaggcaagtccatggatgatatcttaattggaaaggtaaaagatcatttaaacttatcaatgaccacttgtggtgttgatctctgtttgctttcagaggtggccaaagacattttacagatatccacagtgtctcttttagaaacagacatagtggaagtgatggtgctttcctcgcttccagaagcagggagaagcaggttggagatgttcrcactgcctacattactgccacaaggtaaggaaaacataagcagccagttctgctcctgagcccagatacattgttgttattgttttttgggtttgttttgtttttatcttggcatgtgaagaggtaaaatggccaccttttgtctatctttacaaagtaaaaccaacatgctaaacagtttgaagtgtggacttttcctctgggcttcctgactcatgagtctgctttattaccataggaaaagagataggatcaacggacacatcaaattgatttgttatttttgtgatgtctcttgttttgtagctttgaatagacaaggttaaattcagatagattacagtgtagttcccttcactgacaaaattataaagacagttttctggataaaaaggtatgagaaaatagatactctttccttgttttaatgacaaatatatcaggttagcagttttgcaaatatataattatagagcagaagagagccgacaacctccaagtacttttatgtttttataagaatctctatactaccatgggtttcttttaatatgtctctaagttaattgattaaaaattaatcaaggcattacagaaatattttacccactatcagtcatttaatactcaagtatttctagggagacaagtgtttttaaatcatttttatcacctactagcttccgcaatattagttgagcatttaaattttattttgcttttcataattgttcataattttaaaaaaacaaaattaatttatggtayaagtgatttctcttctttttccaaatctaatagtttycacaacctttgctgatgaaagaggaaggctgaaagatgaaatcattcataagtacctgtatgagttggagcacgctctgtcctctgcagtcttgggctttcaaagtaaccaaatatatggcttctgtagtcaagtgccatacatctgtagctacyttcttcctgaagaagtatgtcaacacttaagtgtgctctcatttatcttagcaatcaagattgatacattatactgattagatgtgatcctcttgaccactttaacagaatagttcagttaacaaatgccttcattttattaatataattcccttgagctagatatatagtgttatttgttaatccatcatacaatatatttgagcaacctgatacttgtgccacatacatcatctttgtcagataaacatgcagatgacacaatattagtttagtgccttaaaaaacaacctagcattaggaaatctattctacatatgccaagggctacaaggtagatgatttgatttgcagtggaactttgcatctaagccataaccaaaattacaaaaaataattaaactgtgtttctgacattttttcattacactctcttcagacttctcatgcattgtgtcacctcctgctgcacataatggcccagtaccctcctgcttgctgccccttgacctgtcactttcccttgatgtctgtctacccactttgataaggtctgccttccttcctctaaattcttcagtcaaagctcttctttgacagagtagccaggactagacacagagaaggaataaatgattagtggcaagagagattcaagaaaagtttcatgaaggaagcaatatttgatctggactttgaaaagtaagtcagatttagacatggagagatattgcatacaattttggtgggcagcgctcatatagggaggtagggcaggactggtggggatggagtagagtagggcattccagacaaaaggaaggacacgtgcagaggcttggaggtaggaatgcatgaaacatacggggaatattgactacattattttgacttaagcatgaagatatgtgaaaatgattagtaaaagcaaagattatcagtgtaggctaggatttttaatggcaagtaaataaagaagactttacttagttggcagaaacaaacttttatttgcaaaagtgggaaacatgatgcaaacgcaggtgtccactttatcctatatccatttatttacaatgacaatgtttgcactttatgccatatcagtttatttacaatgacaatatacaacaggcatgtatatctgcaaacccaaaggtgctgtttacctgatcttttctataatgtggttattttctttgattggcaggaacataccggtatctacattcttaaaccatacaaaaaagtacaaagcagacagtatggacctggactgctctatctgtcttcacatggattgtggctcataacaatagctaaatgtggaattctgtgtatccgagacgtttatactttggtaagctgctttcttaaaaaaaaatattgtgggtgtatatattgatctcatataggaaacattttatatgtatataaaaatttgcttatatatgcataaaaactctgaaaagatattgaaggtactaattaccttgcttgccattggaagtattaggtcatgggaacaggaaggagatttcacagaatactcttttataatttttgaattttgaaccatttgaatgtattgcctatttaaaaacctaaatgagaaaaggcatcatggttgagaaccagtatgactcagaaatctcagtttttaaattgttgccctatataccaaattgatgatgcattttgtttaagttctaatcaaactggcttagttagcatccttcagagcatgttatcttccattcttcacagtgcccgtcaccctctctcattatactcagctacttcacacataaatagaacctccctgactcttgaagccatcggaactcaccatctctgcttgctgaaggccccttccctagctttatagacttctgcaatccattcacttctctgtgtctgatttcctattataaattggtgataataatccctgtccttccatactacacaaaggtagtggaagaacaaattagtattggtgaatgtggtttgaactggggattttaaatactatgtattgccaattgcctacttccataccaattaaaatgctgttagcaaatagaaaatgatttatccacaaaaaaggggcatataaccccattagaaaagccgtgtggtagaattgcatttgtaatttttctggtttatttcttaactattgaggaaacatttgcttggtgtcggagtcattctcaccagggtcatgggattcagtcaatgagaatttcaatggatggacaaaacattctggtgaatgggagagatgatggcacccttgtctacctaaagtggaagtacgtacagtattcagtaagtaaccccatgtagtatagtgtgttaaaatagagattttattattatttaagtacagcaaggccaacgtgctgggagaccactgccagtgcaaagaaagtttgttatactcacagatcccaagagaagcgtacactgcattctcgggtaccacatggggcagacctggggtgggtcaggaggctgagagagggaggaaaacgtggatgagatcctctagtatggttttcacagggaggattgggcaggtttaggattggctagtttgaatattatcagtgggttctgaggcataggagctggctgtagttgtctcatacttggccctggggtgattagggtggggaaatggtggccccgattgtgaaagcccactagaggaggtggttgggggtatggtctctggattgatcggtttgcttttgaaaagcgtgttccagagcaaattgtttactatcttcagagactggctagcctccagaagtcagcaaggccccagatatcagagcatcaaaatacaaaaaaaaaaaaaagacatagttaatatttatctgagagtgatcagtcctatctctcataacataagaaatgtggacaattctgaccctcagataactttaaaaactcctgtttatccctgacatatacatgtatgtatatatacacacactttcctaattagattttgcttagattatatcaaagacagtttcagtccccaaacaaggaggggatccgttttagggaggtactattatcatccttgcttccaagttaaactataaacgaaattcctcccatggttaggaggaatgaacaagaacatccagcctgtgagactagaaacaagatggagtcagccatgctagacttctttcactgccgtaatctttgcaaaggtggtttcaatcatgcaattcattttagaaaaaataatatttcgtgatacctcctgtgatcaaagcagtaataaaatacggcccttctctgcaacattgtgaaaatgttaaatgttgtggagattttgtatcataacaattttgctagccacttacctcaaaaactcatttcaggattgcatcatcatgcccattttatacatgggattctgaatagaatattagcttttatctcactatgtaagtcctaacatattgtttataaccagcgaacaaatactatctcaggcaacaacaaacaagtgctggagccttatttatgcagctcaaaaagaaggacattttgatccattggtaatcacccaaacttctgactcaaaacaaagctgggtttaaaacgatggtctaggccaggcgcagtggctcacgcctgtaatcccagcactttgggaggctgaggcgggtggatcatgaggtcaggagatcgagaccatcctggctaacaaggtgaaaccccgtctctactaaaaatacaaaaaattagccgggcgcggtggcgggcgcctgtagtcccagctactcgggaggctgaggcaggagaatggcgtgaacccgggaagcggagcttgcagtgagccgagattgcaccactgcagtccgcagtccggcctgggcgacagagcgagactccgtctcaaaaaaaaaaaaaaaacgatggtctaggacttttgactttgtgaccttggcaaatgacaacccctctaaatcatctgttacaatgttacttaaggtagggggtctgtagcatctgtgagcttgttagaaatgcatattcttggatcccatctggactttctgagtcagaatgtctgcaagtggggcccaggaatctgtttttaaaccctcccagtgatgctgatgcgtccaaagtttgcaatgccctggtgaattaagtggaagtaataataccactctcaatgcagggtggggtgatgagggggccacatgtgattatgtgtgtgaagtagcacactgcctggtgcattccgagagctcagccagtgcactggctcttctgtgcaatgaccagggcaggtacagagggcatgttgagtaagggtatgaggacagtgtgaggagagggtaccctagaaaggtcaagaagcttgtcatggcctggaacccatgaaagggtctcctgtaagaagcagagtcctttagccatgcatggtggtgtacccctgtagtcccagctactctagaggctgaggtgaaaggatcatttgagcccaggagttcgaggctgcagtaagctgtgattacatcactgtactccagcctaggtgacagagcaagaccctttctctttaaaaaataaaaattaaaaaaaaaagaagaaattctgcaaaagaagtaggcactgaagaagtttccacaaggcactgtgaagaattgtccacatatttccttggttagttacctataaactgaaatggttagttacctgaaaataatagagctaaatgtgattttttaaattatgatttttgtagcctctgtgttttcttttttattaatataggcgatttggaggacacctagccagtgaaattctggactattaccagaaactattaatttccctgagcagcgccatggacaaggagaatcattatttaagcacaacaccaaaagtttccgtagatttgggatccgattctgaacacacagttgagttcctatatgactagcttgcttgcttacatttctttctttgtaaatcagaagttttcggtttgtggttttctttaagcagatatttagtaatatttctctttatccaggtatcccatgattttcaaaaagggaataagctacgtctgagagaaaatattcagcctttctcaaagcaattgcaaatagtacatttcagatctcatttaaaccatagtacaagatccaggcttgcctggaaaaaaaaatcttctacccacacttgtgcttggtcaaaatggtctctctatactttcatattacagatattatttaggaagtgtctagctaaagaacagtattcactcattcaattaacaaatatttatagagtgcctacagagtgctaggctgtgggggatatagccatgaacaagaaagaaaaatttctgcttccatggagtttacatcctaattgggggttggagatgggcagggagaaacagataaacaagcaaatgcagaagaaacaatgagatagtaacaagttctattcagtgaataaaaataggttgatgtgatagtattgggctggatagcctctccaagcagacatttaagctgagatctgaattaaaagagaacaccaccatgcaaagacaatgggagggtagcaagagtattcagggcaaagggggaaagagcttggcgtgtggtatgttaggacctaaaaaagacctgtgcagttgaagcgagctagggagaaagtggtgggaggtgaggtcttcaaagtgggaggagaccaggtaacgaagggctttgtaaactaggtaaagagtttgaattttattttacatgtaatgagaactgagtcaggtgttctgaacacaggattaacaaggtatagttgacattattgaaatgactatttgatgctatgaggagaatgtttcctgtaggtgataagaaggataagaagcagggacattgctcaggaggctaaggcagaggttcaggtagcaatgatggaggtggaggagtcttgtgccaaggagagaagtggtggattccaggtgggtttcagaggtagggttgatagaactcactgatgaattggacatagagagag

SEQ ID NO: 97747 - DNA, 41585 bp, Homo sapiens
  misc_feature (1)...(41585): n = A,T,C or G
gatcttgactacaggaccatgtttactagaatttatcaaagcctctgtgttttctttaactggaaaatacttatttaaaaaactatgaaaatctgaacatacattacaaattacaagactcatggcaaaatgatccttcttcttataaaaaacttagaggtttcttcttccataacttttactatttatatatgtggtttcctacaaatatttttcttatacttttttatatgtaagaaaaataaagttttccttattctgctgcaaagtagcttcaaaattcctattccacagaggatttctaatctcttctattttgttttttaagataatctttattactgtcttgttctgttttacattctaattaattcattatgctcatgcaaaggtaagaagaagaaagctgttgtgatgagaaggtatctagagatgtcattaataatattaatttaatactgattttaaatattttagtcttttagtcttttccttgtcaatcctcactatactccccatgagatataagaaggagtaatggctctattttacaaagttgaaggcaatttgtgcagagcacttttcatgactgtttaggccacaatacaaaaccctttaaaattcaactagctatgtcttttttaaacaagtttattgaggtataattggcatacaataaactgtgcatgattaaaatgtacgagttgagaagtttcaacatatgcatctgtgaaaccatcatttaaaatcaagaagatgaacatatccatcactccaaaaagtttcctcccactcctttgtggtactaccctcccacccatctccacaacactgctcccgcattcccaggcaaccactgatctgcattttgtcactatacattagtttggattgcctagaattgtatatgaatggcgtcacaccacaggtactcttttattgcgggggaggatctggcttctttcactcaaaatagttattttgagactcatccatgttgttgaggtataccaatcaaccattccttcttattgcttagtaatattccattttgtggatatgccacaatttattttccattcacctactcatggacatttggttgtttccagtttgggcctattacagttaaagctatgtatattcatgtataagcctctgtgtaggcatatgccttcattgctcttgggtaaatacctaggagtaaaatggttagatcatgtggtaggtgtatatttagctttttaagaaatagccaaactcttttccaaattgttgtattattttacatttccaacatgcagtatacaagaatttctgttgttccacatccttgtcaacatgtgatatgatctgtctttcaaattttagccattctagtagctacagtgcacagtgaaaccttattattttcctgatttgcatttccctaatgattaatggtattaattcatgcacttattttgtcatttataaatctttggtgaaatgtctgttcaaatattttgcccattttaaaaagttgggttgtcttcttattgggttgtaagagttatttatgtattctagttagaagtcttttgccaaatatatgtttcgcaaatactttctccaagtttgtggcttacctttttattttcttaacagagtcttttaaaaagcagaagtatttaattttgatgaagtacaattcatccttttttttttttttcatttatagtttgtgctttttgtgccatctttaagaagtctttgagaaatccaaggtcactaagatatcttctagaagttttgtgattttagctcttacatttagatgtatgatccatttttagttaatttttacatatagtattgatggcagtggcagcccgtctggagcagctgctgcaaagatgcaagctgcagtgagggaggcctggccagggctgcacactccacagaaccatgaaaacaggaacaggctggagccccacctgcttctgagttggtggggtgggagccccaccctcctgggcacagctgcagctgcccaaccacagctgtggacctgggcatccttgtgctctcaggggcccaggaagccccttgcccccacaggcttgaaagtgcctgctcctgctgtctggcctctccctgcttctggggcagagcaaagttgtggccaagcccagacgctgtcacaatctggcaggtgtgtgcatgcttggggcaacactgacatgccagccccctgccacctcagccccctctggactttggacactgatgagcatgggaggggaagctgagggggcgctgagggcagctcagtgtgggcctgcaggctcccgctggcacaaacagccttggtgccatggacagtggcatgaggcagactggctcctgggcaaaaaggggtgggtcctcagtgaaaccctacctttaggcaactgagagtctgaagcctgggggctgggctgccaggtcctcagactggagtgagaacttatggcactttttctactgcccatggaccaatcagcatgcacttcctccctcttgagcccataaatatcctaggctcagccagactcaagaaacatggggacaacctgcctgcgtgtaggagctacccactccagatctcctctctgctgagggctcagcagacatcctgacgacctgcctgcagaaaggagccacccactgtgggtctcctctcagctgagagctgggcagacaaccggacaacctgcctgcagaaaggagctacccacttagagtctcctgagagctatactgtcactcaataaagcacctcttcaccctactcaccctccaattgtctgcatacctcattattcctggatgtgggacaacaacttgggacctgccaaatggcaggactgaaagaactgtaacacaaacagggctgaaacaccccctcactccccatgttgcaagcgatgagaaggacagaagagagaaggagagaagagctttgacacttcgagaagcccagacctaagagctccctgagccaggactgtaacaccctcttgggggctctgcatttcctggcatctcaaagcttccaggtgccaccacattccctagtgccagcagtggaagccgcttgtggtactcctggtccagccacagctttgcaggagccagcgcccatgccagcacctggagccacccgccccgccacagctggcgtgcctagctgtgcgcagcggccagacctcgcgctcacttgctcacgcacccctcaccactttgcgcctggctcgtccttggcaggcatgggatctgggccagtggcatgagccgagtgcagcctgcaaggccaaatgggcagaatgagcccagtgggcctgagcaaaactcgggcaaaggagccaccggccacagaggtttctggctggcagagcaacactccaaggatcctgtgacagtatgaggaaaggagcaagatattaagagttttttggcatatgctattcaattttttcaggtttatttgttgaaaagattatcttttcccccactgaattgccttggcatatttgtcgaaaatcaattgatgacatatgtatagatacatctctgggttctatatactgttccattactctatctattttcatacctatactatactgtgttgagtagctcttattataatgtcttgagatcaggtagtgtaagtcccaaaactttgttttttttgatgaaagtcttgactatcctaggtcctttgcatctccatataaattttagaattagtttggtcatttccatcaaaaagaaatctgctagaatttttattggaatttccttaaatctgtaggtcaatttaggcagaagtgatatcttaaaaatgctcagtcttctgattcatgaacataatgtatctctatttatttaggtcttctttaatttctcttaacaatgttttttattttattttagattcagggggtacacgtgtagttttgttacatgggtatatcgaacaatgctgaggtttaggcttctaatgatccaggtcacccaagtggtgaacatagtacccaatagtagttttttctacccttttggaatccccagtgtttattgttcccaactttgtgtctgtgtactcaacgtttagctcctacttataagtgagaacatgcggtatttggtttcctgtttctgcattattttgcttaggacaatggcctccagctgtattcatgttgctgcaaaagatatgatctagtcctttttgtggttgtatagtattccatggcgtatatgtaccacactttctttatccaatccactattgataagcacctgggttgattccatgtctttgctattccataatattttatagttttcagtatacatgtctttctcatctttggtcaaatttgtcccaaatttgctgcttttttttttttttttttttgctgataagagatatttaaaaattttccatttctaattgttcattgctagtatatagaaatacaactgatttttgtatatttgattttgtatcttgcaacttttgtaaactcacttatgagttctagcagcttttttgtagtattccacaattttcttatgcaaataaatgcagtgctacaacttcctttccaacttggatgccttttatatatttgtctttttttatttcattgaccagaacttccaatacaatgtttaattgaaggcaatttttacagagtaatatttctaactcccaggcccggattaggctgaactatggaatcttgttgaatttgatatcttttggaatttattaaatcattatttatacttcatttttaagctttttccttttccagtgttcaaatattcatcaaatgttcaaatattgaacaagtaccatgctggctgtcagggaaataatggtgcacaaacaggcatggacctagcgctaatgaagtcttaccgtactaccgaggcagtttaaaacaggaattaaaaacacaggttcagggttctgtctgcttgggtttgaatctggctctgctccttaatggttgtttgaccttggaaaagttaatcgacttttctaagcctgtgtcttagtgaaggtattaataatacctactcacaggattgctgtgaagattaaacgaattaatacctttaaagtccttaaaatacggtttgacatatagtaaatggtcaaagagtattattattagagggaagaattagctcttcacaaggtgaatctacaagtgactggtgaaggaggggtgtacaaacaagaaacataaaaaccagtttaactgctaagcatagaggcagcagtgtcagctgtacctgggttaaaatccttgctctgctgtttattgtctaggcaactttgaccagacgacttaaacaagagcaatgcccgtaaagtgcctagtgcagtatttggcacacaacagatgcttaaaagacagcaattactgattcagacgtcccgcagagcagtaatatcactaacatgtgctcatcatcatatctatcatttatcaaagctcaggattttgaaccttgtaattacttttcatacattctcttatgcttaacaactcggctaggtgaacacaatccattgcctcataaagaaacaagatgacctttgtgtatctatgatcagtggggaggctggaggtctgggaagtggtaccttggagcccaactgttgaccaaaccagggctctcagtgcggccttggtcgccagcggggcgctccactttccgctccggagatggcaccaggagagatgggagtctgccaggctgtttccatggccacctcatgaagcccctgctccgggagcgtgacaggcgagactctccttcgccgccacctctcgtctcagatgaccatctgggctcgaaagccctcaggagctgcggagcgcgggtcggtaggggcgctgcagaggaaggttgggcgccgtctcccggcaacgcgcggggggcggggctttgcgtcacagaggtgcgaccgggtcccggcctgagtcgcggccrcccgcaggtctgagctgtgggctgaggcagcgcagccgctgccgcagggtgcgcgatgccttgaacctggggtgagctccgcggcgctgtcctttcgtgtttcccttgctagctgctccaggactctgggtctgggaagagaaaccccagagggccctccgctgccgagccaggcttccgcggggagacaggcctagccccgccgccctccccgggcctcggattggggcgtggggacggctggggaggccattctattgacgcccgtcttctgcccggcgggttccagttgcccggggtggcggtggcttgtcccgcctcggggtggttctgagggacccggagagagtttttccttctctatcccaaaacggttgtttgaatattgccgccggctcagtcattcggccgccggacttagctgttggttaaatgtccaggtgcgcttgaggaggggctgaggcggcgtagccagagcgagcgctagggtggcccgcgggctcggtctccgccgggctggacacccaaataagaaaccttttgcctgggacgatagctcagaaatagccacgtcgatctacttagccagccccacacttmtgaattggcttaggctgctacccttcccaaaggtctttccttgtcaaactagctgctaccttgagacccggctaagaaaagaacgttttcttgctaataataagaaggtagtgattacacagcaggagcagaaggcttctgtgttagcttttgaaattattccttcagttatttgtctcggcgttacaaaatgtggatttacgattgttattgaaatcgatccctatgccccttattaaaggtagtgtaccttttatattctgacactgtcctatttagcggtgccagctaattcagttcttgcctctggcatatatataaagctgctggaacactttcaattgtttataattcttacatcttcagcacgaatttattcgttttcactcccttctgcccattcttcttgctataaaatgacctctacccattcagaattttgtctgggggcatgagctgccaccggccgacgatcctaaattagtcacctccatgtcgaagtcacccgtctgagaagtgatgctttctgaattcagagctcaaaaatagtatggatttttatccttttctttcacattgcctgacttcagtttctagaactttttctcaagaatatgactatatgtttcaaaaattaatatttgtcatttggtgtaaatgaactttatattcgatgtgtgtagcctgatccttcttggttcccatctaaatacaaacacgctttccttcccaaaaaggcaagggaggtccagagagaattcttacaagtctaatatgctttttccaatatgaaatgcatttagtaaacacactgttactgtgagaaatccatattcttaatctcctagtacggcactctatccttttgtagtttctctctccttctctctctaatatatatatatatatatatatatatatrtatgtatctttttctgatcaagatctttgattctggaacaggcattctggactctatagtgactctggcctaattatttcactatgtatctatattaacttgtcttgaaaaaaaaaagttgatatctgtttacagatctacagtttgagtaaacaatgagtaataaagtaaataatatccttagggacccagtcagtagtacttggtatttattactgatgttaaagttgacttgacagtgaaaatcattgatgtttatttcaattaaatccttttaggtgaggttgatacaaaatttgatggagaactggtttcagagaggtttttaaaatactacagtgcagtacttgtcatttagtcattttggtgcattttcagccttttccattttgctttagttattttatgaatgaattatggtttaaatttttaggagtttttgagcagttttttcgtttttgctttgccagttacccatgatgtaattttaatatttttataaggaatatttgaacttccacaattcatttgttagaaaaataagtgattcactatgtaccacccactagagaatgtggcatttttggaatccttgatcttgtgcatttcaaaataacagttctttatttagaaaatccttcaaatgctttttgaaagcatatttttatcttgcaaaaaatgactgtgttataggtggcacaataatatgagagctgctagttctttgagaaatcttgaccagaaattyatcttttgttgaattctgtgccagtggtttgcaaattatgtttctatgcaataccactgttgcatggcctaggggggagtatcttgttaaaatcaaatagtaaatgtttcccagtttacataagcattaatttaatgacarattttcacagttttacattttctttcatacatatttttaacttctgcttctctccaacctagtactaatagatgactgaccaaattaacaaaagtcaaaagaatactaagtgaataataataaaacaaaaactgccaatggtatttactgcatttattcagtaaacatctattgagtgcttgtgtatctgccagaagacagaccatagctgctgtcctcaagaagctcactagagggaaayggccaagtgacttaacgaatgtcatagtatgatagaaatatgtgcagtcaccaaagagggacactgaaaagctgtggtggttgactagaggatggcctcaacagattgttttcgtgaacatgcactctgtgttgtggttttatattgtatgcagatcacagagtcatatcttattttcacacccatatagtgatagatgttaatatttatcartattttatggttttcaaaataaactaaatgtcaagccctctttctggaaccaggttgaaaaccacttctgcaggctctctcaggtagtctctagatactgttgcattttaaygcaaggagttagtgatgaagtttcccagataccaagtacagttacaagataacaagttaatatgctgcctcaaattataaactttactcaaagttagggcagcagatgaaaacaatgctgaaacaaaggggatcattttctattaataactcaataaataagcaactaactcttcttttgaaatatggttttggtgggtaatgtagggtagcaaaatacgccactttggcataaggattattttgagttaaaagcacattgaaaagcagcagatgtaagaagtgcccactgaccctcctaattcttcctgaaggctggagataaaacagccatgtgaaagatgtcctctctatgccaggaggaagacattatcattactagaagtgggcaatcaaagctgagagaaatgtgttcaaagaagccttcttaaagtaacccttatcttcctagtcacttttctgtgattaactggcccagcccaaacccttgtgtcttgtcatgttttcacagtttacttctcctttgtccaatctactatgtaagcttttggccttaattactttttttagtccttatttttcttgagggctcctgtgtatgtataaaaattactaaataaaatttgtgtgtttttctcctgttaatctgtcttaggttagtttaattcttgggcccagctggagacctcagagagcagagggagagaaattctatctcccctataccacgttggttaaattatcataggtatttatattaaatattgagactatatatttcaaaagttcagtttttttctttgttaagtaatgtagatattattcaaagttttcagcctggttgactagaatcttaattacattttcattaaattggtacaggaatgttagaggaaggttcagtttcattttgggaataaaatgttaggttaaaggtcacctactccacttcccacccaggtaaaaatccctgtaacacttattagatgtacttctaatctttacctaaacacttccatacttccaatgagagggagctcacatgtagcagccatttccacttctggatggtgcgacatgcttatcatcaactgaaatctgcctttctaatttatacttactatacttagtggccatcccattctctgtaaatgaatcttgtttttccacatgacagctcctcasatatttaaacaaacttatattgcttcattgttaccaaactatgactatctagaataaacctctttttttttctatgcccatgaatatgttctaatttattagtatcctttaaagccaactgcttagagctgaatacagacttttcagtgtggcctaaccattgcaaagcataatggactagtaggctgcttgctcaagatacctgcttctagcaagagtttaggattattttagcatacttgttgcccccgttatactgttgacttattttgattaaaaaccccagacttggccgggtgcggcagctcatgcctgtaatcctcggcctgggaggccgaggcgggaggattgcttgagcccaggagtttgttaccagactgggcaacaaactctgtttgtttaaagagactccatctctttaaaaaacacaaaaacaaaaacccagaccttctgtattttaactgcttttgagcacatcttacatatgtgtttttgtgcagttggctcttcaggatataacttttagtcatattaaatagcatgtaagtgtctgttttagtcttgatcctattattcactagataatattcatttattccagttttggtcatccgcagattgggcaggcatacagtcttcaggtcatcarcaaaaatgttaaacagcccaactcttggtgccagtttccctctccctttgcctctctgctttagtcmttgtggcctttttaaaaattacctcaaagtcaccgtsctgcttcctgtctcaggcacttttcataacctctgcctggagtgtcctccttttgccatttccctactttttttttaatccctaactctgaccattctgacctcaagtaaaatgttgtttgcccagggacttcttccctgatacaaaactaggtcaagtcccccttttataggctttcacagcacctgtacttgttcacctagcacttctcattttgtaattatacatttatttgtgtggttactgtctcttctccactgtattggatgctccacagtggcaagaaccatgtttcttttgttcactgttttatctccagaacataagcaccaggcacktgctacttgttgaatttaattttaaaaaagtcctgtaacacagtggctccctaataccagtctgcaacccttggcttctgatgatgttttcataagtttggattcgatcaagaaaaataaggacaatgtgtagtatacctggtaaatatgtggtatacctcattgtgaagttactgcccttcttgggaaagactttttttctaatattatatcctacttttcaggttataagttctttttragatttttgttaagttttggggaatttttgtttatttttggaaactgtccttgcttagaattaaaagaagtatccaacaccatggtgctttgagattttactagtctttgaaattcagcaatcactgttgttgactgccctagagacctcttctaagctaagatctttaattgtttcttcttggatacagttgctgtaaatccacttggctatatttacatataatttgacttcagggatttttttttttttttttggcctggatcttcctcaacaacttcctttcatttatctctataatgtgatatttattattaccaagtaggctcagattcaraactgttgttttttgtttttttttttwaattacaattgtccttttcctattttaggtaactaaaggaattaacttcaaatacagtacattaaattttaatacctaaaggaaattttacatattttggggttactaacttcataaagttatatatattttaaatttatagctttattttttgattaatgataaagcaatcttcctaccaaaactttttctataagagtattactgtttcacctgctttatgtgatatggttgttaatttggatgaaataaaatgatagtctttgatggataaataaaatagaatttcttgggggggcatctgattttgggggcatttaaaaacttgataattagatatatattttgggggtacctaaaagagttaatgaacaaaagagctatctttttccaggcagaaaatgtgaggtggttaaaatatctaacattttaattttcttaggtttttcaagccacaagtctttttatatatttttaaaaattaaaactaaggtacacatctataaataaagtaattcaacaaaaaattatttagctgatgtaaatatattgtgagccagtatgtcatagtggataagaatgtaagtactagaatctgaaaaacaaattcagagttcactttcaccacttacagctgtgtaactttagataaatcacctagctcagtttccctgtctatgggaaataggtaggggtgtaatattgtctacctcttaggattgttgtaagaagtaattgacataatatacggaaaacagtttggagcctgacatgtggtaagcagtcaggaaatgttcttaggaaaattatagaaggtagacaaacttcctcttaaatacaattacttgaatgcgtgtgtgtgtgtgtgtgtgtgtgtacacatgcacatgtgctttagtggtttttgacttggtaaaattataagaattagaggttcatcaccctcccaataatatataagtgaatcctgttttctcatttagctatgtgaatctgaaaacagagtcatttaaattctaccttagactcatgtaggtctactcaactctcacttaaaggtatccctagtttttctttatgtttttgaagaatgagtatattgccgtttttgtataatatgtaaaagtaacttttctgtatatttgacagaaactatgtgaagcaacactctggattttgaaagacatcttttcatcatgggacagcaaatttcggatcagacacagttggttattaacaagttaccagaaaaagtagcaaaacatgttacgttggttcgagagagtggctccttaacttatgaagaatttctygggagagtagctgagcttaatgatgtgtaaggcttgctctttttgtttttcgtttttccccttgttgtatgtatgccccatatgtcatggctgtgtaagatataaccagaggtgttgattggtaagacttaatgttttcagttagcattaacaaatacttattgagtatctattataagttgactttctatgtagctttttaaaagtatgtaatggggacagaagatatggaaagaacttaaaatggaacttggaacacagcacaggcatattgaagcaattctaggatacagtagtacatcccagcatctcaattttataccaatagactcttgtttgaaagcactaaaggggtgcataacaaaatggaatatgagaattagccactctagagaaagactcctaggatagtcaaaggtaacactgagaaggtttctgtacatgaagcaattcattcatgtgtgtgtgtatatagacacacacatgcatatatatatatacttttttttactgtgtcatcattttgctagaggaatacatatgtagtaatagcttattttcatcactgagaaataatatatttcatttattcatattttctaattaattaacacctttaaatttctacttaactctttgactaaatttctaaaatgaaatataaatttctctgccttcttaaagagtacacctaatacaacttagtcttctatttgttaatttatttatcaattttggtattgatctatgtagaagctatgaaaatatatagggctctttgttcctgaatgcccccagaccactgtgcttttaaaatatgacttttttgctatttattttctcccttggtgacaattgggcagatgtcatatctttcttttraatctgcctctagcaacatccacatctacctttatttatgtatatcttctaacccctgggagtataattagaacctrtggagtcacctcttaaatgagatcttaaaggttctctgtttagtctcttcaacttagctaacattcactaagcacatagtatgtgcaaggccctctgctaaggattggaccttttaactgagggccaagttgattacgcaggtattaatggcatgtccacctctctgaatctcagttttcctgttatcccatattacctctccttaaaccctaaaaaggctgaatgaaatcgactagcagttcaggaccacttagtatataaacttacagtactgtagtcactattaatagtttaaggtaagatatatgaacccactccgtaggcattacaaccatggtgttaggtgataagagacatgcttagcaatctgtaacatattagataagcttgatatactgtctttatgtgaagacatactgtctttattgggaagaataaagactgtcttaaaagttatcttagaagatggtttcttttaagaagattggatttcattcattaaaacaaaacaatataaaacaaaaagctgtatatagttgtggggtgtgtgtgtgtgtgtgtgtgtgtgtgtgtgtgtgtgtgtgtagaaaatgaactaaactattcccagtgcttgtctctcggttgggagatggtgggaaaagggggcagagagggagattttacattttactgtgtgtatttatgtatttttatgataaaaatatagtcattggttttaaaaactctagcattttacttatttttaaaaattatccaaagggtagtgtgcaaagcattaattctgggattatattcttaaagaattttaaaaataggattctgaatttagtaacataagagtggaatgctttgttatgtttatattttcaactcttatgagcagtaatcaatgacatttaccattcctttagagtcttggaatttatattcataaaccctgtctattgtatraarttttgccctttagcataaagatacaggtattagataaaatgtaccctataaaaccatccacaaactaagcttactgtgtgatacagaggtcttccttttatttatttagcacaggatatttctgactggatttgattcttaaaaccaatttccatgggtcagaattggcatttcagacgtgcagtgatctccgagaactgtagaattaaacctatacaggacgaagcttggcagctagaaaacagagctggaaactggcacggctgaattattttcaccgaagactttgtttcctaaggctagttgcttaactttcratggcctcattttatttagctgttagttgagtgtgatatccccactggtgctcagagagagttgttagtaatgataaaagggaactgcaatacttaagcatgtcttcgaactgatttaaattaatgttgatagcatgatattgaattatcttctagaagtgatacatttttatgtttaaatcctttagctctctaaattaaaattactctgctaggggaggacagtagagctatatataaagtgtctcaaatcatttgttttacttgatgtagccccaaattatctgaacaaaaattttcaagaggtttgttagtatcattgtttgaacaaggactgaaccaagagcaagatgtttttcatgctttatatacgtctgaggcaacagtcaaaaaattttgataaatgacactagctaaccttttttttttttttttgagactgagtctcactctgtcgcccaggctggagtgcaatggcgtgatcttggctcactacaaccttcacctcccgtgttcaagcaatgctcctgcctcagcctcctgagtagctgggattacaggtgtacrccaccacgcccggctaatttttgtatttttagtagagayggggtttcaccatgttggtcaggctggactcgaactcctgacctcgtgatctgcctgccttggcctcccaaagtgctgggattacaggtgtgagccactgccctggccaaccttttttttaagtccctgatttctaagacttgtttttcctaaatgtctttgttagaaatttaaagaccattgagatataggtgtgacaaagagagatttataaatatcatgccaccaagctgttgactttaaaaaccttagaaattaagttgcatgtttatgttcaaaatattctctatccctgttttaagaatccagttattataatcattattatttgtctttttgtgtttcttcatatttccttctctgaaattgtttcttgaatctagtttcatggctgtattattttattaatatatgatttttcataaaattaacatgttcttgtctcttttcagaacggctaaagtggcttctggccaggaaaaacatcttctctttgaggtacaacctgggtctgattcctctgctttttggaaagtggttgtacgggtggtctgtaccaaggtgagactgatggagacttctacctctgagcttaagctattttggtggctagaactatatttaatactgtaagataatataatgcatatacattttaataactcggtggttttgtaaaacatagttttgttactgttattgccttctaactagctgtttgaatcttasagttgtctaattgctatacagcaggggtttttataatcaaattcttttttgcctcaatatctctaaccattacatcatactaatcttctatctctgtttttgggtttttagctggctgtggaatgctaaggtgacatcctatttagctctaagatgataccttaaaaattaatgttatcttgagatcatttcttttaagaatacattcattcattaaaaagaaaaaagatccattgaaagagtttttttgttttttagtaatttttagttatgggatagattttttgccagctgtcattgagtattagaaagcctcaaccaccactgagtagattcagatagaaagttcttaactttttgaggctacaaaccttttgattaaatgaaggcatgaattttattaggccacctcctatccccaccccggctctaaaacaaagaacaaaatcatccatatgcatataaaccataaattgggcattcatgagcgctctgaagttcattcccgactgacccataaagattccctgggttaggagatttttcctttgagtcacggaccctggaggttacccaaataatatgccttatttcctcagtagattgtcagttttacccatactgtgttttgcttccagtttattcagataaacatttgagcacaagtgtgagaggcattaggaatatatgataaataagacagatttcatgctctcaagcagactgatctctctcttctgatccagattatcacagattttgtattaatctctatacttctagactcttctccaaattctaatttatgctgctgtgagattaacctttctaaagcacaactcgcatcagattactgccttgcttaaaattcctcagtaattccttcttgcctaccaaatagtcccaactcctacartatgactccaaactatcttttctgcattagtcacaatgaccttcttttgctctgcattcttatcaggcttaactaacttaagactgtatcattgttacttttcttttccagttcagtgcttctgcttattgtgttttctcaactaggatgtccattccttccattaggaagtcacggaaaattcctgttaaaccagtttaaacaaaaacaatacttattttctcacttatcaagaaatcctaactctatagactaactgcaggattggttaaattaaagacccagcagatgtcacttctgaactcactggtcagtattgggtcatatccccttcatacacctacactgacagagggaatatgattagcatgattggtttagattagactaaccaggattgactcctgcatcatttcagggaatggtggacacaaaaacaaaataaggttctgctggcaatgaaaagaaggaatggtatttggataatcagccagtagtttctgccacaccttttatttctgcatctctaaacctgatgtctctttaaaggtccacctcaaataccatctcatccattaagtcttcctgaataggagttctcttgtctcttccagattccaacagcacattatttatactttataatactgcattacgawaaaagttgtttaggttcttagctcccctttagagagtaagctcctgagggcaggaactatgtctagattcattattgtatctcttacaggctgtaatacggtgctttacacatagtaggaactcagtatatattaagtgaacaaaaaaaatctgttgaaataatactctctttttaaatgactgggataggttgargctttccttgtttattgacacagtatattatctaaattacacttaatgttcatttttatttcataaagtactcagctcacattgaagaggccaatataaattgtagaaagctaagggaatacgaatatatcaggcttttcatcccttcgttttttgttgctctttgacaaatacagacttaaggtttaattttattagtagtcaaattcctttttgcctcaatatgtctaacatctgtatgtgattaaacatcttccttaaaataagattctaagtagagaaacaaaagtactaaaggcacaggcaattagatattttttcatgtgatttttcttgattttagagctactctaaagaaatttttttatttgcattccttaggttctttctgaaagaatctgagaggtcagtgtttatgttagaaagaggtcaagtccaccatgaaaaactgataggagattgagagtttcacatttcttaatgttaaacaactttaaaaaaattgtactttaaccctctgtatttacattaagtctttttcttgactctctgccatctgctatgattatccttaaataatatttaatccactataaaaaatgatctaaattatgtttaaatggaatattttatggaaataatattagaaaaataagagattaattaaaaactaggtactaaggtggctgttaagaactacatgaattatattatttcatccttcttttttcttagaccaacttcttagagtcattcttggcttttctttgtctctcayacctsacaatctgtaagtgagtcctgtcacatcaaaatgtattcagaatctggctagctctcaccatctacgctactaccaccctattcctagtgaccatcctctatcaccaggattattccagtagcctcctaactgatctccctgcttctcttgccctgcttctgtctattctcagcacaacaagcagtctattccaagcacaacaaccagcctattccacatcacaatttgaaatgtaaattagatcatattactccttggctcaaaacccccccccgtgacttctcatgcacttggaatcaaagctacagttattactgaaatcagcaaagtcctatatattctattcccacctcaccgtctatctaccactccttcctctgtccgtctgtcactctgttccaaacactctgggcttcttgtgagactctctgtgctccttgccaggtacacctctattaaacagcctttgtatttcctgttgtctcagcctggaatgatcttccccctagacatctatatgactcatttctgcacctttcagttcttaaatgtcaacttctctgtaaggccttccctgtaacccctcagcgttccttctcccctgtttcatcttctccattacacttattttcatctaacctaatctgtatctgtattttatttgcctgtctctcctacctatcatgtaacttgcttgagggcagggattttgttttatacacactgkggctagtgcctagagcagtgcacatagtaccaataacatccacataatggtactcaataaatacttgtttcaggaatcctatgatgagaatagttacagtgtgatacactttgctatttctgtactgaccttatatggattattccataatttcttctgtactatgcagttccaaaggactacccgtttcctcagctctgaagatctattttgtaagcctgttaaattcctgttactttttaattctgtttattctctacctcatgtacagtcttttagtacaaagaaccttgtatatttgcatctccagatagattttaccttcccaaaatttaatcaactttctgattattagagatggttctaaaatttcttagtatggtatatgactcattctttttttttttttttgagacgtagtcttgctctgtcgcccaggctggagtgcagtggcgccatctcggctcactgcaacctccgcctcctggttcaagtgattctcctgcctcagcttcccaagtagctgggactataggcgtgtgccaccatgctcagctaattttttgtacttttagtagagatggggtttcaccgtgttagccaggatggtctcaatctcctgacctcatgatctgcccacctcggcctcccaaagtgctgggattacaagcatgagccaccgtgcctggccrcatgactcattcttgagtctcagtatttttttccctgccttttcaaatagtaagcaattaataaacgtgttacaactattattttcatttacaatattcaaatgtataataatattttaaaatatgtaatctacctcattttctgatacccctagttccatcaatacattccagaacctaaagtcacaattttatggccctgtgtctttgtctctctccctatattcttcatttctttctaaatattttctgattttgcttgttcttactctgatatgcacttaatagatttcatggcttacttcttccccagtcttccatcctatgtcttgtgctgaaaggaagtctttcatgtctctaatctttctctgatttcaagttcttcatccaagaacattataccttcaccttactggcctcggtcatttcattatgcctcactccatggctccccaaagcttgtgaaagcaatctcctctgcttgccccaagtatcttctacattagattgtaaactggatgggggagaggtacaacctgtaaaggtacaacctttgggccactggtttcacctcatattaaacgagttttttgataaagctcaaaatggccttctgggaaaagtccaaccaccttttgttaggatttattttaaagtaattttcttgctttagtttagaagttttggtacaaaatagaacttaaagatatttaagaaagtacttgtttgagttgtagaatctcatgcggttgttggagtcaaatgaatcctgtggttaagaaattctttaagaaattaaagtgaaagaattgttaatactgatctctaaaatttatttcttaactctgagaaagtcaccttacccatcaacagsataatgcctaattaatcttacagggtgattttgtgtgttaaatgaggtaaatttgtataagaagtttgaaccccacaagtgtaggggacatggtattactcatttattcagactcttgctttcttatgtaatttgcaaatcctgaaaactcctatttcctaggatgtttgactaaatatttgttccccctttttgggaaaaattggtcagagaaatgatcaacttttctttttcatgttctttgtatttttagattaacaaaagcagtggcattgtggaggcatcacggatcatgaatttataccagtttattcaactttataaagatatcacaagtcaagcagcaggagtattggcacagagctccacctctgaagaacctgatgaaaactcatcctctgtaacatcttgtcaggctagtctttggatgggaaggtatataatgcataagtattgtatttcacttattttctaatatgaaaacaactgaaatctattaatatttttgctgttgctcattgtagcatcttaaatctttttttttttctcagttggtattgtatctgagatcagttttggggttattctgtgcttcggatgttgttacagtgctaaattaaagtggcttggcagggccactttaatattaatgtttctgtcacactggtctccaggaatccgctctatatgcatgcatttattgacaaaggagatagttaacaccttccttataataggtatttaggttcttagacagtcaaagctttttagggaattaggtcaaagaatttggcaaaatcatcccactttttttaaaaaatgtctaattgaagcattaaaattttatatattggcttcaggacttggcagtccattcaggaaggaaccgaatgcatatacttagttaccagaaggaaatgaagtcagccagagttttctctgatgatgtttgtttacccaggcctaatacattattgttctatctaaactttcttttccttctctgttatgcttttggcacatgaaagttcccacttcttgacatttgacaatcatgatcataatttaaatttgtaaatatctcattggaaaaagatttacatgggtccaaacatgttgacatcctgtcttactgtcatactgggtagatagcagaaatctatattcaccgtgtcctttaccttaaagttaagaatgtacttaacagtgatttttttttttttaattgaggcggagtcttgctctgtcgcccaggcgcgatctcggctcactgcaagctctgcctcccgggttcrcgccattctcctgcctcagcctcccaagtagctgggactacaggcgcccgccaccacgccyggctaattttttgtatttttagtagagacrgggtttcaccgtgttagccaggacsgtctccatttcccaacctcatgatcctgccctcctcggcctcccagagtgytgggattacaggcatgagccaccatgcccggccagtggtttctttttttttactgctctatttacagttgcattttctggttcattcttaaccaactggttttcaagcactatgttacagttaaactgtattttccatttattatttcccaattatctttaatagaattacttggttttctaggtttggtctatacaagtgttactgataggccaagtgacttttagaacatggtaggcagtgtttaggcttgtctttcctgtattctgtaatctttcaaagatggatctgatttttctgcttttcttytctccagaatagtggttgttgttttgtttaattgttttaaaagctgaggatggtgtttgccaatgtatttaagctgtatggtagcacatgaaaagaaagtattgtttttttcttgttacagtcttcttaatgaagaaggtaaaggtgttatcccttttcatgtgccctcaaaactggaaattcagttcctgattagcttgttaggggtgcttcttgtttttgtgtgttttttcagtttataataatacccttatacactagttcacagaaagagactttctaaattgaaggaggtcttaagggatatttatgtagttgaactttacatctgatgcataattccattgatgttttacatttattgattacttacagggtatagaattgtgatgagtgttgtacatgtataaactcattaaattctcacaaccccatatgggagtacaattatcggcccatttcagccaaagaatctgagatttagctaagtaagtgtcatgattagaaattgttctagccaagactcacattcaggcctgtctggcagtacaactgtgctctaacctattactttatggtgcataaagatcttgcacacagagcttctgaaaatttattactcagtggttttgaggaggagcctgagagtctgtcaagctcccaggtggggccaatgctgctgatcctcagataacactttgaatagcaagactctgcttacccacattttgccaagtccgacttgcaagtacaagtaacacctgcagttatgtgagactcactgcctgaaaaaagcaagccttttcatactcagatggctctaatcactatgaagtttttcctattgcttcattttcctcagagtagccaaaatctttcttgaggcagcacggcacagactctagcagcaagttgcctgtgttcaaatcctggctccactcctgtgtgatttttttgacaaatcaaactgtttcctcagtttcctcatcttctaacagaggttgataactgtagtatatgctttataggatttttgagagaattaaaagacataagatgctcagaacagtgcttgacacataataatttgtctataagagttaactgtcattattattgttactatattctatttattgttttcaatggctgtgccctctggaattcctccaaacaaatctgttctcttttccagcctttcaaatatttgaaaacagtcatcaaattctcactgaaccttctgttctcaaggataaacacccccagttcctttggcctttgtttatgtgggtctcgtctacatactggaggctttcccagatggtcttttctctgtcagtatgtgtgcctttcagagtatgaggcatagaaccaaatattccaatctacaggtgatctaacaggaacaaacagcacaagactctccttccttctggtcactgtgctgctaagaaggtagcaaaaagttaagagaactttktactggttccactggctatttctgtatctcccattcttttatctctctccacaatgctcttctttgtagtcctctgcttctcacttttaaagtccagccttcagaatattctttcactctgtacagattcagttatattctctgctactgagaaactcagatacattagacccatatccatctaggtttttattcagttttcccattccaattcagtgacttccctcttttccctgttactaacgtataacacttaatctattaccacataaaagatttgtcttttataatgcttcttagacctaattatctctcagatgaattgctgaaataagatcctaaccagttttcctctttctagactgtccctcatactgcactcccaatttatcttcctgaagtaccatatcagttggagttcacttccccttgattatacactgattgtagtttgcttgtcaggacacgttcaaacttaatattttgacatttaaggatgagattatctccactttatctaatcaatctttttcctcagttttccatacccaagtatcatgccagcttcctggttacatatacacagacataaacacacatgattttgctttttacctctacaactttrtttatgcacctagaatgtcttctattaaaatcctattgtttttctatctcatcatttcaacaagtttgagatatattcatctcttccttctttacttagcacttactatatttaatatacatttgacatttatttttacattcaaatcaaaattttaagtactatctaaatatcttacatacagtgctataagcacaacagggaatggaaaacatattagtgatagctcctatccttaagaagtttatagtctagtggctgtactttggaacagtcagtttttatattattacaaaagtaatacatgtctgatgaagaaaaccttaaaaattacaaaaaagcacaaaggttaaaagaaattaaaatcacttcaagaagcatttattgagaatctaagacaaacaccctatattcaaagagcttacagtttatggaaaggccagccaatcaatatgcaatatttaagtcttttcattgaggcaagtgttgattttgagagcagagagatgatgatgttttgagctgagttaccaaggttggagcttactaaactcacaagggcagtttcaggaaaggaaaataccatctgcaaaggtatatggctcattcaggggctctctgaattgtggctggagcaaaaggtttgaaatcttttttcttcccaagaagatgaaagagctcctggaggacagaaactgctttttattccctttgtatctctcacagcacctgatacttaagactaaactattctttcactcatatgcccattatcaatgtcagcattgtaaggccctgatggcaggatccatattttagggagctttgtgttacacatagtgaataaattatatggtcatgtatcacctaacaatgttttggttaatcacagactgcatatgtgatggtggtctcaagattataatggagctaaaaaattcctattgcctgtggacgtcgtagccatcctaatattgtgatgcaatgcattactcaaatgttcttggtgatgctggtgtaaacaaacctactgtgctgctcatagtataaaagtatagcacttacaattatgtacagtaatacttgataattatgttactggtttatgcatttattatactatactatactttttaatcattttagagtatactccttctacttattaaaaaaagttagctgtaaaacagcctcaggcaggcccttcagcaggtattccagaaggcattgttatcaaaggagatgacagctccgtgcatgttactgcccctgaagaccttccagtgggacaagaggtggaggcggaagacagtgatggtgatgatcctgacgctgtttaggcctaggctaatgtgtgtgttatgtcttagtttttaagaaaaaagtttagaaagtaaaaaagtaaataaatcttaaaaatagaaaaaagcttataaaatatttctgtacagctgtataatgtgtgttttaaggtaagtgttgttacaaaaagagtcaaaaagttaaaagtaaaaagtttataaagttaaaaatctatagtaaagattaatttatcattgaagaaatatattttttataaatttcgtatagcctaaatgtacagtgttcataaagtctgtacactactgtacaagtgctatacagtaatgtcctaggccaagcttgttcaactcacggcccacgggctgcatgcagcccaggattgctttaatgtggcccaacacaaattcataaaccttcttaaaacatgagatttttttgcaatttttttagctcatcagatattgttagtgttagtgttagtatatatgtggcccaagaaagacagttcttccagtgtggcccagggaagccaaaagattgtacactcctgtcctaggccttcatatccactcaccactactcactcactgactcacctagagcaacttccaggcccgcatgctccatttatggtaagtgccctatacaggtgtaccatttttaatcttgtataccgtatttacacagtaccttctctgtgttcagatacatttagatacacagatacctaccattgtgttacagtagcctacagtgttccatacagtaacatgctatatatgtttgtagcctagaagcaatagactatgccatatagcctaggtatgtagtagtaggctaaaccatctaggtttgtataagtacactatgatatttacacagcaatgaaatcacctaacaatgagtttctcagaccgtatctctgtctttaatgcaataactatatcggttaaatttgtttatttaagtccaatatgattaaaatgggctaaattgtttccagaaagatttgactatttccacttttgcctatgttttctttatcacaaaatgtatcttttatctagtctttctttatgaaatgtagccctcttaatactttttccctaatatatttgctatccctaaaagataatattaattttagtctgattttgcacatgagtcatattgtgctttatactgtgggcatatagatgtttaataatgctttttaaagcaacaaaaagtataaagcataatgacagagaatataattgtttcagctcagttttcacattgcagggtgaagcagctgaccgatgaggaggagtgttgtatctgtatggatgggcgggctgacctcatcctgccttgtgctcacagcttttgtcagaagtgtattgataaatggtaagttacctactgcattcatgggctgggccaaggtcagtgggatagtgtacatgaataaactttgaaaagtgcaaaaatactgtagttaagtatgagagagattttattctttagtactttgaattttatggcatgccttctactggttaaaactatttttgtttacacctaacatttattaaatatgggggtgtaccttagttttgacacttttcttttgctgtatgaaaatytgtgcctgactkaagtctaaaatcaaacatttccctttttcctcctttttttctcctcatttctacatttattctgtgtatgtgtttagaaggaataaattcttgaatactggacctcagggaactttagagatcagctagtcaagttcattattttacaaaataagacttgagcgtttaggataatttataaaatacatacartaaactacatgtatttaatgtacagtttaatatgttttggcatatatacacacccataaaagttatgaatttttataaatggaatcatataatatgtgctttttttgtctggcttctttcattcagtctaattaccttggtatttattcatgttgtagcatgtatcaatagttcatgcctttttattgctgagtaatgtctgttatgtggataccatagcttgtttattcacctattgagggaaattagattattttccatatttatctattacaaaataaaggtactagatacattcatggacaagtcattttatggatgtattttggtttttttcttgggtgaatacctagacatggaatggctagatcatatggtatgtgtgtgtttaactttttaaaaagctgccagctattttccaaagcagtcttgtgccattttacacccccactagcagcatatgagattgcattgaataaatatatcaatttagggagagtgaatttcttactagtgcatcttcctatccacatacgctgtatatttctccacttatttaggtcttctttaatttctgtcaccaatttttttagttttcagtgttgcatatctttgacatctatccccaagtatttcatagttttatgctattttaaatggtatttaaaatttcaatttatgattgatactagtatatggaaatacaatagatatttgtatatcaaccttgtatcctgcgcccttattaaactcatgtatcagttctggtagtatttttgtagattccataggctcttcttgaatgtccgaatatcatttttcaaagactttttttctgattcagaattctagacttgagagtatyttttctttcagtatgttaataatgttgcttcacactcatcttgtttgcattgtttctaatgagaactctgtcatccttttttcctctgtaggtaatgtgccattttttccctctgtttttaaggttgttttcttttcactggttttgagcactttgattatgatgtgccttagagtagttttttcatgtttcttgtgcttggggtttattgagcttcttggatttgttgatttacggtgtcatcaaatttggaaatttttcagccattattttttcagatttttttctatcttctctcccctctcctgtgattccaattaccatgtattagcccacttgaagttgtctcacagctcactggtgctatttttttctttcttttttgagtctttctstgggtttcatcctggatagytactattgctatctcttttcatattcaccatttttcttcaatgtctaacttgccattaattctatccagtgtatttttttaacctcagataattttcatttctagaagtttgatttgggtttttattatctttcatgtctcttcttactatctttgagctttcctctagttttttaactatatagaatatagctataataactttccattttatctgctaattctaatatctgtgttagttctgggtggttatgattgatttttctctttattatagattatatttttctgctgcttttttgtatgtctggtagttctcaactggatgccagactttgtggcagactttgtgaattttacctttttgggtattggatatttttgtattcctatgaatattcttgagctttttttctggactatagttaagtgacttggaaacagtttgattcttttggatcttgcttttgtgatttgttaggcaggaccagagcagtatttagtttagaactaattatgtcccactaatagcaagaccctttagagaactctactgataccccaagagttatgaggttttccagtctggctggtgaaacaggcagtatcccaggcccagtgagctttaggggactatcccctcaaagccctttgattgattgttcagcctcggtagtgtcttcacatgcacacactgatcagcactctgctgagtattctggcggggacacttccgtagacctctggaattttccctctgtgcagctttccattaccctgccctgtaaaccctagctgtttggccccccaagattctcagctctgtgtgttcagctcagggagtttgccatgttccatcaagcttcccgcttcttgatcaggggctagaaactctcgaggctgtaagctgaggcaagtataggtctcaccttctttgactcccatgtcccagggatcactgtcctttgttgtctgatggccagtgctttatttgaaagattgtatgaaaccattgttttagtaattttaggtgggaagataaatctagcctctgttggttggaaacagaagttgactatttttaaattgtgatgttttgtgcacagaagagcatacatataattatcttgtaaaatacctctgaagaactagaaatcaacctaaataatatatgccagctgtagctttcacatttagtttttggaacagagttctaaatttttgcataaaagccaaagagcagttgatacaaataattactttggtcccagatttcactgagagatgaaaagaaaaacatttttctctgcataatatgtctctggctcaaatacggtattttttaaattaccaaaataatgtttgaccagaaaaaaatccttttcgaaaacataatcttatttaagtgatcatatatgagttcttcccctgccagaaaaattactgtgcatgtaaagtttatcttttaactttgtatgctccatttttatataagtcttcctgttgcttatgagccataggaattttttcagacctttaagcaagcaacaggtagatatattgttgaaagtcatgtagatatttcttagaaaaataattaataatatcctttcttcttgtcatattcccctgccactgccaagaagttattcctagagtaatggcttccatttaaataatcacgaataagcatttatacttgacactttgaccaaatcttccattgatgcgagggaatttcctcttgggactcagaaggaatttttattataaaggaatactttacctgtttaggtatggggatgcgaattgctgcattgttggtagcaacaaaagatgggaaaaaaaactaaatgtccttctgcaggagactagttaaacaaattatggcatagcgatacagtgtatgttaaaaagaataaacagctctaacaggtgctgatacatactagtctgtaagatatattgacaagtggagaaatgtgtgtgtgcacgtgcgtgcatgtgtgtacacataagcttaatccagcttagtctatctctggaggaatatataagaaactggtaactgtggttgcccctgggaaagagaattgaagattgagataggagggagggatttatttttcactatrtatttctatgctatttcctttttaaaagccatgtgcatgtattactttaaataaaatcctgtttttaaaaaagaagaaagcaaactgttttgttttgacttctctaataggagtgatcgacacaggaattgccctatttgtcgcctacagatgactggagcaaatgaatcttgggtggtatcagatgcacccactgaagatgatatggctaactatattcttaacatggctgatgaggcaggccagccccacaggccatgaccttgaagtgaaagtcttctgttgctattgtgggctcaaatatttggtcatgggggaagaatgtagggttgtggcactggcacagacacaggaaaatccattttccccactcttttatttttgctattctgatcatttgtcccccttttaaaaataaacttcccrtgtcttccatttgtggtactaaaatttgctactgttttagaccatattttcctattatttatctgttcaaatttgtattattacaactaatagctcttgaattctttgctaaaggtaacagcaacacttccagaggcttctaaaacactactgttttgcagggcaggagtattctggaatcyttttacttagatataaaataaacctcgaatattaaaaagttgtagccatctgagagaggaaagtttaagtgactgaaaatgtagaatacttcaacgtgcatgttactacttaaaactagtctttctgctggaatctaaggagtatatatatatatgcccccttgtggttaattattgctcctttaataatttttacttgaaatgatccacaattatttcataactttagcagtgtgttttggaactactgtacttaaaggtttgtttgtttgtttttgccatactgtataatttgggtgaggtctacaaaattgggtgtgactttcctttgcaaatggatttctcctggggaattttcttggctgttctggaaatgctttcccacagctgggtaactgttctaaatggctttgataatgctcacacatcttggagtttcagaaggaaattattctgcatcacaaatactaaattttatatttctaaattactataggtcatttaatattggtttatggtgcttttatttccttaacttgaaaacatctttctgagatttcagagtcctcaaatttcttagattaagagacaagaggccagtgcagtggttcacacctgtaatcccagcactttgggaggccgaggtgggtggatcatttgaggttaggagtttgagaccagcctggccaacatggcgaaatcctctctctactaaaatacaaaaattagctgggcatggtggcaggtgcctgtaatctcagctactygggaggctgaggcagaattgcttgaacccaggaggtggaggttgcagtgagccgagatcacaccactgcactccagcctgggagacagaacgagactcctaatcaaaaaaaaacacaagaaaatagagtgaggcttttttaccgtatatacataaaatacttatgaaaattagaagataatttggcattcctactgtttcactgtacttccattgaaatactctttccattaaaatattctgaaacaatatagtaataatggaattgtgatcttcagttgcacctcaaccattttttttgcttatgaactaaaatttctaacattaacatttcggcatgtaataaaacaagggcctatctcctttaaaatttaacattccatgtaacttttctgacttatcattcataagttgcaaatattactattttcctaaaccagggtacacaatttaagttgccacttattgatgacagaatttctggatagtaggattttaataggcgagcaaataaaattcaaatyaatttcaaggraaaacatctggccaggggtagcttgatttcgcccccaaaaatactgaagactaatccattgacattcataatgggacagctaagtaccaaatagctaactactccctatggaggtttatgcaagcagagtaccaggggttccatcatatcaacctggcaatgcacttggtggttgtgtgaccttgagaaagtctcttactcttgtttatgtgttcttactttagaaactgagactttatttgtggttttcacactatttcagcagcaaaaactttttcaaggaaaatcttacagaacctttaaacacgtgtgcatacacacataccctataccccactatataaaagtcatattattataaatttccttattatataaactttatatactataaatgtgattaagtcaatgaataaaaacattaatgcattggtgatatccagcatgtttgaatttggtgagtaacacacatatagtgggagtcgttttttttaaaaaaattttttaattaaattcaagtcaaatttgcagaaccctgtatctcctccatagattcttagtattccatggaacatattttgaaaaccttgggatagatgatccactgaaatcttttccagctctaagattttaaattgtccttttagattagacttgctgagtttaattcagattacctaattttaaaatgtttctgaaaagtgaacagagttaccttacagagttttggatctttccagggatagccaatgattttatcccccagaatccttcacctttcaaggagttatttaacaatgagcccagtgactcaatagggcccaaacctttttattttacaatatgagctccaagacacttrctgatctactgtgaatataaaatgttattagccttatcaaataaataaatgagcacagctctttgttcgctctattgaactgggtgataattatttagatgtgaatgttaggtcagttctactgtaataactaatcgtaaaagttgtaaatttgtttaatggatgaaatgtacactttttgtattctgtacagctttgtcttttttaaatatgaagtacttaaatgtacttactatgataggaaatataatgtgtgccttctaggatttgtgaagtggtttcatgaactctaaggaatttgttttccctatcctaactcagtaacagagggtttactccgattatgtatagaaccttagtttgagaaaatgaattttactatgtactgaatttagaggttgagaataataggatctgtgttattcttagtacccactgataaattgtgcaataaataatctttcgcaagtgattttagctaattgaagagattattttcctatgtaatttcacattctaatatactaaatgtttatattccttagagaactattttatattgtgcgctgggggcttgtgatgtttgtgtgctgttttaaaattcatttcaaattggactcgatttccttatatctaatatatatctgggagaaaaggctgcttgaaaatatcttttgattcagtgatttttaacattgggaagttgagtttattaaaaggtagtctgaagaatttgcatttttaactgctattgtctgaagtcaagcttagtctatccgggaataagaaaactacttgcagatgagggaagttaacaggtcactcacattcatgctgggccacacaatgacgatacaatacaaacctaagcagctgacaacagactcatttgttcgtatgtctattcaccctgctgtagcagtcctcaacctttttggcaccagggactgcattcatggaagaccatttttccacagaccagggttggggtgggaatagtttcgggatgaaatttttccacctcagatcatcaggcattagttagattctcataaggtgcatgcaacctagatccctcgtatgcgcagttcacagtagagttcatgctccttgagaatctaataccgctgctgatctgacaggaggtggagctcaggcaataatactcactcgcccgcggctcaactcctgctgtgcggcctggttcctaacaggcagcagaccagtactgtccacagcccaggggttgtggacccctaccccaacagacagcaaaaataaaatgctcaaccctattgtagtttgtttaccttgtaaaatcatttccaaaatataagaatgtaattagagaaacatcgtagaatcttagtgctgaaaagtgcaaggacataagaatgagtggcagttggtagttaaattgactgtatcatcatactgtggagaaatgcacattttactgtcaaaatacataaaagcctttgcagagataggttttgacacgcttgcagctgtttatagtcttactctctgtcatcttctatcttactaattgcaaaaatttccaaggaactgtttatctggttagtattcccctagttacacttgttctttataatgatcatagttcaggcagagtatttgggtatatcaccttcagtcatgtctcaaacgcaggaaatgaagaatattgtttcaccaacactcagaagtaaagagaaagcaagagaaaagtgctttcggctcttgtttaatccaagaggccgtgaaaaatcacaacccaggagctgtgatttgttttcacgaggcaaagagcaatgatgtcgatcggtttcagcggtacaatttgaagtaacacataaagtgaacttgagcccttaaggataaagaagggataactgcctcaaaaactgttgctttagaaacctaagccagtatacaattaattgcctcttattccagttgcaaacacaaaggaaagtagggatttgtcccccaaaaggccaattaagtatagcaatgtaataaaagcacaaagtgctatagaaaagatgtcagaaaagcttgcaggacaccgctgctagccccataccccgagccaaccaaaccccaaagacaccccatacagtttatnnnnnnnnnnnnnnnnnnnnnnnnnnnnnnnnnnnnnnnnnnnnnnnnnnnnnnnnnnnnnnnnnnnnnnnnnnnnnnnnnnnnnnnnnnnnnnnnnnnnnnnnnnnnnnnnnnnnnnnnnnnnnnnnnnnnnnnnnnnnnnnnnnnnnnnnnnnnnnnnnnnnnnnnnnnnnnnnnnnnnnnnnnnnnnnnnnnnnnnnnnnnnnnnnnnnnnnnnnnnnnnnnnnnnnnnnnnnnnnnnnnnnnnnnnnnnnnnnnnnnnnnnnnnnnnnnnnnnnnnnnnnnnnnnnnnnnnnnnnnnnnnnnnnnnnnnnnnnnnnnnnnnnnnnnnnnnnnnnnnnnnnnnnnnnnnnnnnnnnnnnnnnnnnnnnnnnnnnnnnnnnnnnnnnnnnnnnnnnnnnnnnnnnnnnnnnnnnnnnnnnnnnnnnnnnnnnnnnnnnnnnnnnnnnnnnnnnnnnnnnnnnnnnnnnnnnnnnnnnnnnnnnnnnnnnnnnnnnnnnnnnnnnnnnnnnnnnnnnnnnnnnnnnnnnnnnnnnnnnnnnnnnnnnnnnnnnnnnnnnnnnnnnnnnnnnnnnnnnnnnnnnnnnnnnnnnnnnnnnnnnnnnnnnnnnnnnnnnnnnnnnnnnnnnnnnnnnnnnnnnnnnnnnnnnnnnnnnnnnnnnnnnnnnnnnnnnnnnnnnnnnnnnnnnnnnnnnnnnnnnnnnnnnnnnnnnnnnnnnnnnnnnnnnnnnnnnnnnnnnnnnnnnnnnnnnnnnnnnnnnnnnnnnnnnnnnnnnnnnnnnnnnnnnnnnnnnnnnnnnnnnnnnnnnnnnnnnnnnnnnnnnnnnnnnnnnnnnnnnnnnnnnnnnnnnnnnnnnnnnnnnnnnnnnnnnnnnnnnnnnnnnnnnnnnnnnnnnnnnnnnnnnnnnnnnnnnnnnnnnnnnnnnnnnnnnnnnnnnnnnnnnnnnnnnnnnnnnnnnnnnnnnnnnnnnnnnnnnnnnnnnnnnnnnnnnnnnnnnnnnnnnnnnnnnnnnnnnnnnnnnnnnnnnnnnnnnnnnnnnnnnnnnnnnnnnnnnnnnnnnnnnnnnnnnnnnnnnnnnnnnnnnnnnnnnnnnnnnnnnnnnnnnnnnnnnnnnnnnnnnnnnnnnnnnnnnnnnnnnnnnnnnnnnnnnnnnnnnnnnnnnnnnnnnnnnnnnnnnnnnnnnnnnnnnnnnnnnnnnnnnnnnnnnnnnnnnnnnnnnnnnnnnnnnnnnnnnnnnnnnnnnnnnnnnnnnnnnnnnnnnnnnnnnnnnnnnnnnnnnnnnnnnnnnnnnnnnnnnnnnnnnnnnnnnnnnnnnnnnnnnnnnnnnnnnnnnnnnnnnnnnnnnnnnnnnnnnnnnnnnnnnnnnnnnnnnnnnnnnnnnnnnnnnnnnnnnnnnnnnnnnnnnnnnnnnnnnnnnnnnnnnnnnnnnnnnnnnnnnnnnnnnnnnnnnnnnnnnnnnnnnnnnnnnnnnnnnnnnnnnnnnnnnnnnnnnnnnnnnnnnnnnnnnnnnnnnnnnnnnnnnnnnnnnnnnnnnnnnnnnnnnnnnnnnnnnnnnnnnnnnnnnnnnnnnnnnnnnnnnnnnnnnnnnnnnnnnnnnnnnnnnnnnnnnnnnnnnnnnnnnnnnnnnnnnnnnnnnnnnnnnnnnnnnnnnnnnnnnnnnnnnnnnnnnnnnnnnnnnnnnnnnnnnnnnnnnnnnnnnnnnnnnnnnnnnnnnnnnnnnnnnnnnnnnnnnnnnnnnnnnnnnnnnnnnnnnnnnnnnnnnnnnnnnnnnnnnnnnnnnnnnnnnnnnnnnnnnnnnnnnnnnnnnnnnnnnnnnnnnnnnnnnnnnnnnnnnnnnnnnnntgtctcttactttcaaccagtgaaattgacctgcccgtgaagaggcgggcatagtataacaagacgagaagaccctatggagctttaattcattaacgcaaacaacacttaacaagtccacaggccctaaactatcaaacctgcgtgaaaaatttcggttggggcgacctcggagcacaatccgacctccgagcaacacatgccgagacttcaccagtcaaagcgaattaccacgtttaattgatccaataacttgaccaacggaacaagttaccctagggataacagcgcaatcctattctagagtccatatcaacaaggtgttagctggacagactaaaataataccccgggaaaaggaaaggaacatgtatagctttgctcatgaactataacagggtagaagttagagaaaataacaaaggaagatttatcttctgggtctggtgagcttcagtttgaaaattttgagttttcctagtgaatgtcattcatgtcggagtcttagtaaaagataaattagctattattattgatagcttttcatggtgcccaatcttaagagtaaaaatctttaacatttgctttaaatatgattatctttaaatagttttaaactattgagccacagtcctagctgactttatttaacaatttaaaaaaagatacttgatacagataaaatgacaatgagaaactacacaatacttcctatgttagggcaaatgtatataaatgggggcttttcaaaactaatccctaagataacaatggattttcattcaatttcataattagctgtaagatagcatatatatctgcctagtaaaaagactgcatttatacttccatatgctgaattgaccagtggaggggacaggcattataaagtcacaagatgagacaatctaaagtcaaataagttcacaggcagaaactggattcttcttctaactataatgattcaaaaagacctcctgtagtctgaatttgaccacagaaatagataggaaggtccttgagcagcctcttaagtactaagagcacatgtccttaaaaagttgccaaaagaaattcacttagttattcaatatgcatttattgagcacctactacataccaggcactagtaacacagataaagagtacactgataaagcttaattcagattaatctttaaaaatgctttctacttggcccctgggaccattgtatcttctgaagtcatcacagtagataagggagaaattttgccttaaaaaaatgcacccggttacagtgattaaaaacacacacacacacacacacaactaacatttgtggggtctaatggaatagtggggaaaagacaggatttggaataaggaaatccagtttaggcctattacttattagctgtgtgcccttaagttaaatttcacttatctggcctaactcttaattggtaaagtgataattggcctacagttgtagcatattagagccaaaaggaacagagatcatctagtcctgtgctttttgaagttcttcgttcaaatgaaaatattatgtagcagccccagtgtaaaactgatgaacgcagtcactttgacagcccctgagcatcactcactcccttccctcccccaccctaaagtattcatgaggagattcacagaacaccctgaaagccactcatctagtccaaaccctcactttctaggtgaagaaaccaagactcagaataggagtggctgttttcatgagtacatttggcttccaactagaaagagggaaggagggctaaataaaacggtttaagaaattcactaaaaacacaatttgtcaagaaggaagtcttccatcttaactccttcaaagtagcccctttatgaaatggagctttgaaattgattgtgtttaaggcagccagccatccagaggctgaaatgaacaactaccaattagcctacctgggccaatggagaaaagtatggcagaaaaccacatgttacttggcatctgaccagggaaaatcctggccccaacagttcaggcactggcagtttcaagagaaatacttggaaaattaggaacaagtatagacaagtgctcagctcccagatccccaaggagaagtcaccatcttgttactcagaaatactaacaagtgagcatgttaactcttaaagtgagcagtgcaaccaaaatcaccagtttaaaatttcttcagaggcatcctcttcacagaggaaagtcctagttcggaatcttgaccactattagccacagcagacttgaaattgaaccaaaaagttaaaatgcatgtcaaatgctggacctagttggtcaaggcggtgatctcttctgatttcatagcatcagacaggaagctgagctcattgcataaggtctcatatcggaatgccatccggatctgagccacatttgtctttcgaatatcatttccttcaggtccttctttataataattttgtcccagaaacttttgcttttcctgtggaccaagagaaatacaaatgaaactatatacttttgattcactttctatagccatgtgggcagctttgacatcagtcacagcaagtcagactagtccccctgaagcagatctttggtcaggacatcttatccccacagaactcttaaaattcctgctggcctctgtgtcctcaaggatgtcaccctgacaacctcagtcatcctcagacagcccttcattcctggctgtgctttccttgatcagagaggaaagataaggt

SEQ ID NO: 97748 - DNA, 17439 bp, Homo sapiens
tatggactgcaaatcactcatgtacttaaaattatgggatggaggtgacacacaagggccaaagtaactaagcaacacatctatcaatcaaaaaggcagacactggctagagattaggcagccttgggaagagaacacacacacacacacacacacacacacacacacacacacacacacacaaagacccagagtacacaaaactaatgttgatctcatctgccagaggtcagtccactctccccctctaagagtgtaatactgtgcttaatatctgtgtgtgtctggtccagttctttgttcaggacaccaagagcctgaaattacagagcactatccagtaacacacctatcacagcctcccgagtagctgggactacaggaatgtgccactgtgcccagcaaacaacacaagcttattaacttacagttctgcaggttacaagtgtaacatgcgtctcaatttagggtgtcaggggccgggtgcggtggctcacaccagcactttgggaggctgaggcaggcggatcacctgaggtcaggggttcgagaccagcctgaccaacatggcaaaaccccgtctctactaaaaatacaaaaattagccgggtgtggtggtgggcgcctgtaatctcaactactcgggaggctgaggcaggagaatcgcttgaacctgggaggcagaggttgcagtgagccgagatcccactattgcactccagcctgggggacagagcaagactgtctcaaaaaaattaaaaaattaaaaaaaaattagggtgacagtaggtctttctggaggccctaggggagaatccgtttccttgccttttccagcttctagaggccacctgtgttccttggctcatggccctttcctccatcttcaaagtcagcaatgtagaatctctctgatgcttcttccttgtcacgtcttgttttctgaccacagctgggaaagttttatctgattttaaggattcatgtaaatagattgggcccacctggataatcaccccatgtgaaagtccttaaccttaatcacatctgcaaagtcccttttgccaggtaggatacacaccataggattaggacatgggtatctccagggagccttcattctgcctaccacctctgcatgaaagtgagggggggtgtgtgtgtgtgtaggtctgtgtctcctcagcctttgcctccaatgcagagggcctctcttcaaactttgcatctattttgctgtagtcagagtgaggaaaccttagcccattaaaccttagtgaggaaaccttaccatatatttgtggtaagcaaacatacgcaaaaccaccatgcagatagggacctggctggagcacctctcctggggctggctttctagggaactggaagataattcacagagatcccttccaacgcatctatccatcccaaactcagagtcaggtccagggaggccacaatgatgggaaataaatgaggtgttgagtgaccatgaggcagaacaagccttatactccacgctaaggtgcactccctcagctagcccacccagtggagctctgcagcccctcccacccgaccagcctgccctccacacaccatgctctcctgcctgggcattctccttattccttccaaccacagcccctgcctaaggaggcccctcacacctgggaggtttcctctttcctcctctctgactcgaactatgaagcatccttcatgacccagcagaagtctcccctgctcaaggaagcctttctcagcatgtccctgtcctcctccaaggctgtgccttgtcctttgagcacagggtactgtctcctggtcctgtttctttcacagtgcacatcaccacgatggccacacaacaggccctcggtcaatgccatgtcctgggcacaccacaccctttcaggcctctgcacttctgcacatgctgtctgctcttgactagaatattctttcctaactcctcttgcaaggtctcatcttctctgaggagccttctccacctcccctcccacactgctcttcactttttaacattcccacttttctctttttagaacctatccctgttataccattcatcacgtgaactataattccattagacccaaggaaaaaaacccatcttatataaacatttgttgagtggctactctgtgctagacactgtgcaaggtgccggggaaatacagatgaatcacacagagatctggcctcaagggcctaatgacttgcgttagtctggtatccacaccatactgggtagttgcagaggactaggactcaaatcgaattcctctgtgagtccccatcggcaagcacatatcagcccataaggaagatttgtggaacaatgcaagattttgacattcttgagttgtagcttcaactcagacaagccgctttactttcctgagcctcaggttcctcatctgctaaatgaaggcagaatccccagggctgggctaaggataagtggagactatgagtgggaaaactctctggagaccaactatccctccatatgtatgaaaggtagtgactgtgactgttacattctcccctgtcccctaccagggtcagccatgctcctcaaggtttatggaaggaatgagtaagcagctttcactagcactgaattcacaccactcaactctggcccttcctggatcctagagaattctctgcatagaatcatggtttccatcttcagcctctgggctctggatttattgatttctgttgagaaatctccatcctgaccctgctttccattcctaggccctggtttgtataaatcacaaataaggcaaatgtaaaaatctaagaatggaaaggatcaagctaggggaatcccttccagggactcacatcagagctggcgacatggttagatattatgttagagaacacggaagcttgtgaatggggagacatctacctggggtccccagcaagtcggcaataagacaaaggtgagacccaagatgcccagatcccatcccatccactccatatagggccaccaaagaccttccctatctgggtcccctatcattctttctcatctttctccactccacatatctagttctgcccagattctcaatgttctccaaacatgcccttgaatgaaatatgcctctttgtgcaccctcttttcctacttatttaccagtgggcttaactcctactcatccctcaaggcccactcaaatgtttccttttctggaacaaaagtctaaacttagtttgttcagaacccattcatcaatccctcctctgtgttctcatgtattctctacatacattgattttaacatttattaccctcctctataattgtctataattgtcttagtactcactatactctatttttctctagggcaggaattatttctgcttcccctctgtccccagggcctagaaaggtgtctggcactcagttggtactcaataaatgtcaccagctaaccagtcatcattacttactgagcctggctgatgaccctgaaaagaaactctgttactagggaatttccagcaggcggaattatcaggaaggacggggcaaatggtacctgaggtaagaatcctgtaagaaaaagatgccggaggagaaactgatggagacacaggtcacagaaggaagatgaggaatccaggagaaggtcatgctgggccctggggacatagtaaccattcagtccctgccctcaaggagctcatggtctgttggggaaataaacaaaagcacaattttgtacagaatgaggctgcagtaaaccattttctcctaccaccctttctttacatggcttccaagataccatcaactcacccagctttctacttatctttttggccttccttctccatctggtttgctgcttttcctagtttcctcaaattctgaatattggaggaaactattttccaactacattcactcccttggtgatctcatccagtctcatgactttaaacaccatctacatgccaatgactcccaaatgatctatccagcccagatctctgccctgacctgcagactcatatgccttcctgccgccccaacatctctactctaatgggcatctcagactcaacacactcaaacctaagctccctgtcaaaaaaaaaccaaacccctcatcacctccccattccttcccaactcaaaaaagtggcaacaccaatcttctagtcgttcagcccaaaaatcgtggctcctttcttattctggcattgtccatctgttagcaaaccttgtagtctctaccatctaaataaattcagaattcaaccacttctcatccactacctctagattatcataataggctcccaaatggtctccctgcttctgccattgtctcccctaccccagtctatttggagaacagccagagtaactcagttaaactgtaaatcagattgtgtggaccctgtgctcacaaccctccactggctccccaactcctcatctcctacctattactctccctagaggacactatgcccaagccattctaggccctctgcacttgtattctctctctctgaaatgctcttccacaaatatcagaaggctctctgctccttcagacctttactcaaaagtcaccttcccagtgactttggccccccagtctgaaataaaacacctcccctgcaaatattttattcccacttctcagatttattttttctcttatttactgcaatcttacaactacatattttatttatctatcttctttattgtttacctctctcagaatgaaggctgcatgaaaagagggacttttttggtctgttttgtttactattgtatacccactactaagaatagtgatggacatatactaaggcactcagtaggtatttgttgaatgaatgaaaaaggtagtcatttccaagaggcaaagtttactctttaatgaaaaactataacaaacagtgctatttggcaatataatcacattcaatatgcacagtacacgacctcttgaacaattcttatccaatcttcacatcagcccaggatagaaggaaggctgggcagagattatgatgctggttgacaaagaagctgagtccagagagaggaaaaggaattgccaaaactcacacatctggccaggacagtactggaaatgcggataactgctgtccctgaaagaggctggtaagtgatggagtttaataggaattgggtttgaaggacctctgttgccagaaagcatgagtatctctaaaggcgaagctgagtcagaggttactagaacagaggcatcagcaaaggatgggagaggtgacgagggcgatctctaagtgtacttggcccaggcctgaggagggcagctgattcccccagcaacagaatgctgtgcctgaggctaactagtcattcaagtctgtacataatctccaatgtcaaaactcaacaagcaaccttaagagagaccactaagtctactgcatgtctgcagggtttggcttccctggactgtgaggtcttccagggaagcgaccatattcatagatttatccccagtttctagcaaggcctggaatatagtaatattgtaactctaatatttttgttcagagcaaaaataaaaaagaatgaatatgctcaaacgggaaactgtagctgagagagcacagataggaggggcctaacatcaaccagcaattctgaagtagtaacagattagttttctgggatgcagcaggacgaatggccctcgcactaaaaggttgctgtcagctcttcttcagaaggggttaacaagcaaatggtgactggcaacaaaagggcaggggttaaacggggcagtggttaaacgagaccgtagtgctggcgccaggatggagacgccgactggctgagactcaaggcggggcagataggtaggcgcggcacacttccttccctaacaatgtgactaaggtaggtcaacgtcacatccggtttagtgggcgggagcggggaaaacaaaaggagacgaaggacgcatgcgtttggtgagtcccggattctggtgggttcttccgctcaggctgggtgaagcgcttccgggtcgccgccggcagcagcctcccggcgcggtaagtacagacgcaaggctgcaaccgtctccttgccccttcattcctttttcccccagagaaacccatttcctttgacccgactccccaggagctccatattgagagtccttaacccttaaagagctccagctcattggccgcttcctcgagactaagccccacccsgtcacacaaggtccgtcattcattggtgtcacttcctgtcacccagcatttctttcagttaattggtcctacccaggccccgcttttttcgcgtttagcaaccctataaggccaaatttctgtctgagacccgccctgctttctttctgttggtcaactgcatggtcattatcgtaatgagcaaagaaagggcggtggctttgcgacggtgggttgggctttcggagccgagatcgctggtctgtcagtacttcttggacatgagggtgtttaccgtcgtgcctaattacgcgggttgggaatctgagatacagggaagggcagcggctggccctgggtcggtcagataaattaagacaaaagcaggaccaggcatcgattattttctcctgctyatccctttcacggaggaattctaagccccgacacactgtatgacctaaagccagtctctgcctgtcgctgggcctcagttcgcctgtcctaagtttaattcagattatctggcactcctggtcggctccctcagccgctcaaagctgattgtacccttataatgttagttcatccattcaatcttccatctacttatttatccacttattcatgcctcctagaatgtcttactgaaccctgcttgcatatgctacaatccctccaccccgacatttggctgtgattcatgagaggtcgttagtgtcctaaatttctgacactgggtgggtgtggtatgggccatcataaagggtcaaaaagcaggttttagtgtgtggaggaggtagggatagtttcagtagaaccctgctacctctaattttgtataatttcataatgccagtctgcattctggattcctatccctacacttgactcccattctcatccctccttgaacagcctgcaaacagctttgttgatccattatttacttaattatcagaataactttgacagtggtataattgttrttatccccattttacagatgaagacactgaggctcagagaggttaagtgactcagccaaggtcaaacagctagtaagtggtggagccaggactcaaagccaggtctgtctgattcctagggggaggggctgctttcctgctgtcttccaccctatcccyaaatcaaattacaaccaaattaaaaacaaaaacaaagcaaaacacattcacttgaccctttccctcagtctaggagccatgtccactttgttcccctcactcttccctcgtgtgactgagactctgtggtttaatctggatcgaccctgtgtggaagagacagagctgcagcagcaggaacagcagcatcaggcctgggtgagtgagcagctagcacagcacagagaccycagcayagacagagacctccttcagtgggccatgacccagccttactccagaaatctacccaggaagagctttttgccctgagctgggaataatcgggctgggagccagggagccaaggttctcatcttgtggtaccctattttacaggggtaccatgtgacttctgggccagattagagcccaggctgctgacactcagcccaagctcttttccctaaagcacaggaaataattttgactattaattgaggatctagcagatgatgctttctaggctgataagtctctcacttcatcctcaccataattatacaaaaaaaagaaggctcagagagtttaagtatttggatcaagttcataaatggcagatgacaagaaagggattgtatctccctgagaactgggaggaagcttctccccaacacgtgtgggttgtcttctgggcagaatgggccagtcccatgcccctgacctgccctacttgggctctggccttgttcctctgtgcctttgcccacagctccaaagcatcgcggagaaagacaacaacctggttcctattggcaagccagcctcagaggtgagtggctctagcaggtggggcctgtgtgggggccgcagtggaccgaggctctgctctaattctgaatgtcctgtctctgacccagagcagttgtggttctcagatctgggtaaaagcctaaaaggggagatagaaggggtgggcattgggcctagcattaaggtcctgcagaacatgcaccagcctgctagactcaaggagggagtgtcggggtagggggtcattcattggccctagagagaggctcaagtgggtcagttcttgaactggtccatgcaggcctgtagggcttacaggctctgtcctgcccaccagcactatgatgacgaggaagaagaggatgatgaagatgatgaggatagtgaagaggactcagaggatgatgaggatatgcaggacatggacgagatgaatgactacaatgagtcaccggatgatggagaggtcaatgaggtaggcaaggggtatgggggagggcctctgttcctggacccttgctcctgacccagttgatggccaaggggtacagaaaccctggatccagccaggggcaggatctggggctgaggctggctgaggcccctccccacccacacccagcctcctctccaggtggacatggaaggcaacgaacaggatcaggaccagtggatgatctaggtagacaaggcagggtggcctcagggagattccaggccagcccaaactaccctgcatcccaacccccaacccctgcccacagaaccagctgatggccccagtgcctgaaagtgcccttgggcacctcctcagctgctgccaggatctggtctctttggcccctcccaggccatcagtctgcacttgaaatccccagggcctgaaacctactccaccttcctggccagtacctcaccccttgattgccaggtctggtctaagtttctttaataaagacaaaggagtgattttccacccatgtctattccctatttgttggtggggcccagaggagtccagcatcttcttttgggctttaggaagagggcactcaagggacatcagccacacctaattggctaggtgggccagagttagggaaggccagggcatccctggccctgggtccagggttctgtgccattttctctggcccagcttgcatccagctattcctgcagggcgtctaactcattgccacttcctctgatcccacccagaatggcatgggctgaggatgggaggctttctgaggccgagaactgggaggcccctggagctctcccatccagcttccttcgtgttaagagagaagattaaatctcagagcaaggtggggattcccttggagtcactcagcaaatcagtgacagagctgggtcgggagctcaggcttcttgctgtcagtccatggttctctctggaaagagggggcctagtgagaccaagcagcctgatagaacttgacacttgaggtcagtgtagaggctgaaagaggtcagaggtgggaagagagactccctagccctgagcccagcgtgtgtcaaggccccaaacaggaaagggaggggattttgaggtccctgcttgggtgggggtgggggtgggcatcagtaagtacccctgggcctggacctcagcctggtccagcataggtgagctgagctattccatccttgatggcagggaagtctggaaggccagtgtggtggaggcggcagcggtagcggccacagctcttagcatactgcaagaagcggggtgcaccagggaagagcacatggtcagccagcacggtggcacctgctggcagtagggcatgggcctccagcagctgcaggtccctcaggtaacatcgtggccggtgtgccaggagcaccaggtctgccygactcagctgatactgggtgcgtaggcacgggatcacgtcctctgagctgcccacgatgagctccacctgtggggatagggggagctggaggtgagggtggggggaattgttctcccagtcaagaccccaccaggatctggcttacttcatgccaggtcctggcttagcttcccatgagtgttctcacatttcctctgacctcagaacctaagaagtcaggatcagtattgtgatttccattctgaagaagctaaggttcagaggatgcatgctttgctcaaggtcacgtagctaacaagaggcagagtaagagctggacccaaatttgctgggttccagagaccttcctcttagctgtttctttcgtcatccggcagaaaataatgtgcagatgacttgggacaggagggcaggagctcacacaccatccagcatcacagtccccagagtggaggtgcttccttctccttagatgggagtccttcacaagggatgtctgggggcaaggcctggggtgacaaaaatctgggttggggagatgggaggctgaccatgtgctcatcaaagccggccaggcggatgagtttttcagccactgctgccgtgcgtgggtcccgctccacagtaagaaggcgacccccagggggcagggctcgggcaataagcagggtagagtatccacagtaggttcccaattccagcacacaagcaggggccttctcctccaccagccgcatcaggatctgacctatgaggggagatggctgttgcagaagacatgggagatggatgcagggcycctgataaaagatatctcaaatgcctacctgcctcactgcagctcccaaccagccggggtctcatctgtctcttgtaccatagccccagctgccctcctggtccccgtctcctacagtgtagtcttcacaccagccctggaatctttccaacaaatctgaccttattactccttggctcctgtgagctgaaggcctttgggattgaacttgggattctcagcctggcattcaggaccttggacctgatcctatcctacctttccaggttcatctctcagtacttcccacctgtggcctgtatcacagccatcccaaacaactgtgcccagaatccatcaagctgtctcattccttcatgccacatgtgtatatgtggctggctttgcccttcccacccccatcgccatctgcctggccaactcagaacttccagattcagttcaaatgttgctctttctccatgaagtcccaggcagaaacaaccaccctatctttcagatttatgaaaggtctctgttagaatttgtagtttcattccccttttattgctcatcaaatgtatttctgatcttggaattggatgaacttttatttatttatttttgagaccaagtcttgctgtgttgcccaggctggagtgcagtagcatgatcacggctcactgcagccttgaccacccaggctcaggcaatcctcccacctcagcatttccagtagctggaaccacagttactcaccaccacacccggctaatttttaaattttttgtagaaacgggggtcttgctttgttacccaggctagtctcgaactcctgggctcaagtgatcctcctgctttggcctcccaaagtgctgggattacaggcatgagccaccatgcccagccagtgaatttcttttcttttctttttctttttttttttttttttgagacaggttcttgctctgtcacccatgctggagtgcagtggcacaatcacagctcactgcagcctcagcctcctgggctcaagcaatcctcccacctcagcctcccaagtagctgggaccacaggcatgtgccaccatgcctgggtaatttttgtattttttgtagagatgggtttttgccatgttgcccaagccggtctcaaactcctgagctcaagcaatctgcccacctcggcctctcaaagtgctgggattacaggcaccagccaccacacagccgaatttcttaaataagaccctaaaagcacttatgctgggattgagataaatccaggcagacagctaccctaaatggtatgtggaagcctccatggtggagaggaaagatgtggagacagataattacaaagctatgggttatctgctgagatggttattccactgtgtattatggttcctttgaggccagcatttgtggctcattcatctctgtggcctctacccctctccctggcacctagcacattcctaatacaaaagaggtggcaataaatgtttgctgaataaatgacttagtccaagctcctcatttccagatgagaaaaaaaagaggccctaaaagaggatcaagaacctgcccaattcatccagttaagcagcaacagatcccaaatattccttcactgtcttgggggtacttcttggagcagaaggctagggaacactgacctttgacaggccccatgtggctcaagtactcgcagcggctgctccagtggtccagggtggtgaggatgtgaccagggtcaccgggcagggcatgggtgagcacgtagctgaaggcccgctcctcgatccgcagccctgacaggcagtctcggaggcttcgcagcaagaccgtgcgcaccagcaatcggaagtagtgccggtaccgcaccagcaatgttaccaccagtggcaggaaggccaatgcaatggcaggggacatggtccctacctgggccctggggtggagggaggtagggagggaatcccatacccacaatttgcctatttgtgtagcttttgccagtagcaattattatccttatatttcacaaaccacggctcagaaaggctaagtcttttgtccagagtcacagagcagaactgggatttgaatccaggttagtgtgattccaagcctgtgtactttcaaggactctatactgtctactttcagcacccagccccaaaccacctcttcccggtcccaacccctggtcccatcttcacattgttcccctgacttgtttctctttatccttgaagtcaccccttcttcaggacccctttcactaattcacctctgggatatcttcccccacccctaccctctgcctgcctggtctcctctgaccactgctgtgtagcaaaagagcatagatttgcagtcaaaaacaccttcactatcactgtgccctgcctcagtaaaatgcaatcaaaataccccatagggtgttagagtgagatgtcctctttcccaccccaggactctccctctgcctgctcttccctgaggatgggaggagtctttgattctttaataattctccagccccatctcctctccgctgtattcccctcttctcctgtgctgtctcagaattcccttcacaaatgtgtacatacacataacacacagcacacattttccctctactcagctcttctctccagggacctatggggaatgggcctctcctcccatgtcctggaccattctcctcctcatccagatctgacctccttgccggccttcttgcaaggcccctggtgatggcggggagtaaaaatgaaagagtgtatggatgggtgtgaataggtgagtgatgcggtgggcttgaactggtgagcttgggaacccacaatccagggccctgcttacctgggctggaggaccagagcacaggacaggtcggggagtccagggcctgctgcgggggataaccctgaggtaggaggctggaatggctttcaattattcatgctgaggctgctgctgtcacctgagacctgcagttcaagttaccagccccagggacgagcttgagctgcctcctacccttcaggaacctcaaaagatttacagaacctcagggtcttgatttgaggggttataagaggtatgagatctggtgacttctccaatactttggatcagaagatggggcatggggtgagccaaggtgatggggtgactgtaacatgctcattgatatgcaagttttctgtaagcaaggccatgccttgggctacagggaagagtcagaacctgtcactgtgctccaggaactcccaagtttggtaggtgagactgacccaggaacagagaatacaatatagtgtgatcactattggatgttccatgactacagggactttggctgttttgtgaactgctgcatatccagatataacaatgtgtggcacatagtagacgctcagcaaatatttgttgattcaataaatgcatgaattaacactggatgaggattaagcatagggagctgggcatgtccagagaatggagtcagagaaggtaatcaggaggacattgtactgagtctcgaagacagtaaagacagtaggcagaccaggctgcatgtacaaagtccagtagatcaatcaggaaactacattatttctctatgtccagtgaaacacattgctgacccctccacccctcaccccagaacatgcagtgggagaggtgtcaggctcttgttatgtcagacgggtaatgtgccaaaacaagatttgagggtggcacatttgatacatgctggtgaacacccaatcacacgctcatgaacaacaaatggatcactatacaatcttggacggacttggacctgtgttcagggcccaagggaagacatggagcgggggttaggaaaagagaactgatggtcagctttgtgcgttcgattacaatgggtgctgttaaaaaaggcagaattaaagataaaagcctgaaagcagagaggtcagtgaggtggcttctatctcctctaccaggatttatctccgctgcgcgtcagcatgtgaaggtagtataaggtcccttcttcctgtaagtcgcagatccccagcccaggtggagaatacaccctctgtgtattcacccccagcccagctgggcgatacaccctctgtgttccccgactaggtactggtcatctggatcatctgtgtgtgtgcacccagaccgtacgatctggagcatcaggcctggatcccagtcgcccctcgcatggcatttagaagagtatatcacaagggcatacgagggcatttggtacgagttcgctcaatggcccagaaaagtggcctagtggccacgagaacgcataacacaattcacgatggccactactgccagtttagagactggaaagatgaagtcatgtgatccgccccgccctttccccgcatcacgtgcttgcgtgtacggttacgccttcccattggttgacaacgatcacgcgctagcgggcgggaccggaagccggggtattgactgaggcggccaagcggctccgggacagggggtacggggggtgggggcgggtggttgcctgcgggaggccgccgcgggtcatgtgaccggaagggctcctcacggacgccgtccctcctcggcgcggcctgagcgcccggcccgaccccggccatggggtgctgctacagcagcgagaacgaggactcggaccaggtgcggccgcggcaggcggggctcgggaatgagggctaagacactggggcatggggcccagaaagaaacctgcggaggacgggcagccggactgcagggctcactgaatacggaggcctggaggggacagattacagaggagacgccaagccgggctcctacccctgttaaagccccagatttctacacagtccccgcctcggggtgtgcaggcagccgcctgtccggctcgctcccaccacttccgtttgctcctaccttcaaaacttttcagattcaaggatcctcagtctaggtccccgggaaacactcccttccccagcttcctgtgtcttctgtgtattagtgggctttgcgaatccattttaggggtgggtaagctgaggccctgagttagtctgtcctgagatgaatcaggaattcgtgtatcgtcttagtccctggggttgcagaaggaaggtcgctgctagtctagggccaggggacgactctggaagttggtggcctttgaattggccaatgaaggatttaatcgatacagtgaggacatcgggacatgtgggaaattgtctgggaagcaacaaagaggatttagctttggctagattgtgggaaaagagaaatggagcgggaagttcatttggttctgagtttggcttgcctcagtgcagtctgcctggggcctgagggttcctttagctggagacatgcctattctgagaatttggctgtagatctgatacctttggagaaagggttaggctggggagacctgtacagttttaaattctccctcttcctcttagtgcattctcacttctccccacactctaatccctgccctgcctggcctgacattcaaggatgaagtctcaagttgctgtctactctccttttttgatcgtctctaagcccggattctacatttgaacatatagtagacctgagagagtagaaaggtttcaggtagctcacggtctaatggggaagatggtcacaaaaatagattatatcactggtacttgggaagtagttcgttcttcagtgaacgtattttggattaagggcttaagcctaggaaaatgtcgtttgtatgggaagcaagggtggcttctggttctcaattctccatacacccaatgaacacatatttcctttgccctgtgttaggcatgtgttgtgcctaatacctctcacttcacttccacctttttgagaaagagacaacaataaccctgcctactgggagagctgtagcctagtgggaaattgtcccttaaagcataatatggactcttgcagggaatgagtcaagaaggattaatgccgtatgagaaaggatacaagcttctacttggaagggagagctgggcctgctgctctcctgaatctctaccttctccttggggggctctcatttctgttcctaacacccagagaaggtgcttaatcactgctgggtgatttgaggcctcatgtagcaagggccataaccatccaccatcccacagtccctctttgagttcttgggcaggcccctctccgactctcatctctgtctctttatcataataaaaaatatacaacacgttacagtttacaaagggccttcacagttatctaatttgactcttgccagacatccgtcatattagtgtgggttatgtctattgaaaggtgaggaagaagttcagagaagctaagtgatttggccaagctgagaagtgctagtgcccaggtgttctgacgctaggccatgtactttatccatggggccaagctgtctcagccatgcccctagaccaggtggccagtcacgggcaggctgctatgtctgtgc

SEQ ID NO: 97749 - DNA, 20468 bp, Homo sapiens
tccccagggcctttatgatctgccttaggagcccaaagatgtgtgggatgtcaagctgaggtgaagtaggagggctacaagctcccctacaaccctgccactgatgactacgctatgccacccacccagagaacaaagaccctccctgcttccaagtcccagggcccagccttccctgaacctagtactgcaactggcaggagcagcaaaagccacaactcagccctgtacagccaggtccagaagagtggagcctcagggagcagggactgtgtgctttctacagtagggactgacaggactggggtcaagtcagaggtctctacctgagaaggaggactaggctgaagtggctgaggaggaccatggggaggtggcactagggatcagagaaaatggttagaaccagcagaagccagagggtgagaggggccatgccgtgtgagaccaggggaccagagggatgggggagtcaagggaaggacagtcaatcccaggaagtcctaagaagtggggcagatggcagggctgaggacgggctctgcatccccctaaagccattccttcccaacttccccaaaggaagggacagctgtgggaccaggtctgtggaaagtggtgcatggtcagagtgggtgcggtttgaggggcctgtgtggaggcctcagagagatgttggactgtgcctggatccttacccctgcattattctttgccagagatatattttaaaattttttaattgtcatgaaagtcagcttgggtttaaaaataaataaaaaaatttttaaaaagagggagaaggggttgtcgtggtggtggtggttaaatagctgatttatttaatgtgccaggcactgttccaacacttcatatattttaattcatctaatcataaaatgaactaatttaagctgggcatggtggcctgtgcctgaagtcctagctactggagaggctgaggcaggaggatcatttgagtccaggagttcgaggatgcagtgatcgtgccactgcactccagcctgggcaacagagagacatcctgtctctaaaaaacaaacaaaaactagtttgcagatgagaaaactgaggcacagagaggttgaataacttaccctaagtcacacagctcatcaatggtggaaccagagttgaaacccagcaaccaggctccagaatttgtcatcattcttggaagtgaagctgtcctgctctgcaaggaggcttcacagcaagattgcagtgacagtgtttcatgctagagcatttttagctcccccaggagtacacacattttgggggtggaggccttagtcaggatgagctccccatatcagactctcaaccaccagccgttctggtatgaagcccttgcagagtccttcccactctgcctgtctccttcttctttgatggtgagttctcaggaagcctctttgcctacccctatcacacatgcacacacacacgtgcacacatgtgcaggctggcttccaaagttccctcacctctgccatctgagagacctgtctatataggtctgaacccagtagtggacatggtttaaaacacttccttggaatgcttctcagctcctatgctgatcagcagatgcaaatggatgcctgcagagcagaaaccccaactccacatcctgcggcctggaaaggccagttcctgcccagctaaccctgtagcatcttacaataaagcttctaatcaccactaccatttgtttgattacctataaatgtgttaagtctttaaagattgtattgaccagaactcttggttgcaagtgtcagaagcccaaccaaaagtagtttagacagaagggaatttattgattcaaggaccaaactgtagaaatggcagggcttaagccaggcatggtggctcatgcctgtaatcccagcactttgggaggctgatgtgggtggaccacttaaggccaggagttcaagaccagcctggccaacatggtgaaaccccgtctgtactaaaaacacaaaaattagttggtcatggtggcagcgcctgtaatcccagctactcgggagactgaggcaggagaatcacttgaacccaggaggcaggggttgcagtgagccgagattgcgccactgctctccagcctaggcaacagtgggagactctgtctcaaaaagaaaaaaaaaaaaagaaaaaaagaaaaaaaaatgacagggctagatcatggtctctgagacagctggagccagggccttaggcagcactgggactctgcctccccttatatctctgcttgtccctgcatgcaagcttcagttgctcctagtgctggtcagcttcactggggaaggggtatggccacctgcaaattcctcagatgaggaaggactttcttccaggcagaggttgactcgtgagggaagaagtttcctgtccctggagagagaggaaatgaagagggcaggatgatccctcttcagagagtgcagagtggagttaggggatgagaatttcttccctggaagcaagggcaggattctccaacacgaagatttcagattagcctaatccattcatttgacaaacagataagagaggacctatgacatgcagagtgatgggctaggcaccacggtagggctggggagtgagtgagaaacaagatgacatagttctgccctaagaccttgcactgtattgcaaacacttcagcaaggtcatttgagtgaccaaaagagaggaagtactactatgggacatggcagggatgcccaacctagtctagcagcatcagggaaggcttccaggaagcaatgatatccaaattgagacccaatggataaacaggagtcaaccaggcttgggtttgttcggttttgtttgttttgtgtgggagggcagggaatgaaatgggcattccagccagagagaacagctctgaaccaaaagattagtgtgtgatggctgcaaagaaagccaagaacagggggaggcaggctggagcgctagcactgaggacgtggcgtgccagcaagagcttggacttgatcatgagggcaatggagagccatgggagggtctgagagcagtgatcccatctgatttcccaattctgagatcccttggactccctgtagagtatatattgagggggagaggtgcacctcacacaccaggagggataactttttgaagcagttgagctgtcaggtctcaatctctacaagtttagacctaaaaagtcatttgagaaaaacagaaaatagcaagtgttggcaaggatgtgtcaaaattggaatacggatgcattgctggtgagaatgtaaaatggaaaagcctctgtggaaaacattgtggcagttccttgaaaaacaaaaagagaattactgtatgatccaggaattccacttctgggtatatattgaaaagaattgaaagcagatacaaatatgttaggcagatatgtgtacacccatgttcatagcagcattattcacaacagctaaaatgtggaagcaacccgaatgtccacggatggatggatggataaggaaatgggatatataaaaggagttatgccaaaaagacaaatactgggctgagtgtggaggctcacacctgtaattccaatactctgggaggctgaggtgggaggatcgcttgagcccagaaggttgaggcagcagtgagctatgatcccacctctgcactgcagcctgggtgacagagtaagagtatctcaaaaataagtaagtaaacagacaaatactgtatgattccacttatacgaggtccctggtcaaaataacagagaccagcctgggcaacatagtgagacccccatctctacagaagatttaaaaattagctaggcatggtggtgtgcacgtgtagtcccagctactcaggacgctgaggcgggaggatcgcctgagccaaggaatgcaagactgcaccatgatctcgttgctgtactccagcctgagtgacagagtgaaagactgtctgaaaaaaaaaaacacaaaatcatagggacagaaagaggaatggcggtttgcaggtaggatggggaaatggaaggtgttgtttaacgggtagagttttgattttacaggattcaaagagttatggagatggatgtattaatacataaatatgaatgtatttactaccacagaactatagctcaaagtggctaagatggtaaattttatgttatgtgtattttgccacaataaaaacatttgacaagaggtaatttgagaaacctcaaagaaatcccctggcatggagtggttccggagattggggatagagagtcctcctgcgaagcccagaacggatgatgggggaaggattacctgaggagaggcgcactcccctctgtcctgacaaacttggggagaattccaggagtccttctatcaacccccaaggacttcagctggaaacaaagacacgcccttcccgcggcttctccatgggtctaggactccccatctacaagacctgccaagatcggtggaagaggctgggggttgagtggacgagctgcccaacccagctcaggagcgacggaaaagttatctgttcccttctcttggtaaggattctgaatgtgtcccgctgtcccacagcacgagggagctggtgactgaatctgtgcagggatgtctgggccaggtgcagactgagtctaggtggtttccctggagaaaaaaagcggggggccctggagaacaggggtaagagactgaagaacaataaagaggtcacggggtacgttccctttctgacatccatcgcatcctgagcccaaggtcacaggagagggtcgcatactgcagatggagctgagggaacggggggagaggcaggcgggccctgaaggtgcaaggtcgtgtgggcctcgggacaagtcagggtagagggacctggctcccacgaccctccctctccgcagccccgtggaggccgcaccccagagcctccagcatcatccctgggcccctctgcgctccagccctcgtgtctaagctccccggaggcgttttctctccgctctcagcctctgctcccgcgcttgtggctgtccctggccctgtctctctcagactgtccctgggcatatgtgtctgtctcacgattcctgcctctgttttgtctcatccctcccttgctctccaccgcagtcctggttgccgtccatgtctcatcccgaccccttctgtctccatgcctccctcactctctttctcgtccccctgtctccctgtctcctcttgtctctctcttaacctcatctcctgtctctgccctgtccccgctccatcctgtctctctcttaccctcatctcctgtctctgccctgtccccgctccatcctgtctttcgctgtgtatgttccgtccttgtctccctctgtgtacctgtatctcttgtccctgtctccatcactgtttctgcccctttctctcccggtctctgtttcctctgtctatccacgtcccttccctgtccccatcccaggctccgtctcttcccggtctccatcccccttcctgggccgcctccgcagtctccgccgggatgggacctcgctgggggcggggctgaggggccagatcggaataactcggttatcagagcgaattgaattaacttcttcacacgagcgccgccaggcctgcctcccctcccttccgcggggccgcaggtggggaggcccgggaaaagggtcgggaccctctggcctcggacgctgtgtagagaccgaaggtctggtccggattggggcaggatagggactccggggatagggtcccgcgcatcccagctccacacctctgagccctaagacggcggcggggacccttcggggtgggggtcggggcggctttgggcggtgtctgggcctcctaggccccgccccttcggagctcgccccgccccgcccccctccgcggggtcctgcgcgttaaaaggcgcgcgggccgggctggctgcacttgcgttgcacccgggctgagtgcggccgcgacggggcgggcggactctcgggcgctcagagctggcctcgggtcctcggagcctggcgctcgaacctcccttccgacctccacccggaccccgaccccgacccggcctggcccggcccccgcccccgccccccgggccgatggactactcctacctcaattcgtacgactcgtgcgtggcggccatggaggcgtccgcctacggcgactttggcgcctgcagccagcccggcggcttccaatacagccccctgcggcccgctttccccgcggcagggccgccctgccccgcgctcggctcctccaactgcgcacttggcgccctacgcgaccaccagcccgcgccctactcggcaggtgagcgcagccccggcccaaccctccctccaattcctgcagaatccctgggcccgctcgccaagtgaatgcgactgtccccctcagccgcccccattcctgccttggccagaccctccaatgccccgagagacccccagaatacgaggttctcctccgcaggaatgagcctcaccctctcatctctcctgttcctttttctcgttgccaaatctctgtctcgtgcccttcaggtcaaggaaatatatccccatccagctctgggccccttaccaggccttcccctcaccacctgcaaagactgaccactaaacctctacaagcgctggatctttgaaaaaggctcccagcccagccctatcaccacttatcaccccaccccatcaccgctgccccacgagatgcatgacccccagcaaggacctctccaggcagctgagctgcccagacgggaagcttcctagagctcgcgtggccatcaggcccctcctgccctgtcttggacccacgctgcctgggaccgaacccttctgtagccaccaaaaccagatcccgtagcccgcaataaaggggcccgggtttttaagccacttgtatttccccattcccccagactctcccagctagagttctgtagaacccggaagcagctcctgcatccccaagactttagatccaagtccctgtccaaaccctcaacctcactgagcttctcagtcatctcagccctctgattagagtcccagcctgccctatgtaatcttatcgccttccctcctgggaagactgccggggacccaagtagaagactggggcctaagggccaggcgcggtggctcatgcctgtaatcccagcactttgggaggccaaggcgggtggatcacttgaggtcaagagttcaagaccagcctaaccaacatggtgaaaccccatctccattaaaaatacaaaaaaaaaaaaaattagctgggcatggtggcccacgcctgtaatcccagctacttgggagtctgaggcaggagaatcgcttgaacctgggaggcagaggttgcagtgagctgagactgtgccattgcattccagcctgggtgacagaatgagactcggtctcaaaaaaaaaagaagaagaagaagaagaagactgggccctargctggggtttggggaagagatacgagaaatgagaacctggatttggagaaatgaggcccagggtggggagattgggtaccctgagccagatgagggtagggattgggaagaggggagacagcctccagagatacagggttttgagaccagagagatggggataaggtacagagagatgggagcagagatggaagcactggaaatcctaggagaaatggggactcagggttggggagatagagataagtatcaggcgatggggaccaaagaagattagaaatagagatgacgaagataagaatacaaatggggtgctggagacaagaatcaggggagatggaggcctggatgggacaaagatgagattggagacccctggtgaatatgaagacttaaaccagggttacagacagggaagggaagtactgtcagaaacactacctatggggcagtggagactgggatgggtataggaagagagttggggggcagtgttggctttggaggagatgggacatggagaaggtgcctggggaggaagaaggagggcaaagagaagatggaggaagtcttctcaatgggcgcaaagagaagatggaggaagtcttctcaatgggcacaaagagaagagtggctgagaaatggaaagttgaagagagattcaaatggaggaagattaggaagaggagagggggacatctaggggagaatgggggtcaggggagtggggcagaattgaagaaatgaggcttgggaaggggagaggtggatgggtggagggagccaaatctgtatacagctgagagccggtgggaaggctggtggtagggctgaaaggagggccggtgggagggtctctgttgcagagccttggcccagaactggttagtgggaagactggcaatgctgatgagacctgacagacatccagggccagggtagacagaggggacagacgggctgagagacagacaggagggaagggtcggaggcacggttgaatgggggtgcagggggagatggagggaacagggcttgggaggagggcgacgacgggggtggggtgggggagggagtgtcttggctggagtattggattatgctttccccttggccgctcttggggctcaggtctccctgatctccctccgcctttatcccgccggctccattgagtaatagggaggacgctcggccccaggctgccgggaccaagacgagggatcaggccagggacgggggaggcgtgtgattcccccggagctggacacaacgggttgaactctgcttctcactcccccatcctttttgccccccccccggcccccctgcacacacccgcagtgccctacaagttcttcccagagccatccggcctgcacgagaagcgcaagcagcggcgcatccgcaccacgttcaccagcgcgcagctcaaggagctggagcgcgttttcgctgagacccactaccccgacatttacacgcgtgaggagctggcgctcaagatcgacctcactgaggctcgcgtgcaggtgcgtgtatgcacgtgtgtgtacgagagtgcgcatggaaggaggtgtgggagcttaatgtctaacacctgggggtaggggaatacaggcagatgcagcccgaaggcagggcgcggtcccagggtgcttgggcagctacgggaggcmgcagggcccggacttggaggcccttgggagacccgatctgtttagctccaggctacctccgctctgtctccctcttagggcagaaagttccgagtgatgcttgagaagccaggagggaggccgaggggctagagggggagacccaggggacctcagggccgagctgaggaggagagggggcaggccagtcagcacccctggggttccctaccccggcgctgcagctttgaaaacccggagcccgggaggctgagtttgtggcaggcacagggccgaagagagccgggctagagcagactgttgtctatttgtacaactccgtgtacagatgttcagttggcccgccttgactggatgccctagacaaaaggtttactggcgccctaaactgctctccacggccctggaacactccaggagggaagtcccagagcttcctaaaagaaggaattgggggaagaacttagagtgaggagaacgaaggcagggtcccctccgggagaccaagagtgctgggaggcagcagagtcagcgggtgagtggatcccaagggcaagaacccagggatctggaggcaggggccagtggagcgcggagtgcagcgggctgcgtgcggagggccgaaggcccctccaactagtaagaacccgggcccggttctttccgaaccaggatctcactcgagccttgcggccgcgggctgaccccgtgcgttctccgaccctcgtccaggctgactggcccctgtgcccgcaggtctggttccagaaccgccgggccaagttccgcaaacaggagcgcgcggccagcgccaagggcgcggcgggcgcggcgggcgccaaaaagggcgaggcgcgctgctcctccgaggacgacgattccaaggagtccacgtgcagccccacgcccgatagcaccgcctcgctgccgccgccgcctgcgcccggcctggccagcccgcgcctgagccccagcccgctgcccgtcgcactgggctccgggccgggacctgggccggggccacagccgctcaagggcgcactgtgggccggtgtggcgggcggtgggggcggcgggcctggcgcgggagcggccgaactacttaaggcttggcagccggcggagtccggccccgggcccttctccggggttctgtcctcctttcaccggaagcccggccccgccctgaagaccaatctcttctagctgccggcctctggaggctccgagcctgcccccagagacgtccctgcccctccaggacctgacagcccctcccatcctggccacccgcctggaagtccccatccgtctccactccctactgtctcacccctcggtgtgtcctccccaactttggagaccaagtcagggccactctcgtcctcacccaccctctaccagcagagcggagttctttataccgggacctcctccaggagaaccccggagctccttctagcttggccttctttggatgcggtatcacatgaggcctgtccctaacagtgccctcaaagtgaaggtcctcaaggaggatcggcacagcccccttccctggctctgcagcggctgggtcaccccttacgctggtgatcaggaaagcccgctgccccacccctcgggcccacccgtacagaggctggtggtcgccgggataattaatgaccaccgccaattcatccctcacgtgtctcctctcttccctagcccgtctggcacagagggtggacctgttagaggagtggaggggctgcctggggaatgggacagagggattctctttccctaatttttttggttgtcctttttctttgaaaaacttgtaatttattgaagttttactcaatccaaataaaacttaatttattgaagacatcacgccgcaacccttacgactgcccaggaggctgcttgcaagaccctgtcccgggctgagacctgcgaggaacctccctcccccaccctgccgccgtgcatccccagagcagggcagcacagaccaggagacagtgagaactaagcaaactggcactttatggctgagatcctgccccaccccaaccaaccccaataatattaaggtgctctccctccccagacccacacagaacagtttaaataaaccccagcccggtcctcgggctattccttcatttccggacggacacccgcccccacccccagcgggggtggggaggtcttagcggagctcctccgctgtggttcaggcccggtggaaggccgcagaaactggtgaaagtgggggcccagacgtacccaaatggacccccacaggcacccctggggctgggaggcggggtccagtaaaasaggacagcaccagagtaaccagggtcctcggtaaccatggcaactgaccttccgtcctgagcctaaaaggcgaggggcaggatgccctaattagggcattgcaaatgattgggcagcggggaatgcagatccccaataaataggcaccccaataaataggcagagagatactgccctgaccctcataacttttcaaccctggggccatagctgggccttggtagcagggaggggctctgagttcacagcttcgtggtgcctccgctatcacttgctgagctgcagggtgtccagaaggaggcgcttgtgagccgggtcctgcaccccagcctcctccaagtcctcctcggtgatgtcactgtggagtaaaacaggctgggaagtgagatgggcaaggggatcctgagggccccagctccgcccccggggccagcccctcccccacctgagaaactccaggtcgtcccagccattatgcaccaggccctcctcatagcgctccaagccgatggcccgcagccaggcactcatgcctgcctcgcccagcccgctggcccgcccgccctgcaggcacggagcctaaggaaacagggcatgtcasggggagctgagtgccccccatagaaacacctgcagtcacattctgctgcatgctctggggaaaaggaagggaagggctgggctgatacatgtgtctcccaacttcccagtgatcagttcagggtagcagggacaccatgagtgctgaatggtggagtgaaagggtaccagtctgtgggcaagcacactcaggcacacacagacagccaccctgctccacacacctcctctgccaggtcttcctggatgctctcccggatgcggggtggagggaagctgaggggccggccatagtccgagggcagtccccgggggggctgcagctccagggggcctgggaggagcgctgagcgtgcaggcccagcaggggcatagtccacctcgctcagcgtcttggccatctgcagcaccgagcaggaccggtcatccccactgsccacttcccccaggaaagtgctggctggtgaggggcctgggggcagtggaggccttggatgggccttgggaggtggtgggccacgggcctcasccccaccacggccccggaccactggccctggtaaaggatccaggctggggggcaggaagatggctgagtccggcagtggtggaggtggaaagtctggagggggcagtgtgcctccagactcctcatctgaagaactcccctctcccacacgagggtgccggtggtgcccaagctgtggagcaggcactgtaatggccactttgttcttggtggcagatgggacaggggccctggcaggcgagggtggctccgggggcagcagctggtgcgggaccccttcaaggacgtagtaggcagggttattgaagctgttcttgggtgggggggccgccaccccttctggttcaggagctccctctggcttcaacctgggtgtggaagcaraacgactaagccaggatccaggaacccaggtctaaggcagtggaagcagtggaaggagaactagacgggagtcagaaagtcccctggtcctagactttctcatgaccttgagcacatcacctgcccttagtttcttcatctctaaaggtcagagggaggataaccctttgaatggataaccctacaatcccttgcctcacttgctaagatacttagatctttcatgactttatctgtagctgtgaaacccaagctaaatgggtcagaatagaggtgccagaagacagggcaagaagcctccaatgagaggccaggtttggaaagcctctygaggcacccacagtcaatccgctgcagaatctttctcagagattcaggtgggtcttattcaagcctagggataaaaccggggtgactgacaacagctgaagatgagtgaaaaagcaccaaactgtacctaggagtttatgtaagtttaagcaacaatcggatataattagaaagcaagcctcactttcccaaagtgtgacacagagcactaattccccagaacgttaatagttactacatggaaaataagtttcctggcccattaagtttgggaaactatattaaacagagctgaaaagaggtttccttcctgtccacatgctcagagcttttgctaatactaacatgcactgggaatgtctaagaaaagaatctagaaaaagcatttcccaaactcatttgaccacaaacccatttcaactggggcctcttgcaggacagagttccaaagaaggtaccctgggaaatcccaggccgagccatgtgcctcctccaaatagaaggctcaagctaggtctgtttacatggagggagctgtcttagaaacaatttygcattccatttttaaaggcagaattgagaggaaaggctgactgctccctttgactcagagccacagctaagggtggcctggctggccacaggcataaggccatggcagctccaaccacagagtggcagggcacctaagcagctgatgatctccaggccaaccctgagaccctgcaggggatagtgatggatagaggtgggtgggggaagggggggcggtgacaggttcctcctctcacctgggggtcaagggctcctcccggggagctgctcggggtggggctgggggcctccccgttggtggcggtttctctggttcttcaaataacctggagagcgggcaggaggcctctgtgaaggctggcttgcggctccctgacctgccagggatgcacaggagagagatgaagtggggttgaccagatgcccccaggtaccctttcatatgacattcaacacagccctagctcacctgggctcctggctccctcgggacacagagggggctttgctctttgctcctgcctcatccttatcaatgctgatccactctgagggggcaggaagggagactcagaggagacctgggctcctggatcccacagacacccagtgggcctgccagccctttcccagctatgccttggggcaggactattcccagctgtggctgcagaacctccaggtatcccagagattccaacatgccccccgcaccctgccctccttgatctgttcacaccaccctatctcatgtcccagtggagtccccaccgtagagccgctcacgggtgcccaggcgctccgtgggcacccgcaccttcatggagcctctgatattgcctgtctcctcgccacggtgggataggaaggtcaggaactgttgggccgtgctgccgatcatggatttgagtgcaaccacacactcccctgaggagcagatgggacaaaccagcaaattaccaagctaatctagggccctgtctggcttcctgttcccctcagcacccctcacccctcaccataggattcatagccatccatggacttgactgtgagcaggaggtgctggtcctgcaggtactcgatatcagccagaattggtttgagctgggaagcagggaggcccagtgaggaacaaagccccgccacttcctcctgcccctcctacgcgctgccccctgacaccactcaatccccaccctcaggtcatctgtgctcactcacactcaactcttcagagaagagccaaatccttaatgcagaagacacagccctatacaggccttttacagcacctagcatcactgtaactaattaattttctcaatagctaacacaggacctgacatctagcaaaagctcaagaagcatctcctgaatgaatgaacaaactgcaacaaggttccacactcccaaaataaagcaaacgcctttatcctcactcatgcccatgcccatacacacacacacacacacacacacacacacactctctctctctctctctgctggccccacactccctcccaggcaggctctccaataaactcttatgtacccctctctgtgccctcacccataagcaggggccctgcccacagcctcaccgtgggcagctggcgtgaagaccactgcactttgaggaagttgatgttgtcactgctctgggcatcattctcaaagctcttcttgtattctggggtgggggtgggagacacccaactgagcaccacctctcagcttcctttccccctaagtagggggctgactgcaccctcttgcctcccatcctccttggcccacacccagcccctgccacgcctctgaccctccaggcaggtagagtagaactcgatgaagaacttggtgcggctggctgtcttcacaatggcctcgatgctctcaaactcaatgtaggcctggtctgaagtctttgagagccctgaggagaaagggaggagaacaaacaggaggactgagaggatcacaggaggaatgggacagagaaacagggccctgggacaggaaatcaggggtccagagcaaggaggcagggccaggaggggcctccccagtcccaagccaccaacagggaatctccagaggccagaccctggaccagagcaaagagacaacccaaggataaaaaacccattgaagagggtgctggggaccagaatgcctgcaggattcccacacctacaggcatactcagggacacacacgtggccctagacagacacagacacatagataggtgtacactcacgtatgcacacacactcatgggcacacaactcttgtgatggcccaggcgcacagacaccctgacacatcacaccttgagaaacactcctgcactcactggtacacacacccacacacacacttacatagtcaaacctatgtacatcccgaggccaccacctgtgcccacctagattatgccacacccacaagcatatctggaacagtcacctttcttggagatgaactgggaggtaactccaacctcaaatgtcccaaacacgggggaatggtcgctggtgacgatgtcatcagtgcaacctggggagaggggataggaatggggactcagggggaatattcccaccctcggctcccacctcccaaggttagggcagagtccagatggtgaccaccccagatctcccatcactctgtccgggaggctctgaccataagaattgcagatgatgtgagtttcagggtaggatttccacagaatccggtcacaccatgagggcacattggtccggacctggggcaggggatggcagcatggttagagctgacagctaggaggctgcttggcatggaccccactccagagctgatgagtccccacacttctattactagaggccctagcacccacctcccttcttggatcctcaaaatacccaggatcacccaaaggcctcagaggggccatggaggctggagtggaagctgcagaggcccatacccttgacccaaattcttgattcatcgcaggcctgcggtcccccaaggcccatgccgttttcttggctcaccccagttggcttctgcttgtgccaggcatatgtgtcccgggaaccccgctcatagcggtaggtgggtgggaaggagatctcctcctcacctaaggaaagcaggagacaggtggggttcagggccctgacacccagggatactgcaagtctcctagccctcagatcaccacctaccaggcccacactcactgaatcgaaggaagaccttgtgcttctcccgctccaggttgagctggtccaccctgaggaggggctcaaactctttcctgctgatgtagttcaggatctcctggggtggaggacacaaaggctagaaacattcctccggagccagagccaggggtgatagcccatgtggcccttagcctccctacagccatggcagggccctgctcgcacctggatatccatgtccaggcggtagttgaggtccccaaaccagaagaggtgtgtgaaacgcagagagatgtcaaaggcattgagctgccggtcgcccagcgagagcagccgcaggatgtccaagtagttttggttcctcctagggtgaggggtgcgtggtggggaggggtagatccccagggtcagggccagaagtcagggataggcataaagggaagaagtctcaggagtcagggatggggtaaagatccgggcccctggggacaaggttagggtcaggaacagaagggtcttgaattgggataagagagcagggggtctctggagacaggcctgcgggagggtcatgggctagggtatgggagcgggaacaggcctcaggtgaatgggatgggtgtaaagagaccatgggaaaggcgccccctcaccgagccgtcttctcatttcccgaggtgaggtgacaattcacaaagccaaatgaggtgccattaaacatgaaggagacgcccacagcccccttgttccctgttaaggcaagcaagagaggaaggcctgggtcatcctcagagggctcccaactctcccttctgcctctcaaagctgcagtgagaggatcctcccgctgagcccaccagacgctgtgacatgggcaggcccctgcacacacccacaccttccctgggggaggggggggtcctcattgggcacacatggtctgtgtggatggcctgagtctgtctgtatgtgtgagcagagcccctggagatcacaggggaccccaagggtgaagctgaaaggccctgcagattctgcgcagaatctacctgggagagcaccagaccgaaaatcaggagacctgggcacaatgcctggctccaccacttacttgctgtgtgaccttgggcaggtcactcaaccactctgggtttgagttttatcatctgtgaaaagggggtaattatcctggccttgccttcccagtggtgctgggagagatttagaatatgaatatgtttttcaaagttcaaagtaccctatatatggggaaactaagatcaccaaaaatggggcaatcctaggcttgagaggaagcagaagccatggacagagagacgctgccactcttgggcacctgccagccccacttacccagggtgttggcgatgccagtcttcacactggacgtactgacatggctgatacggttctcgtgctctggcttgaccagcactgccaccttgatattccacagtgattgcatggcaatctgggtagagagtgcatggtcaccactgccctgctgcacccactgcctgcatttccccctgcactataaatagacttttgtgtccatcacagggtaggaaggcttgccacccctcttcctgacggactggagagaaatggttcctctcgtggcatgaaggactcaggtcagatctcccaaaggatatgctcagggaccagagaaaaagccagtgaagctgtgctcccagggttgcccatgaagtcaagtaggctagtttggaggtggtgtgtgaggacagggtcctggacaagatgaccccccctcaccgggcggtaatccagatccgtaagctccttgaggcccccgcgcagtaggtccagccactcgcggtcgcccactgagttctcctgggtcccaaagacatagatgtcatggggtatggtcactgtgacctcgtccagggtcttccccagacccttcgatgtgaaccaggatgtcacgttttttggaggtggtacacttcctggaggtgaagggggtgaggtgggtctggaggggttaggcacctgctctggggccatccctctctcccgccccagccccagcccgggcctgacccatgttccaggtgcctatgaagactgagatcatgtcgggctcgtcctgcttggagtgcttgttcttcatgagctgcaacagctggcagaaggcctcccgcttctgggggaacagcagccactcaggggcgggtaggcatccaggaagccccccgtccacagggataccctgccagttggctcatgtccatgaggagagggtctgtctggttctccactgcatacccactgctcaagcatataacagtgctggcaaatgttatccaccctcaggccacccgttctcaacaccctctaccctgtcagacctacccctgccaggagggatggcatgcctacatcatgtgttccctttcttaccctccaatgggaagcacccatgtgggggacccccgcagtccccagtggcctggcccagcctgctgctcacccgggcactgacaaagatgaagtccttgcgctgagtccggtccttctccttctcaaacacaacacccagcttgttctggacacgctgggacttaatgagctggcggactagggcatggaggaccggtcacatgggcctgtgcccctaggccaggggctccgccctgcccacccctcccaggtctggccctggctcactgcggtcgtgcgtgaaggtggtccagtcctcctgggagtcccgctgtctccgcagcagcaccagccgcccaccctccacatccacgctcagcgtgaacttctgtgacttcccaatcttggtcaggtcacccagggtcacatctagcttcacctgtaggccaggtggggaggctgctgacaagaccttggagtaggcagcaccctggtcacctccaaccacccttggccctgtgaggccccactgccatgtacctcaaaggcctgcacggggatggtcttggccttacgtgtggatggctgcggagctgggggtgctgtggagctcatgtcctgtagggccttcagggcctggagggaacaagggcagggcggggtcaggggacacactgaaggctggggcagggagggacacaattgaccttggggccaatgttaagttgtagactgagggttgagatcagtgctaggccaatgacagtggccagtgaatcgggggtcaagggtcagagatcatgccaccttcttctggatgcctgacaggaagtcctttagcactgacagctt

SEQ ID NO: 97750 - DNA, 18140 bp, Homo sapiens
gggttctgtgccattttctctggcccagcttgcatccagctattcctgcagggcgtctaactcattgccacttcctctgatcccacccagaatggcatgggctgaggatgggaggctttctgaggccgagaactgggaggcccctggagctctcccatccagcttccttcgtgttaagagagaagattaaatctcagagcaaggtggggattcccttggagtcactcagcaaatcagtgacagagctgggtcgggagctcaggcttcttgctgtcagtccatggttctctctggaaagagggggcctagtgagaccaagcagcctgatagaacttgacacttgaggtcagtgtagaggctgaaagaggtcagaggtgggaagagagactccctagccctgagcccagcgtgtgtcaaggccccaaacaggaaagggaggggattttgaggtccctgcttgggtgggggtgggggtgggcatcagtaagtacccctgggcctggacctcagcctggtccagcataggtgagctgagctattccatccttgatggcagggaagtctggaaggccagtgtggtggaggcggcagcggtagcggccacagctcttagcatactgcaagaagcggggtgcaccagggaagagcacatggtcagccagcacggtggcacctgctggcagtagggcatgggcctccagcagctgcaggtccctcaggtaacatcgtggccggtgtgccaggagcaccaggtctgcccgactcagctgatactgggtgcgtaggcacgggatcacgtcctctgagctgcccacgatgagctccacctgtggggatagggggagctggaggtgagggtggggggaattgttctcccagtcaagaccccaccaggatctggcttacttcatgccaggtcctggcttagcttcccatgagtgttctcacatttcctctgacctcagaacctaagaagtcaggatcagtattgtgatttccattctgaagaagctaaggttcagaggatgcatgctttgctcaaggtcacgtagctaacaagaggcagagtaagagctggacccaaatttgctgggttccagagaccttcctcttagctgtttctttcgtcatccggcagaaaataatgtgcagatgacttgggacaggagggcaggagctcacacaccatccagcatcacagtccccagagtggaggtgcttccttctccttagatgggagtccttcacaagggatgtctgggggcaaggcctggggtgacaaaaatctgggttggggagatgggaggctgaccatgtgctcatcaaagccggccaggcggatgagtttttcagccactgctgccgtgcgtgggtcccgctccacagtaagaaggcgacccccagggggcagggctcgggcaataagcagggtagagtatccacagtaggttcccaattccagcacacaagcaggggccttctcctccaccagccgcatcaggatctgacctatgaggggagatggctgttgcagaagacatgggagatggatgcagggcccctgataaaagatatctcaaatgcctacctgcctcactgcagctcccaaccagccggggtctcatctgtctcttgtaccatagccccagctgccctcctggtccccgtctcctacagtgtagtcttcacaccagccctggaatctttccaacaaatctgaccttattactccttggctcctgtgagctgaaggcctttgggattgaacttgggattctcagcctggcattcaggaccttggacctgatcctatcctacctttccaggttcatctctcagtacttcccacctgtggcctgtatcacagccatcccaaacaactgtgcccagaatccatcaagctgtctcattccttcatgccacatgtgtatatgtggctggctttgcccttcccacccccatcgccatctgcctggccaactcagaacttccagattcagttcaaatgttgctctttctccatgaagtcccaggcagaaacaaccaccctatctttcagatttatgaaaggtctctgttagaatttgtagtttcattccccttttattgctcatcaaatgtatttctgatcttggaattggatgaacttttatttatttatttttgagaccaagtcttgctgtgttgcccaggctggagtgcagtagcatgatcacggctcactgcagccttgaccacccaggctcaggcaatcctcccacctcagcatttccagtagctggaaccacagttactcaccaccacacccggctaatttttaaattttttgtagaaacgggggtcttgctttgttacccaggctagtctcgaactcctgggctcaagtgatcctcctgctttggcctcccaaagtgctgggattacaggcatgagccaccatgcccagccagtgaatttcttttcttttctttttctttttttttttttttttgagacaggttcttgctctgtcacccatgctggagtgcagtggcacaatcacagctcactgcagcctcagcctcctgggctcaagcaatcctcccacctcagcctcccaagtagctgggaccacaggcatgtgccaccatgcctgggtaatttttgtattttttgtagagatgggtttttgccatgttgcccaagccggtctcaaactcctgagctcaagcaatctgcccacctcggcctctcaaagtgctgggattacaggcaccagccaccacacagccgaatttcttaaataagaccctaaaagcacttatgctgggattgagataaatccaggcagacagctaccctaaatggtatgtggaagcctccatggtggagaggaaagatgtggagacagataattacaaagctatgggttatctgctgagatggttattccactgtgtattatggttcctttgaggccagcatttgtggctcattcatctctgtggcctctacccctctccctggcacctagcacattcctaatacaaaagaggtggcaataaatgtttgctgaataaatgacttagtccaagctcctcatttccagatgagaaaaaaaagaggccctaaaagaggatcaagaacctgcccaattcatccagttaagcagcaacagatcccaaatattccttcactgtcttgggggtacttcttggagcagaaggctagggaacactgacctttgacaggccccatgtggctcaagtactcgcagcggctgctccagtggtccagggtggtgaggatgtgaccagggtcaccgggcagggcatgggtgagcacgtagctgaaggcccgctcctcgatccgcagccctgacaggcagtctcggaggcttcgcagcaagaccgtgcgcaccagcaatcggaagtagtgccggtaccgcaccagcaatgttaccaccagtggcaggaaggccaatgcaatggcaggggacatggtccctacctgggccctggggtggagggaggtagggagggaatcccatacccacaatttgcctatttgtgtagcttttgccagtagcaattattatccttatatttcacaaaccacggctcagaaaggctaagtcttttgtccagagtcacagagcagaactgggatttgaatccaggttagtgtgattccaagcctgtgtactttcaaggactctatactgtctactttcagcacccagccccaaaccacctcttcccggtcccaacccctggtcccatcttcacattgttcccctgacttgtttctctttatccttgaagtcaccccttcttcaggacccctttcactaattcacctctgggatatcttcccccacccctaccctctgcctgcctggtctcctctgaccactgctgtgtagcaaaagagcatagatttgcagtcaaaaacaccttcactatcactgtgccctgcctcagtaaaatgcaatcaaaataccccatagggtgttagagtgagatgtcctctttcccaccccaggactctccctctgcctgctcttccctgaggatgggaggagtctttgattctttaataattctccagccccatctcctctccgctgtattcccctcttctcctgtgctgtctcagaattcccttcacaaatgtgtacatacacataacacacagcacacattttccctctactcagctcttctctccagggacctatggggaatgggcctctcctcccatgtcctggaccattctcctcctcatccagatctgacctccttgccggccttcttgcaaggcccctggtgatggcggggagtaaaaatgaaagagtgtatggatgggtgtgaataggtgagtgatgcggtgggcttgaactggtgagcttgggaacccacaatccagggccctgcttacctgggctggaggaccagagcacaggacaggtcggggagtccagggcctgctgcgggggataaccctgaggtaggaggctggaatggctttcaattattcatgctgaggctgctgctgtcacctgagacctgcagttcaagttaccagccccagggacgagcttgagctgcctcctacccttcaggaacctcaaaagatttacagaacctcagggtcttgatttgaggggttataagaggtatgagatctggtgacttctccaatactttggatcagaagatggggcatggggtgagccaaggtgatggggtgactgtaacatgctcattgatatgcaagttttctgtaagcaaggccatgccttgggctacagggaagagtcagaacctgtcactgtgctccaggaactcccaagtttggtaggtgagactgacccaggaacagagaatacaatatagtgtgatcactattggatgttccatgactacagggactttggctgttttgtgaactgctgcatatccagatataacaatgtgtggcacatagtagacgctcagcaaatatttgttgattcaataaatgcatgaattaacactggatgaggattaagcatagggagctgggcatgtccagagaatggagtcagagaaggtaatcaggaggacattgtactgagtctcgaagacagtaaagacagtaggcagaccaggctgcatgtacaaagtccagtagatcaatcaggaaactacattatttctctatgtccagtgaaacacattgctgacccctccacccctcaccccagaacatgcagtgggagaggtgtcaggctcttgttatgtcagacgggtaatgtgccaaaacaagatttgagggtggcacatttgatacatgctggtgaacacccaatcacacgctcatgaacaacaaatggatcactatacaatcttggacggacttggacctgtgttcagggcccaagggaagacatggagcgggggttaggaaaagagaactgatggtcagctttgtgcgttcgattacaatgggtgctgttaaaaaaggcagaattaaagataaaagcctgaaagcagagaggtcagtgaggtggcttctatctcctctaccaggatttatctccgctgcgcgtcagcatgtgaaggtagtataaggtcccttcttcctgtaagtcgcagatccccagcccaggtggagaatacaccctctgtgtattcacccccagcccagctgggcgatacaccctctgtgttccccgactaggtactggtcatctggatcatctgtgtgtgtgcacccagaccgtacgatctggagcatcaggcctggatcccagtcgcccctcgcatggcatttagaagagtatatcacaagggcatacgagggcatttggtacgagttcgctcaatggcccagaaaagtggcctagtggccacgagaacgcataacacaattcacgatggccactactgccagtttagagactggaaagatgaagtcatgtgatccgccccgccctttccccgcatcacgtgcttgcgtgtacggttacgccttcccattggttgacaacgatcacgcgctagcgggcgggaccggaagccggggtattgactgaggcggccaagcggctccgggacagggggtacggggggtgggggcgggtggttgcctgcgggaggccgccgcgggtcatgtgaccggaagggctcctcacggacgccgtccctcctcggcgcggcctgagcgcccggcccgaccccggccatggggtgctgctacagcagcgagaacgaggactcggaccaggtgcggccgcggcaggcggggctcgggaatgagggctaagacactggggcatggggcccagaaagaaacctgcggaggacgggcagccggactgcagggctcactgaatacggaggcctggaggggacagattacagaggagacgccaagccgggctcctacccctgttaaagccccagatttctacacagtccccgcctcggggtgtgcaggcagccgcctgtccggctcgctcccaccacttccgtttgctcctaccttcaaaacttttcagattcaaggatcctcagtctaggtccccgggaaacactcccttccccagcttcctgtgtcttctgtgtattagtgggctttgcgaatccattttaggggtgggtaagctgaggccctgagttagtctgtcctgagatgaatcaggaattcgtgtatcgtcttagtccctggggttgcagaaggaaggtcgctgctagtctagggccagrggacgactctggaagttggtggcctttgaattggccaatgaaggatttaatcgatacagtgaggacatcgggacatgtgggaaattgtctgggaagcaacaaagaggatttagctttggctagattgtgggaaaagagaaatggagcgggaagttcatttggttctgagtttggcttgcctcagtgcagtctgcctggggcctgagggttcctttagctggagacatgcctattctgagaatttggctgtagatctgatacctttggagaaagggttaggctggggagacctgtacagttttaaattctccctcttcctcttagtgcattctcacttctccccacactctaatccctgccctgcctggcctgacattcaaggatgaagtctcaagttgctgtctactctccttttttgatcgtctctaagcccggattctacatttgaacatatagtagacctgagagagtagaaaggtttcaggtagctcacggtctaatggggaagatggtcacaaaaatagattatatcactggtacttgggaagtagttcgttcttcagtgaacgtattttggattaagggcttaagcctaggaaaatgtcgtttgtatgggaagcaagggtggcttctggttctcaattctccatacacccaatgaacacatatttcctttgccctgtgttaggcatgtgttgtgcctaatacctctcacttcacttccacctttttgagaaagagacaacaataaccctgcctactgggagagctgtagcctagtgggaaattgtcccttaaagcataatatggactcttgcagggaatgagtcaagaaggattaatgccgtatgagaaaggatacaagcttctacttggaagggagagctgggcctgctgctctcctgaatctctaccttctccttggggggctctcatttctgttcctaacacccagagaaggtgcttaatcactgctgggtgatttgaggcctcatgtagcaagggccataaccatccaccatcccacagtccctctttgagttcttgggcaggcccctctccgactctcatctctgtctctttatcataataaaaaatatacaacacgttacagtttacaaagggccttcacagttatctaatttgactcttgcyagacatccgtcatattagtgtgggttatgtctattgaaaggtgaggaagaagttcagagaagctaagtgatttggccaagctgagaagtgctagtgcccaggtgttctgacgctaggccatgtactttatccatggggccaagctgtctcagccatgcccctagaccaggtggccagtcaygggcaggctgctatgtctgtgctaaggtagacagtgaaaccctgcctcttgggttacactaatgcagagacaaaccttgatgtgacaaacctaacccatgctccactcgcactttgggagtggggtgatgtttgtctgctctgaagtaggtagcatggcctcttctttaagtctgggtttcaagaaaataaccttgttgttcacttgatcttagctgaaggctgagaagtgatcagccaaccttcttcttgaagaacccctgatagggaagagactaccctgtcctgcaggaagatctgtctgaagtggagctgggaggacagacacataggaagctaacttgggcctcattatggagccagctttccttagaaatacatagttttatctttggcaaacattttgtctttttagctctttaatactgagcctatgtatttagggaggaagggtgtctgggagtttatagaggtgatggggcaaagcccacagcttctgtctcttgctgttgggaactggatcaaattgcctgaggacacttgggcaacctagccttgagaaagaagagtaaggtgaaaaggctgggcctccctaagcagggcaggaggaagtagccctctacaaggagagttgtggagttgtgggcaggggagctgcggcctgcagcaggaaagactgaggaactgagataggcctggaggggagcattgaggagtctggcactgaaggttggtgagtcagcattagccaggatgtccccctgggccyatccttggctttgttcagggcactcttgctctttatgggttggatagatacccagcaggtctgtttttctcatttactgctgatacagcaagcaaggatttgcagctgatggtctcaaggcagggtcaaatccagaaatattacagtagatagaacaggggactgaaagaggacaaggaggaagaccaaaccaatgaggaagcttggtttggtcttacattagttcaggggttgtgattatcagcacaggccagcaggaacagggctgctgaaaatttacatgggctactcaggtggtttagcaagggagggaacagcgccattgttgtttgttttgagatggggtcttgctctcttgcccagactggagtacagtggcacagtcctagctcactgcagcctcaaaccctgggttcatacagtcgttgcacttcagcctcccaagtaggtgggactgcagggctcacactaccaagtccagctaattttttttttttgcaaagacgaggtcttgctttgttgcccaggctggtctcaaactcctggactcaagcaatccttctgccttgggctcccaaagtgttgggattactggtgtgaatcaccatacatggctacagctgtactgctcagatcaggatacaccatgtacactcagtttggttctgggagtcacgtacaaaaagagcaccagagcacaggagggtgaacaccttcgaagggacctgccttcaagaagggaacacacttgtactgtgtgacccagagctgggctgggattcctgccctgacataatttgagaaatggccatggagaggttgggcttgctttctcttggggcctagggctttgtctggactcgccagggcttycatcttggaagcgaacagctttgctggggaaggcctggtcctaggggatgaggaaggctgttcttgggctcttgacttgcactgatttcccctttagatcccagtgcttgctatgtctcagctccwctgtcttccagcctctagtatcctttctttgccaggtcctagaatgtttttcaagctccagggctgttgctgactacctgctttgtgcctctgtccattttttcagggcctctaggactgcctggttccactctcatttatcctagaacaccaactcagttgagctcccaaggataggcaggaactgagtcttatctggcattccataaagctgggcactttagatattccttatagaaacatttttggtgtttaaggtcagagctgggctaagggtagcacccgtgaaaggcaggatctacgggtcctggggctgacttctctcccatgaccacttctaggaccgagaggagcggaagctgctgctggaccctagcagcccccctaccaaagctctcaatggagccgagcccaactaccacagcctgccttccgctcgcactgatgagcaggccctgctctcttccatccttgccaagacagccaggtaagtgtcagaggaccaggcctgggtcagagctcctctatccatattaaaggctaggatagaaggagccaggctcaggacatgggggatgggacaaggtcactggggagaggtgcctccatgtccagccctgctccagtaggcaggagggaaactggtgtcagatagccctggagttggtacctggcactgagtcctgtttgtccttctcggaagcacctgtcatgtcatctctgtctcctctccccatagcaacatcattgatgtgtctgctgcagactcacagggcatggagcagcatgagtacatggaccgtgccaggcagtacaggtgagcacctggccagcgtgggtccctcaggctacttgggctcccaccctccatcactgttccagctttggagcctggcccctagtccaagcttctcatttggtgcagccctggagactgaccacagatcacttgggtgcttcagtagttattcatgtcagccctgtttaccctgtgacactcttgagggcrctgaggccaagggagatgggcctagattgagtctgtgatgagctgagaccttccctcccagatacccctcctcgacaccctgcttctctggcctgaggggatgaggcttacctgggctgggcagggcagactgtrgcttaactgcctacccccaccccctctctcttggtcagcacccgcttggctgtgctgagcagcagcctgacccattggaagaagctgccaccgctgccgtctcttaccagccagccccaccaagtgctggccagtgagcccatcccgttctctgatttgcagcaggtgagacacccctcacctgcccctgcccacccttctcacactgcccagggtatggcagagggttcacccactctgcctcagaggaggtagggaaggtggagttagggagcctggtagccttgtaggccccagctccctcccacctcgttctcttaactttttatgtctttcctatctccttcctgcaacctttattgtttcactcccctttgttcttttccttctgtctctcccatccctgtctttctctttgccttcctgttccccttcattccctccttctccatcaccatctaatctcccctccccatttttcctgattgccctcctcacctgtctctgttcctctcctccccggcccctctctgtctcaggtctccaggatagctgcttatgcctacagtgcactttctcagatccgtgtggaygcaaaagaggagctggttgtacagtttgggatcccatgaagagaggggtccttggacagctcttctcctctcttcatcccatctctaccccacccccttggcccccagcctsactgcggcttatacagtaccctaacctgctastaatcacagagaaaaatgtgaagaaggaggagaagaggaaggytagaagcctgagcaagtgagggtagaaccttttgggactggcctttgaagctctggccagggatrgggtgggggccaaaaggacagagcctggtatgtcttcatagtcattgagaatgtggagataccagtttgggtggggggtgatcaccargggacctagggagatccccttcccaccctytctgttggcctcagagtcactcctgccccctctccctgacttggtgctcacatgcacctcactagggtttgtgaccagggtctggatgagcttgaatttgaatgaattgagtttgtatttctagaaccckgggtttttacatgtttggtctttttttgttttggtttgtcaccctcgataaaggaagtatattcatccatgtgctggttctggcccctctgttctacccattctacttttgattacttaggtctatgagagtaagatggggggaaggggacatcttccagggatattgaagatgaacccaagagacaagggtttagggtgtcagctcttagctgagacctggcttgggctaacctcagactggatgagactgttcttgtcccttgtccagtgatgatgggaacactgtcaaagctgaacagacctgaatctgaggcagctttgattcttgggggccctgcctcagactcaatggaattaccaacagcccctgggggtgaagggagacatggcgggttggggggtggagagagaaagcagaccaggctcttctgggaatacctaatatggagtcagcaagcaaatgtttttaagcagaagattctttttatcaaatgaaatcttaagcagaatcccagcatataaaacagaatggaattactttgatctgattgaagtgggggctggtttcagagatcataggccatcttcttggcctgtcatggaggcctgtgaggcatctctacagaccctggtactctgtgaagagtttggaaattactgatctactttaacccccaaatctctaagctgaaaagtacaaaggggcccagagagttagataaatttcccaaggctgtgtggtaaacccacgtctccagtgtcccaggccagcaggcctttccctcaattgcctccctttttcagcaaaataagactagagctggccaggtgcagtggcttatcctgtaatcctagcactttgggaggctgaggtgggcagatcacctgaggtcaggagtttgagaccagcctggccaacatggcgaaaccccatctctactaaaaatacaaaaaaaggctgggcgtggtggctcacgcttctaatcccagcactttgggaggccaaagcagacggatcacctgaggtcaggagttcaagaccagcctggccaacatggcgaaaccttgtctctactaaaatataaaaaattagctgggggaagccgaggtgggtggatcacaaggtcaggagatggagaccatcctggctaacatggtgaaaccccgtctctactaaaaatacaaaaaattagccaggcgtggtagtaggtgcctatagtcccagctacttgggaggctgaggcaggagaatggcgtgaacctggaaggcggagtttgcagtgagccgagatcgtgccactgcactccagcctgggtgacagagcgagactccgtctcaaaaaaaaaaattagctggatgtggtagcaggcgcctgtaatcccagctactcaggaggctgaggcaggagaatcgcttgaacccagcaggcggaggttgcagtgagctgagatcgcaccactgcactccagctggggtgacgagtgaaaccgtctcaaaacaacaacaacaacaacaaaattagccagtcatggtggcaggcgcctttaatcacagctactggggaggctgaggcaggagaatctcttgaacctgggaggctgaggttgcagtgagccaagatcgtgccactgcactccagcctgtgtgacagagtgagactccgtctcaaaaaaaaaaaaaagaaaagaaaaggctagagctacttgcagttgcctgagttagagaacatctctacaaggtgtaagtgacttctcatctgctcaacagctcaaattatttattgtcaaaccatgctgtctatgcttaggcctttaggactactagggtcgtgggagcctcaaagtgtattctgcttggtccaggccttcttgggcttgatgttcatgcgtttccagacttcagctgtggtgcggtctgctttggtgaccccactgaagtcgaacgtggtgatacgggacagggtgcacagcacatattgcctgtggggaagacttaggctgggggccagcacccccaccagaatccccttccccctccactagttgctgttgtcttccctgactgcaaggaatggagggacttgagcatagtttgggaaagattaggtttatcctgactgagagcaaggaatgcttagaggtctgttactcccttcccaggtccaagcatggcagaagaatggtcgtagatttcttgtttctcctcctcctttcctttaggggagcccagctagacgctacctccaggggcagggcacttacctataccctttctcttcctccatggggttcccatggagtgtcaggctacggagccgaggaaggacagccagcttattcacctcccccaggcgctggatgctgttgccgtgaagatagaggacactcaggttgaagaaagttgttaggacctgttggggagggaaaccaaaagccaggctagacaggacaggaccctgaatctctgctcagggctgactcgtgggcagagaaggaagaatgtggggaacaacctgccctccactccaaccctccacagccatactgtatgactgtaacctacttttatttatgttttaagacatacagggcatcacactgaaaaggagctgtgatctgagggtcaggagtgtgggcctgggtaccagcactgccactgacttgcctctctcagccttagttgccccttcactgaagacctttccagctttggtgatctacgattctatcacagcaagcaacaggaagacagagcatcatgctaggcacataagaagcttttaaaatactggttaaattgagatcaccacaccaggggaatagtgtccaagtcatgctccagctcctttcccctcttagggatcttggactagaaaaggccaaactttatttcttaaaacttgaatctgagttcacagaaagtaagtgctgtactttattgactacctcttccacaggagaacccagcacaggtcacagtgggtgcgcagtgacagttagaattttacttcagcctctgatgtaccagttgtttgttggttttcatgtattttcttttctttttttttttttttgagacggagtctcactctgttgccaggctggagtacagtggcgcaatctcggctcactgcaacctctgcctcctgggttcaagtgattctcctgcctcagcctcccgagtagctgggactacaggcgcccgccaccacgcccagctaattttttgtatttttagtagaggcggggtttcaccatgttggccaggatggtcttgatctctcttgaccttgtgatccacccacctcggcctcccaaagtgctgggattacaggcgtgagccgctgtgcccggtggttttcatgtattttcattcaatcctcacaaaacctttatgatactggcatattatccccatttttccgacagggaggctgcagttttgagaggttaggtagcttgctcaaagtcacagtcagtaagaggcaaacccaggatttgaacctacatctatctgtctggccccctagccttgtgctttggactgtaccatgctgcctcattacttccttgataacatgtaggagtggagaggttgggggctgaacaaagtggcttcaggctcccctgactggattcctactgttaggaactcacagggtcaatggaagtcaggtcattaaaggacaggtcgatccaggccaggttctctgggtgctccaacagctgtgaagccacctggttgaagtctctcagatcattgagaacattgttattcagccacagggactgggtcagtgatttccccgactttgaacgcttcagtggtcgtagtcctgtccttggctcctcatttaccagatctgtggggacaaagtgagacttgggtatcatctttgcttttttggctttagggggtgggaagggacagagctggaaagattagccatccaggctgtagctggagggtctggaagggccatagccctgtgcctgagtctagtgcaaccctgtcccacagcttccagcaatcagtaagtttagactaagggccagagacttctatctcaagctcttggctttccaggtcacatggacttctcatgtccactgtaccactgggtcttttttataccaaaccagtgtggggttgaggaaaactaagaaccagaattgttgggcttgagctgagtagatgatagcacaaaatcctgaattaactactggtaaagcctatagaattcacttcaatggaatacactttgatatcctgtctctctttccattaatgttgagtacctacagtatgccaggtactggatatacagtgataaacaaaatgagagacagtctgttccagactttgtatgaataatagggcagagagcagacatttgtgccttggaggagcttatatgggcaagatgggagcaagctggcaatatggtgtgataagtgctatataatagttgtagcagcacagaagagaggctattgacccagtatgggagctcagggaagtttcccagggaaggtgaagcctgagctgaatctccatggattaggggatgtttatcaggcaaagaagggtaaacaggcagggaacagcatgaagaaaggtatagaggtacagaacagccagggagtctggggcgggtttgtgtgcctgcacaagtgcttgcacgcactgcacaagggggacagagaggaaaaggaggcaggaatccagtcaaaagtctcaaatgtcaggctaaggatcttgggctttaccctgtgtgtaatgggaaggcactggagtgtttaaagcaaatgattcaaatcttttatttcagaaagatcactcttaagtgtcagtgtggaatatggattttagggagtgagttggaccaaatgaccaatttggctgtttgagtcatccaagcaagacatgagagggccctacaatcaacataatttggttgactggatgtaaaggtagaagaatattaaagggtggttgccagttgtattaactggtaaggaattacagaagaagaaatagcattgggaatgtgatgagttcaggcttagctttggtgtatttgaggttcctgtacaaaaaggtggagaagtcaagtaggcagttggagatgaaggtcggaagctcaggagacacagacttgagaatcattagcatagaaggcatacaagttagggaaagagatgagattcctcagggagagtgagggtagggaggaaggtcagggaggaagaagaatccattagagaagttaaatgatcagggaaaatcaggagaggacagtttaaagatgttcagggagtaaatagtttatagtagtaagttccagggaggtaaggactgaaaagtaattttggcaacttagaagtccctggtaaccttggtaagggctgcttcagtggaatggcaagggcctggaggcagaagccagatggaagtgagtgagttcaagagtgaatggaggctggtttcatgcctgtaatcccagcactttgggaggccaagacaggaggattgcttgagcctaggcgtttgagaccagcctgggcaacatcatgaaaccccgtctctaccaaaaaaagagtgaatggatataagcagttagcataaacaacatcctcagaaagtttggctgaggaggagagagaatagggaataggattatgttagaaccccggtgtatggaacaccccaaagcctcactcccactttttcaaaatgaggtccagttcccattgctgctaagcctttggttccctagttcacccctggggaaggaagtatttagtatttgcggaagctagccagctttcttcactctcttctgctctctactggaaggacaccctttgcccttccacccccacctctcctcctcctcagatgcaggtcaggcaacatccaccagatggctctctgccttaatcctagagtgagcaggacccacaattggggcctggggttgcaggagggtactggaacggcgtaccccagctcatgaattcctaatcctgcttccctccccacacctcctgagaaccctgaaac

SEQ ID NO: 97751 - DNA, 14594 bp, Homo sapiens
gcttgagtccaggagtttgagaccagcctgggcaacaaagcaagacctcgtctttgcaaaaaaaaaaaattagctggacttggtagtgtgagccctgcagtcccacctacttgggaggctgaagtgcaacgactgtatgaacccagggtttgaggctgcagtgagctaggactgtgccactgtactccagtctgggcaagagagcaagaccccatctcaaaacaaacaacaatggcgctgttccctcccttgctaaaccacctgagtagcccatgtaaattttcagcagccctgttcctgctggcctgtgctgataatcacaacccctgaactaatgtaagaccaaaccaagcttcctcattggtttggtcttcctccttgtcctctttcagtcccctgttctatctactgtaatatttctggatttgaccctgccttgagaccatcagctgcaaatccttgcttgctgtatcagcagtaaatgagaaaaacagacctgctgggtatctatccaacccataaagagcaagagtgccctgaacaaagccaaggatgggcccagggggacatcctggctaatgctgactcaccaaccttcagtgccagactcctcaatgctcccctccaggcctatctcagttcctcagtctttcctgctgcaggccgcagctcccctgcccacaactccacaactctccttgtagagggctacttcctcctgccctgcttagggaggcccagccttttcaccttactcttctttctcaaggctaggttgcccaagtgtcctcaggcaatttgatccagttcccaacagcaagagacagaagctgtgggctttgccccatcacctctataaactcccagacacccttcctccctaaatacataggctcagtattaaagagctaaaaagacaaaatgtttgccaaagataaaactatgtatttctaaggaaagctggctccataatgaggcccaagttagcttcctatgtgtctgtcctcccagctccacttcagacagatcttcctgcaggacagggtagtctcttccctatcaggggttcttcaagaagaaggttggctgatcacttctcagccttcagctaagatcaagtgaacaacaaggttattttcttgaaacccagacttaaagaagaggccatgctacctacttcagagcagacaaacatcaccccactcccaaagtgcgagtggagcatgggttaggtttgtcacatcaaggtttgtctctgcattagtgtaacccaagaggcagggtttcactgtctaccttagcacagacatagcagcctgcccgtgactggccacctggtctaggggcatggctgagacagcttggccccatggataaagtacatggcctagcgtcagaacacctgggcactagcacttctcagcttggccaaatcacttagcttctctgaacttcttcctcacctttcaatagacataacccacactaatatgacggatgtctggcaagagtcaaattagataactgtgaaggccctttgtaaactgtaacgtgttgtatattttttattatgataaagagacagagatgagagtcggagaggggcctgcccaagaactcaaagagggactgtgggatggtggatggttatggcccttgctacatgaggcctcaaatcacccagcagtgattaagcaccttctctgggtgttaggaacagaaatgagagccccccaaggagaaggtagagattcaggagagcagcaggcccagctctcccttccaagtagaagcttgtatcctttctcatacggcattaatccttcttgactcattccctgcaagagtccatattatgctttaagggacaatttcccactaggctacagctctcccagtaggcagggttattgttgtctctttctcaaaaaggtggaagtgaagtgagaggtattaggcacaacacatgcctaacacagggcaaaggaaatatgtgttcattgggtgtatggagaattgagaaccagaagccacccttgcttcccatacaaacgacattttcctaggcttaagcccttaatccaaaatacgttcactgaagaacgaactacttcccaagtaccagtgatataatctatttttgtgaccatcttccccattagaccgtgagctacctgaaacctttctactctctcaggtctactatatgttcaaatgtagaatccgggcttagagacgatcaaaaaaggagagtagacagcaacttgagacttcatccttgaatgtcaggccaggcagggcagggattagagtgtggggagaagtgagaatgcactaagaggaagagggagaatttaaaactgtacaggtctccccagcctaaccctttctccaaaggtatcagatctacagccaaattctcagaataggcatgtctccagctaaaggaaccctcaggccccaggcagactgcactgaggcaagccaaactcagaaccaaatgaacttcccgctccatttctcttttcccacaatctagccaaagctaaatcctctttgttgcttcccagacaatttcccacatgtcccgatgtcctcactgtatcgattaaatccttcattggccaattcaaaggccaccaacttccagagtcgtcccctggccctagactagcagcgaccttccttctgcaaccccagggactaagacgatacacgaattcctgattcatctcaggacagactaactcagggcctcagcttacccacccctaaaatggattcgcaaagcccactaatacacagaagacacaggaagctggggaagggagtgtttcccggggacctagactgaggatccttgaatctgaaaagttttgaaggtaggagcaaacggaagtggtgggagcgagccggacaggcggctgcctgcacaccccgaggcggggactgtgtagaaatctggggctttaacaggggtaggagcccggcttggcgtctcctctgtaatctgtcccctccaggcctccgtattcagtgagccctgcagtccggctgcccgtcctccgcaggtttctttctgggccccatgccccagtgtcttagccctcattcccgagccccgcctgccgcggccgcacctggtccgagtcctcgttctcgctgctgtagcagcaccccatggccggggtcgggccgggcgctcaggccgcgccgaggagggacggcgtccgtgaggagcccttccggtcacatgacccgcggcggcctcccgcaggcaaccacccgcccccaccccccgtaccccctgtcccggagccgcttggccgcctcagtcaataccccggcttccggtcccgcccgctagcgcgtgatcgttgtcaaccaatgggaaggcgtaaccgtacacgcaagcacgtgatgcggggaaagggcggggcggatcacatgacttcatctttccagtctctaaactggcagtagtggccatcgtgaattgtgttatgcgttctcgtggccactaggccacttttctgggccattgagcgaactcgtaccaaatgccctcgtatgcccttgtgatatactcttctaaatgccatgcgaggggcgactgggatccaggcctgatgctccagatcgtayggtctgggtgcacacacacagatgatccagatgaccagtacctagtcggggaacacagagggtgtatcgcccagctgggctgggggtgaatacacagagggtgtattctccacctgggctggggatctgcgacttacaggaagaagggaccttatactaccttcacatgctgacgcgcagcggagataaatcctggtagaggagatagaagccacctcactgacctctctgctttcaggcttttatctttaattctgccttttttaacagcacccattgtaatcgaacgcacaaagctgaccatcagttctcttttcctaacccccgctccatgtcttcccttgggccctgaacacaggtccaagtccgtccaagattgtatagtgatccatttgttgttcatgagcgtgtgattgggtgttcaccagcatgtatcaaatgtgccaccctcaaatcttgttttggcacattacccgtctgacataacaagagcctgacacctctcccactgcatgttctggggtgaggggtggaggggtcagcaatgtgtttcactggacatagagaaataatgtagtttcctgattgatctactggactttgtacatgcagcctggtctgcctactgtctttactgtcttcgagactcagtacaatgtcctcctgattaccttctctgactccattctctggacatgcccagctccctatgcttaatcctcatccagtgttaattcatgcatttattgaatcaacaaatatttgctgagcgtctactatgtgccacacattgttatatctggatatgcagcagttcacaaaacagccaaagtccctgtagtcatggaacatccaatagtgatcacactatattgtattctctgttcctgggtcagtctcacctaccaaacttgggagttcctggagcacagtgacaggttctgactcttccctgtagcccaaggcatggccttgcttacagaaaacttgcatatcaatgagcatgttacagtcaccccatcaccttggctcaccccatgccccatcttctgatccaaagtattggagaagtcaccagatctcatacctcttataacccctcaaatcaagaccctgaggttctgtaaatcttttgaggttcctgaagggtaggaggcagctcaagctcgtccctggggctggtaacttgaactgcaggtctcaggtgacagcagcagcctcagcatgaataattgaaagccattccagcctcctacctcagggttatcccccgcagcaggccctggactccccgacctgtcctgtgctctggtcctccagcccaggtaagcagggccctggattgtgggttcccaagctcaccagttcaagcccaccgcatcactcacctattcacacccatccatacactctttcatttttactccccgccatcaccaggggccttgcaagaaggccggcaaggaggtcagatctggatgaggaggagaatggtccaggacatgggaggagaggcccattccccataggtccctggagagaagagctgagtagagggaaaatgtgtgctgtgtgttatgtgtatgtacacatttgtgaagggaattctgagacagcacaggagaagaggggaatacagcggagaggagatggggctggagaattattaaagaatcaaagactcctcccatcctcagggaagagcaggcagagggagagtcctggggtgggaaagaggacatctcactctaacaccctatggggtattttgattgcattttactgaggcagggcacagtgatagtgaaggtgtttttgactgcaaatctatgctcttttgctacacagcagtggtcagaggagaccaggcaggcagagggtaggggtgggggaagatatcccagaggtgaattagtgaaaggggtcctgaagaaggggtgacttcaaggataaagagaaacaagtcaggggaacaatgtgaagatgggaccaggggttgggaccgggaagaggtggtttggggctgggtgctgaaagtagacagtatagagtccttgaaagtacacaggcttggaatcacactaacctggattcaaatcccagttctgctctgtgactctggacaaaagacttagcctttctgagccgtggtttgtgaaatataaggataataattgctactggcaaaagctacacaaataggcaaattgtgggtatgggattccctccctacctccctccaccccagggcccaggtagggaccatgtcccctgccattgcattggccttcctgccactggtggtaacattgctggtgcggtaccggcactacttccgattgctggtgcgcacggtcttgctgcgaagcctccgagactgcctgtcagggctgcggatcgaggagcgggccttcagctacgtgctcacccatgccctgcccggtgaccctggtcacatcctcaccaccctggaccactggagcagccgctgcgagtacttgagccacatggggcctgtcaaaggtcagtgttccctagccttctgctccaagaagtasccccaagacagtgaaggaatatttgggatctgttgctgcttaactggatgaattgggcaggttcttgatcctcttttagggcctcttttttttctcatctggaaatgaggagcttggactaagtcatttattcagcaaacatttattgccacctcttttgtattaggaatgtgctaggtgccagggagaggggtagaggccacagagatgaatgagccacaaatgctggcctcaaaggaaccataatacacagtggaataaccatctcagcagataacccatagctttgtaattatctgtctccacatctttcctctccaccatggaggcttccacataccatttagggtagctgtctgcctggatttatctcaatcccagcataagtgcttttagggtcttatttaagaaattcggctgtgtggtggctggtgcctgtaatcccagcactttgagaggccgaggtgggcagattgcttgagctcaggagtttgagaccggcttgggcaacatggcaaaaacccatctctacaaaaaatacaaaaattacccaggcatggtggcacatgcctgtggtcccagctacttgggaggctgaggtgggaggattgcttgagcccaggaggctgaggctgcagtgagctgtgattgtgccactgcactccagcatgggtgacagagcaagaacctgtctcaaaaaaaaaaaaaaaaagaaaaagaaaagaaaagaaattcactggctgggcatggtggctcatgcctgtaatcccagcactttgggaggccaaagcaggaggatcacttgagcccaggagttcgagactagcctgggtaacaaagcaagacccccgtttctacaaaaaatttaaaaattagccgggtgtggtggtgagtaactgtggttccagctactggaaatgctgaggtgggaggattgcctgagcctgggtggtcaaggctgcagtgagccgtgatcatgctactgcactccagcctgggcaacacagcaagacttggtctcaaaaataaataaataaaagttcatccaattccaagatcagaaatacatttgatgagcaataaaaggggaatgaaactacaaattctaacagagacctttcataaatctgaaagatagggtggttgtttctgcctgggacttcatggagaaagagcaacatttgaactgaatctggaagttctgagttggccaggcagatggcgatgggggtgggaagggcaaagccagccacatatacacatgtggcatgaaggaatgagacagcttgatggattctgggcacagttgtttgggatggctgtgatacaggccacaggtgggaagtactgagagatgaacctggaaaggtaggataggatcaggtccaaggtcctgaatgccaggctgagaatcccaagttcaatcccaaaggccttcagctcacaggagccaaggagtaataaggtcagatttgttggaaagattccagggctggtgtgaagactacactgtaggagacggggaccaggagggcagctggggctatggtacaagagacagatgagaccccggctggttgggagctgcagtgaggcaggtaggcatttgagatatcttttatcaggrgccctgcatccatctcccatgtcttctgcaacagccatctcccctcataggtcagatcctgatgcggctggtggaggagaaggcccctgcttgtgtgctggaattgggaacctactgtggatactctaccctgcttattgcccgagccctgccccctgggggtcgccttcttactgtggagcgggacccacgcacggcagcagtggctgaaaaactcatccgcctggccggctttgatgagcacatggtcagcctcccatctccccaacccagatttttgtcaccccaggccttgcccccagacatcccttgtgaaggactcccatctaaggagaaggaagcacctccactctggggactgtgatgctggatggtgtgtgagctcctgccctcctgtcccaagtcatctgcacattattttctgccggatgacgaaagaaacagctaagaggaaggtctctggaacccagcaaatttgggtccagctcttactctgcctcttgttagctacgtgaccttgagcaaagcatgcatcctctgaaccttagcttcttcagaatggaaatcacaatactgatcctgacttcttaggttctgaggtcagaggaaatgtgagaacactcatgggaagctaagccaggacctggcatgaagtaagccagatcctggtggggtcttgactgggagaacaattccccccaccctcacctccagctccccctatccccacaggtggagctcatcgtgggcagctcagaggacgtgatcccgtgcctacgcacccagtatcagctgagtcrggcagacctggtgctcctggcacaccggccacgatgttacctgagggacctgcagctgctggaggcccatgccctactgccagcaggtgccaccgtgctggctgaccatgtgctcttccctggtgcaccccgcttcttgcagtatgctaagagctgtggccgctaccgctgccgcctccaccacactggccttccagacttccctgccatcaaggatggaatagctcagctcacctatgctggaccaggctgaggtccaggcccaggggtacttactgatgcccacccccacccccacccaagcagggacctcaaaatcccctccctttcctgtttggggccttgacacacgctgggctcagggctagggagtctctcttcccacctctgacctctttcagcctctacactgacctcaagtgtcaagttctatcaggctgcttggtctcactaggccccctctttccagagagaaccatggactgacagcaagaagcctgagctcccgacccagctctgtcactgatttgctgagtgactccaagggaatccccaccttgctctgagatttaatcttctctcttaacacgaaggaagctggatgggagagctccaggggcctcccagttctcggcctcagaaagcctcccatcctcagcccatgccattctgggtgggatcagaggaagtggcaatgagttagacgccctgcaggaatagctggatgcaagctgggccagagaaaatggcacagaaccctggacccagggccagggatgccctggccttccctaactctggcccacctagccaattaggtgtggctgatgtcccttgagtgccctcttcctaaagcccaaaagaagatgctggactcctctgggccccaccaacaaatagggaatagacatgggtggaaaatcactcctttgtctttattaaagaaacttagaccagacctggcaatcaaggggtgaggtactggccaggaaggtggagtaggtttcaggccctggggatttcaagtgcagactgatggcctgggaggggccaaagagaccagatcctggcagcagctgaggaggtgcccaagggcactttcaggcactggggccatcagctggttctgtgggcaggggttgggggttgggatgcagggtagtttgggctggcctggaatctccctgaggccaccctgccttgtctacctagatcatccactggtcctgatcctgttcgttgccttccatgtccacctggagaggaggctgggtgtgggtggggaggggcctcagccagcctcagccccagatcctgcccctggctggatccagggtttctgtaccccttggccatcaactgggtcaggagcaagggtccaggaacagaggccctcccccataccccttgcctacctcattgacctctccatcatccggtgactcattgtagtcattcatctcgtccatgtcctgcatatcctcatcatcctctgagtcctcttcactatcctcatcatcttcatcatcctcttcttcctcgtcatcatagtgctggtgggcaggacagagcctgtaagccctacaggcctgcatggaccagttcaagaactgacccacttgagcctctctctagggccaatgaatgaccccctaccccgacactccctccttgagtctagcaggctggtgcatgttctgcaggaccttaatgctaggcccaatgcccaccccttctatctccccttttaggcttttacccagatctgagaaccacaactgctctgggtcagagacaggacattcagaattagagcagagcctcggtccactgcggcccccacacaggccccacctgctagagccactcacctctgaggctggcttgccaataggaaccaggttgttgtctttctccgcgatgctttggagctgtgggcaaaggcacagaggaacaaggccagagcccaagtagggcaggtcaggggcatgggactggcccattctgcccagaagacaacccacacgtgttggggagaagcttcctcccagttctcagggagatacaatccctttcttgtcatctgccatttatgaacttgatccaaatacttaaactctctgagccttcttttttttgtataattatggtgaggatgaagtgagagacttatcagcctagaaagcatcatctgctagatcctcaattaatagtcaaaattatttcctgtgctttagggaaaagagcttgggctgagtgtcagcagcctgggctctaatctggcccagaagtcacatggtacccctgtaaaatagggtaccacaagatgagaaccttggctccctggctcccagcccgattattcccagctcagggcaaaaagctcttcctgggtagatttctggagtaaggctgggtcatggcccactgaaggaggtctctgtctgtgctgaggtctctgtgctgtgctagctgctcactcacccaggcctgatgctgctgttcctgctgctgcagctctgtctcttccacacagggtcgatccagattaaaccacagagtctcagtcacacgagggaagagtgaggggaacaaagtggacatggctcctagactgagggaaagggtcaagtgaatgtgttttgctttgtttttgtttttaatttggttgtaatttgatttrgggatagggtggaagacagcaggaaagcagcccctccccctaggaatcagacagacctggctttgagtcctggctccaccacttactagctgtttgaccttggctgagtcacttaacctctctgagcctcagtgtcttcatctgtaaaatggggataataacaattataccactgtcaaagttattctgataattaagtaaataatggatcaacaaagctgtttgcaggctgttcaaggagggatgagaatgggagtcaagtgtagggataggaatccagaatgcagactggcattatgaaattatacaaaattagaggtagcagggttctactgaaactatccctacctcctccacacactaaaacctgctttttgaccctttatgatggcccataccacacccacccagtgtcagaaatttaggacactaacgacctctcatgaatcacagccaaatgtcggggtggagggattgtagcatatgcaagcagggttcagtaagacattctaggaggcatgaataagtggataaataagtagatggaagattgaatggatgaactaacattataagggtacaatcagctttgagcggctgagggagccgaccaggagtgccagataatctgaattaaacttaggacaggcgaactgaggcccagcgacaggcagagactggctttaggtcatacagtgtgtcggggcttagaattcctccgtgaaagggatgagcaggagaaaataatcgatgcctggtcctgcttttgtcttaatttatctgaccgacccagggccagccgctgcccttccctgtatctcagattcccaacccgcgtaattaggcacgacggtaaacaccctcatgtccaagaagtactgacagaccagcgatctcggctccgaaagcccaacccaccgtcgcaaagccaccgccctttctttgctcattacgataatgaccatgcagttgaccaacagaaagaaagcagggcgggtctcagacagaaatttggccttatagggttgctaaacgcgaaaaaagcggggcctgggtaggaccaattaactgaaagaaatgctgggtgacaggaagtgacaccaatgaatgacggaccttgtgtgacsgggtggggcttagtctcgaggaagcggccaatgagctggagctctttaagggttaaggactctcaatatggagctcctggggagtcgggtcaaaggaaatgggtttctctgggggaaaaaggaatgaaggggcaaggagacggttgcagccttgcgtctgtacttaccgcgccgggaggctgctgccggcggcgacccggaagcgcttcacccagcctgagcggaagaacccaccagaatccgggactcaccaaacgcatgcgtccttcgtctccttttgttttccccgctcccgcccactaaaccggatgtgacgttracctaccttagtcacattgttagggaaggaagtgtgccgcgcctacctatctgccccgccttgagtctcagccagtcggcgtctccatcctggcgccagcactacggtctcgtttaaccactgccccgtttaacccctgcccttttgttgccagtcaccatttgcttgttaaccccttctgaagaagagctgacagcaaccttttagtgcgagggccattcgtcctgctgcatcccagaaaactaatctgttactacttcagaattgctggttgatgttaggcccctcctatctgtgctctctcagctacagtttcccgtttgagcatattcattcttttttatttttgctctgaacaaaaatattagagttacaatattactatattccaggccttgctagaaactggggataaatctatgaatatggtcgcttccctggaagacctcacagtccagggaagccaaaccctgcagacatgcagtagacttagtggtctctcttaaggttgcttgttgagttttgacattggagattatgtacagacttgaatgactagttagcctcaggcacagcattctgttgctgggggaatcagctgccctcctcaggcctgggccaagtacacttagagatcgccctcgtcacctctcccatcctttgctgatgcctctgttctagtaacctctgactcagcttcgcctttagagatactcatgctttctggcaacagaggtccttcaaacccaattcctattaaactccatcacttaccagcctctttcagggacagcagttatccgcatttccagtactgtcctggccagatgtgtgagttttggcaattccttttcctctctctggactcagcttctttgtcaaccagcatcataatctctgcccagccttccttctatcctgggctgatgtgaagattggataagaattgttcaagaggtcgtgtactgtgcatattgaatgtgattatattgccaaatagcactgtttgttatagtttttcattaaagagtaaactttgcctcttggaaatgactacctttttcattcattcaacaaatacctactgagtgccttagtatatgtccatcactattcttagtagtgggtatacaatagtaaacaaaacagaccaaaaaagtccctcttttcatgcagccttcattctgagagaggtaaacaataaagaagatagataaataaaatatgtagttgtaagattgcagtaaataagagaaaaaataaatctgagaagtgggaataaaatatttgcaggggaggtgttttatttcagactggggggccaaagtcactgggaaggtgacttttgagtaaaggtctgaaggagcagagagccttctgatatttgtggaagagcatttcagagagagagaatacaagtgcagagggcctagaatggcttgggcatagtgtcctctagggagagtaataggtaggagatgaggagttggggagccagtggagggttgtgagcacagggtccacacaatctgatttacagtttaactgagttactctggctgttctccaaatagactggggtaggggagacaatggcagaagcagggagaccatttgggagcctattatgataatctagaggtagtggatgagaagtggttgaattctgaatttatttagatggtagagactacaaggtttgctaacagatggacaatgccagaataagaaaggagccacgatttttgggctgaacgactagaagattggtgttgccacttttttgagttgggaaggaatggggaggtgatgaggggtttggtttttttttgaca

SEQ ID NO: 97752 - DNA, 39293 bp, Homo sapiens
tgttgcccaggctggagtgcaggggtgtgatcttggctcactgcaacctctgcctcccgggttcaagcaattctcaacctcccgagtagctgggtgtgcaccactacgtccggctaatgttttgtatttttattagagatggggtttcaccatgttggccaggctgatctccaactcctgacctcaagtgatctgcctgtctcggcctcccaaagtgctgggattataggcgtgagccaccacatggccagtcaacagcatgtttaacagctcgtcagagatgtagggaagagaagaggaggggtaaccaagaagctatagccgttggccaagcaaatcccatttcatcctgagtgttttaaacactggtaaattactgtggaatgggataatgctagaagcaaaaagtatccctccttttcagttgatgatggattctaaaatgctgtgtattttttatcagcctcagtccacccaacaaaacaaaaaggaccaaagaaggaaaaagtaatgcattctatttaaaactgtccttgcctaccctagaggccaagctctttcatgaagccatcttcaactaccacaatcactggtgactactattttctctaagagccacagtttctgtctacactactcaataagcaactgggatatgctacttactattataatttatattatcatgaacaagtcttttctccctatcatgggcactatgaaggacataatatctaatgtttcatatacctaatatttagaataatactatacacataattttcaatgaaggcttgtagtacttagcatctatatttagctttctgtatgtcttctatatgtgtattcaggagttcttagaagccaaggggaaaaaaagacaaaattatctttaaaagtcacacctctgctttttaaaatgctgaaacgatgtaacttataatattttgacatcatacttaaactgactttcatgattcaggtgggagaaaaaaacccaacacttaggttgacatatggatatactcaaactagtttttctttttttttttttttaaatctaccctggtcagacttcccagagacttacaaataggctgataatatcatctagaacttcagtcaactattttataataaaattcaaggaaaaagttcagaattctccaaagtgcctttcagatatatacttattgcagtgtttataaaattgtggttttcactttttactgatttaagggctaacattgtaaaacagtcatttatttacatccctatttcccacaatagcctatagcattttgaaagaacaagatttattcatcttttttctttggtaccaagtagttgatagggactcaataaatgtttattgaataaatctgtcacaactcacaagacagatctaaaaatccatgaatatcctatttaattattttaagataaattatgttattataccataagatattcaataagacataaatattttagttattaattattgtttaaaaaaaaagagccagaagggaaaagccacctaacagcacaaaaaatctgtaagactcctttaaggtttttatgttttgatgacaaacagaaaccaatcacctttaaaaggaaatgaacacaagaggcagcagataaaaagttaaaaactacagcttatattaataatcaacaacttttacagcaattcattaattagattttagtgtagcttataagtttaagactgagagcgtttcagtattatccacatttcagatgtcatacacagcaaaaggcatatcattactgaagataaatattttgggttagcctaaaaacttttatctagatcctacctccaaagctgacaaaaatattctaatgaagatgttcacaatattttattgtttattcatttttcttctgataagttgtttatatagtaaaaaatgacttgaaataatgtcataataaactagtactttgtaagagtaataaaactatgagtaccaatacattttcatgtgggtcttatagaatttctcattaatttgtgaactctaccaaatttttagtttgaggggaaaatacttgttagccacaagaaaaatgatcttcaaacatttcaatcatacctgtttctgagcttctactttttgctttctggttggatcaattgcatctaccatccatttgatagtaaagtatgtcactgcaccaaatattgtcaaacggaaaattaaaccaacaacttcattccgactcaaaggacgagaaaaggcttcagcatgtaccatcttgaatgttaaccttaaaaaaacaaacagaaatgtcactaggtaataactatacttattaaaattgtaagactaacaaagtagcttaaactaagaaagaaaaactaacttctagtcaaattaaaatattacctaccttaaaaaaagtgtttcattttaaggagaaatggatttttaaatgttaagtaaacaaatacttttaaagctcctcttgcaaactagaagtagactagaaattaagatttatttggtagtagaattaatcattttatttgaaaaatacagtaaatatcttaaggtatttactcaaaacagctttaaagaactatttcagagtctaggaaagtatcaactataacactaatccaactgaagaaaggcagcccaacaatactaatgtgacggtaagaatttcttctattaactgtatcatataccaggtaatttttgagtgaaattcaaattgtgaactgactcactttttcctcatacatacttttaaaggttttcaaggcctgcttaaatttaaacatgccatttcctcagtaataagtggtattaacttttttgagccacactattgttcccaacaaccgggctaagtaggaagcaatagaacttggaaaaatcttgaactgagacaactactacaagaatacagcactcacccaagctaaagagaaaaaaaatgagataaatgtgcctatttttgcatatatccctgaacagctacatcaatcaaagctaggcttacagaagacatacactcctctgtcaatggcaataactacccggaagaataagcttgttagggatgatatgactatcacattttgggagataggatcttagcttcaaatactgccattatactctcagcacaggagtgtgctgaatgctatgggatatataagaaaaagagaatatatatttgtacttacataaacatgaaaaaaaacagaatttgtatggctcagcagataaaagttaggtactgcaaagattaatatccatggtccttccagctctaaaattctcctctcactactactaaattaaagagcctcttcaccttcctccctctagaatagctccaaaaattttttatttccttttatacccctcacctccactcaaggatatatactccttctctctaatcaaaagaccccaaagtatttcctttatacgtttcccaagcattcaaaactattctaatctagaatctagctccagagtcaattgtaagcattttctctttcacctcttttcaaagggactctataaatagctggagtcactaccatctgaaaatcccacatatattttcccttcagcgtatctgtctagtatcctgcatgggccatttaccctcattcacctaggattagtcaaattctatcctaacttcaaaaatcaactttatttgctccataaagcctttcaaatcacatgaatcttcgtattattcatttcgccctattacactatcttaaaaaagtcttgcttttgagatatctactcgactagagtttaaatccttataaacaagatgtatatcttatctacctttataactgtcacacacaaaacagacgtttataattgccacacacaaaacagaggctattcaaaaattatgttcaacagataaattgtaactgaaggaaatctcccattcaatcattgcaacagtcacttctgaaggatttccaaaaggttccacatttctccactaggagccattcacttcacaataattagatttaatttaaacttaacaactaaataattgaaagccttcattttggaggaagaaactttggcctagggatggtaaatgatttaattcattcaatttgcatttactgaacatctatatatgacgcccactatatattggatatacaataattgttaagatatcaccacttcattcaaagaacacactgtccggctattatattaattataaagaaagcaaaagaagccaaaaaggagaaggcacctaactgaaatctctcttcatggaacaaaccaaagtgtgctatcttccatcagcatggattccaaaaaaaacgggttacacaatatttcacttctcataggaagtaaaaaactgacttttctagtctttattccacaaagttgaaaatgcagttgaaacgtgttatatcactacgtggggtatactcacagaggaaaataatttagacaagataagggttttattaacctaatctgtgaaaagcggtggcattccagtaaaacgttttcgttttagagttggtagtgataaaactaccaaccaagtcatctactggatattcattgaactacatgaacaaattagggctgttatgaacacatcccagtcatcaagatagtaacaacttttaatcccataaaaggtcaacacacaaaacccgtttatatccttcccaattctgaaatttttaatgtaataaagacttaggtctactaaggccacttgtaaaatagtagtctacctttttaaattacttcaaaatccttcaatgaaactgaaacttgttttgtagactgtaactatatatactttattgtacactcatgtatcattcatttggtattgatatacctaaaatgtaaggctgttacagcagcaataccatcaccagcgaacatacaataaaagctgcatgcgcatacaacagcagggagcgtatttcaatcctgtataaacattaggttcaacaaaatgaatacacaaatatgtacatatacgatgatagtgctgtatgcaactaagaaacatcctaaaacactataacctagagttatttgttaggcaaatatggtatcaggtcgtttcattttaagttctccatttccgagtggaaaaccgtgaaatcgtactacctcatctatgagcaatttattgacatgtatagcattcatagcatagcattcactgtagtatttctctcctaattcattgcagtatttcacaaatcgtttctcaaactcaaaagtcccagttttgcaggcataaaggccctacgaatacagcctatgacaatgaaggcctgccaatcttcacaaagagggcaggttattattaacatcaccatcttttgtgaaagcgtgcccggccctgaagaaccaccttcgattttgcacaaggtggtggccgcgcctgtgcgacaatcagacctggttcattccagccgccttcgtctaggttcgcctggttctgaagtcttccgggacgacctcaaacccccacagtgaccaggatgccgacaaagattccctcgggaatggcacgagtcttggggaagagctaagcagaccctaagggcccaggccgggccggacgccaaggcgaggcccgggacgcccttggaggttaatcctctagatactaagggctgcggggcgcttgggggcggcactgaggtagggcgtgggagaagaccggggtgacctttcctccgggggttcccaggtccgagacggtccttaaaggacctcagaaggatacgacaaccatcccatgaggccccacgggaaccagctactcacccaggggcagaaacagcaagagcaagtgccctcagccggcctcacacaggaaggaaacgcaacctgggagagaacgcttccggcgggaggcgcggcgcactccctcccacggagcatgcgcgacccgcggtcgccggcgcggagggggcgtgctcccaggcttagaaacagtgagggagagcaaattcgcgcacctgatgtctgcttaagctacctgctagactgagactttctgcgaagccggcgtgtctgcgagcagcactcgctaaggctctgcgtttaacagacactacctttgggaaggcgcttatcacaaaaagtccctgcccttctcgcgggctcggggcgcaamcctgacaaatcgggcagccttcytgagagtgcagaaatgctctgcgtacccagcaaatacattctctccttcccaccactctgtgcaaaccctcacgccgcggctttgtgtctgtactttagccaaaacgcagaagcttatggccaccctccactcctcacccctcatccctcaccacctgcctttcaattctcgggtgagctcacccttctcccccatctctgtgctgacaaacacctcggggtggcgcctgacaatctttccgcgaaaagatttagcagcccacgccaccagactcggtagttaggacggaatagggcatctggtaacagattttgcattttggtgatttccctttttctttcaccccttttcctttccagaacgagcgacgtgacacaagaggtcccaagggagcaaacctgaaagccagagcctcctgaatacacaaactgccggtgggccagatgacattagacactcctgagatacgagaagcatcacttccttcagacagagtcggtgagactatgatgtaatgagagttctccctgtgttcctcaggaaggcagcttgtgcctttctacttgaggcatcatctttgatggctaaagaattctgcagcttggccagcgcggtggcttacgcctgtaatcccaacactttgggaggccgaagcgagaggatcacttgaggtcaggaattcgagaccagcctggacaacataatgagaaatcgtctctacraaaaaaaaaaaaaaaaaaaaaaaaaaaaaaaccacctaaaaattagctggatttggtggcgcatgtctgtagtcccagctacttgggaggctgaggtgggagaatcgcttgagcgtgggagatcacggctgcagtgatcaagccactccactccagcctgggcgacagagcaagcccctgtctcaataataataacaattttgcagcctgattgttaacgaatgttactagttacaaacttgtaataatgtggtgaagataatacctagttaatgtctgctggggtggggcaataagcttctatgtgctttacatgcataacctaaatatctcccccaaaatcctctaaaatagctatcattttctccgtttttacaaatgagcaaattttaaagcttaaaccttagagaaacttttctaagttcatatacttgggaaataaaggcaacaatttcattggaacataggtctgtctaattcataccttgtactttacgttttctctttgagatggtaatttaataccagctaaactttaaaatctagttgaaagtaagaccatgaaatgccaaaatcacaaggctttaaaggatgggatgaaagggatgcatgaatgttgaaaactatgrttaagttcatggacaggaatcagaatggaattgaatacacccgtgcctgtttagtatttaaggctttatatacgtgcatgcctacattcctaatttaaaaaaaaaatggatgtgaagctaggtttgggattactagactatttagagagatagacctttgagaagaacggaaagattatgagacgaggacaatgttcattaaaaacaaacaacaacaacaacaacaaaaaacagaggctatcagtgctcagcagactttcaagagactctccactgggtccttggatgatcccaagctgaatcattgcttgggaggctcatggacacatggtttggcagggctaaaagggggagggtcactaaaggcaagaaacaggttttgtgccccaatagggtaattatatccactggtaaggaaaatgagctgagaaattcaagatagtaatggattttcattcatttactgagtgaaattggttcaactaagagcctcacctgccctcttctaaggaccagggtgaccagcctacccagtttcagtttgcatgagactaaaaggtttgctgggatataaaactggctgacaaagtctcaggcaaatcatgagtcactctactagagacatcctaaatgaatcctacaatgaaatggagttcccagtatggttacatctagtctcaattcatctgcctaatatttgagggatgattgcacaggaagggaaactgttgaataaagtcacgaggctgaccataaagagtctacaagctcgaaaagtgctacacctcactccctttccagtggttcagccactggaaaccaaatgcctacacctatatgttttggacctaatattttcatttagcaaatccgtaagaaaccttccatgtctgggcctaagacatcaagtacattcattttcagcaatcatcaaatcaatgagattcttccagaatacagcagagtgaacatatgcttttcattccaggatagctttatataatccctggcaacacaaaataccatatttggcccacagtaggggctcaataaataattcaatatatataatattaatcaggaaattagagcagactgtagactttctgggcctttgctctttgttagaatcaagatattaaaaagaattattactttattctagaaagtttttgggttttgtgtgtgtgtgttttctgtatcagtaactcttaaaatagttatggcagttctcctccaaggtgctgaattttccacttttgttattaaayggagtgtagctagtttgctctgcaatcaaggttaatgcactagacacctggtgggaagaaaggattccttaaattaggtgttcttggctgggcgcagtggctcacgcttgtaatcccagcactttgggaggccgaggcaggtggatcacctgaggtgaggagttcaagaccagcctggccaacatggtgaaaccttgtttctactaaaaaaaartacaaaaattagctgggtgtggtggcgggcacctgtaatcccagttacttgggaggctgaggcaggagaatcacttgaatccaggaggcagaggttgcagtgagccaagatcatgccactgcactccagcctggacaacagagtgagattccatctcaaaaaaaaaaattaggtgttctcaaatttcactgtatatagattaacttggacaacttggcaaaatgcagattcctggctcccagtcttcagagactcccgttcaactactgtaggttttggcctagaaatctgcattttacagtaagcatctgggctctccgccatgtgaggatgcaggaaggtgtctgtctgcaagccaggaaggataccctcaccagacagagtatatgccagtatattggatttcccaccctccagaactgggagaaataaatttctgttgtttaagcctatcagtaaatcagtaaacaaacatctgagctgattgggatataggtagttttggactctattttgagaaattctgccctagtgaatgaagactgtagatgtatttttgcaaaaatctctactaccttagcctaaaaggcctatctggtcagctgaaccattaacccagctggaatacatcaagaaatcaaggcaaggaagcctcatgatgagattcaggatagaacgcctttggaaggaaaaacaaatctgaaatctttgaataagtaaacacagtaaacctgactctattcattgctcattagaagtaattcacttgacaatgatttagaaagaatagaacttcaacaaataggtaaaattatataacagtaattatgccagtataattcamttggttacctttgttcttttaaaaatatcataaaaggataatttcaatcattattttttaattttttaaatcatgtcttctgaatcatatgaaccattattttgacaaggtaaattaagtagaatggatggagaaagaaaagtaaagcaagaatatgaagctatacctgaagctgtacttgaagctccaatagaaagataatatagaacacaatggagtactattcagccatttaaaaaaatgagatcctgtcatttgcaacaacatggacagaactgtaggacattatgttgagtgaaataagccaggcacagaaagacaaactttgcatgttctcactcatttgtgggagctaaaaattaaaacagttgaactcatggagatagagggtagaatgatggttatcagaggctgggaagaatagtggtggggggtaggagggaagtgagaatggtaatgggtacaaaaatacagttagatagaaaaaataagatctagtatttgacaacacagcaaggtgactacagtcaacagtaatttattgtgcatttttaaataactaaaagagtataattggaatgtctgtaacaaagaaatgataaatgcttgaggtaatggatacctcatttaccctgatgtgattataacacattgtatgcctgtatcagcatatatcatgtaatccatagatacacacacctactatgtacccataaacttttttaaaaaatgaaaaaaaagctaaactaaaaaataaaaataagaaagaataagatagaatcaaggaaaaaataatggaaatttaaaatttcaaaagattggaagaagtagaaagatgaattgataactccattctgtaaaaagaagagaactaaaaaaaaaaaaagacaacagcaaagttcaaagaacatattgctgtaaatctactttccatggttttatgtttttaaactttacacataattttaaatgagtgtatataaaaagaagttatatataattttcttgtgttatcagggtaatactaatccacaatctgcatttctacgtaacctttttctcaagcagcattgccaagtgtactttttaaaaacttctaccaaaaaatgttttctagaacttggaaatttacaacctacaatattttatttagctttaatacagtactgttcaaatgatactatctgtgaaaaatcaggattgaacaaaaccagaattgcttcagatgtctaaccctactgtagcctcattagcagaagttttaaggcgtagatgaaagagtgatccccctaggattaaattgggaccttcataatgcccctgcctatggtttcttaaatggggaggaggtgggaaagattgagtaagaataacaaagatacaaatgcattagttaaaatagaagaaacaatagttgaaatgttaattctcaattcctgtaacaacagattgatagatgaggcataaaacaagaccagatgctgtggttttcaggatgcacttggcttcccatcctttataacctagagcaatttttgctgtaagtaggtcacttgccttctctcatttacctgattctaggaaaatgcccttgaaagtatttagaaaataataggtactggtacttaatattttaaaaattaagatcgcataaaaccttcctcctcccacccgtttctctaatagccagaataactgataaccttgaaacatatgtgaaactaaaatgaacaagaataatttgaggtcttttatcttctaagcacaagtacactaaactctgtgtccattctgttagttcccgtaattcactttgsttagcactggcatagtactcagctcacagaattatagttgaagtctttattctcctataatatattatcatcttgaaaaaagaggatgcctagaacataggagaggcttaacaagatttaacctgactagagagaaaagaggatgcctaggacataggagaggtatagatttaacctgattaaagaggaaaaaaaagggaaggggggagraaagacaagtggtccaaaggtatgacatacgattcaaaccattttactgatgataattatatgattgccctatcctgatgtgtccattagaaactagtccaatcggggagtcttggtatctatagggtataagaacgtgaacttgacagacctgggtttgaatttaagatctactgtatactgactctgttaatttggacaagttacttatgttctcaagcctcagtttccttatatttaatatgggaacagtaacagtacacatgccatggacttgcactaagaattcaatgagacaatacatgtacagtgctgagctcaatgcctggcacttagcaagtgctcagtaaacatgctggtgtaatacctcagatgttattttcattatacgatgaggtgatattctctcattcctagattctgtaaggacaatgatcttttcatatctcctctgtgtttgcatgaggaccttacctcttcagttttcaaccatggcatcttgtctgaaatgtttatcttctctgacttgtgaagaggctgtgcctctctgtcctgctgacctcttggttctcacattcccattcttaatacacccctctggctgagtcttactgatcagtagtctataaaacatttatgatagttatataaaacctgtaagatttcatccctaygacccaaagataataaagtttaacgtatttatcgatccatgaaaattatggatatttctcagttcagagaccatcattaatattggctgttattcccatctgtcaagtaacaatcatttattgagtatacattctttgcttttatgaatttctaaagattgaaacatcttataaaaatgcaagtcctcctacagctgttgattttaagttagaggtttgccctatatttcattccttcattttttgcttacttttccttacttagactgctgagtggattttgcacaagaaaaattaatttagtagatgaaagtgagacgctgaacaagccttgagatttgagaagtcaatactttgcatgtcttatcttttctctgcaaatcttaacctttttttttttttttttttgagatggagtcttgctcagtcgcccaggctggagtgcagtggcgcaatctcggctcaccgcaacctccacctcctaggttcacgccattctcctgcttcagcctcccgagtagctgagactacaggcgcccgccaccacacccggctaattttttgtatttttagtagagacggggtttcaccgtgttagccaggatggtctcgatctcctgacctcatgatccgcccacctcggcctcccaaagtactgggattacaggcatgagccaccgtgcccagccacaaatcctaaccttcctattaacctcagggacaaccacagcgtcagagctgttattctacatataaaatttaattcatttgagcacaacactttttttttttaacttttagagacagggtctcgctctgttgcccaggttggagtgcagtgtctggatcatagctcactgcagcctcaaactcctcggcttaagmaatcctcccagcttggcctcccaaagcactgggattacaggyaggagccaccatgcccagccaagtacaacacatttttttgtttaatttactatgggtaattaatagaaacattcccaaagttgagggagctttactgagcagaagaaatgatatatcctgtccagacactgaatgcacttcttccaaaggccagggcaaagctggctgattttacgtgtttaaggatgaaatatctactaggccttctttcacctagaggggcccagcagcagttcactggcaagctgatgttaaaaatctcccatcttccccttttattgtcattgtttctggaaccagaaaacagcagcagcagcaacaacaacaacaaaggggaaaaagaaagcaaagcctataacttgttttatagaagcacaggaaactaagtatactaaattggcagggatgaaagtctcattcaacttcaaaatagtatacctgatagatttcacaaacctttctactttctagcctgctgcttattcagttgaaatatcagcaattctgaaacctttgaatgtccaagtaaggcccagtgccagaggcatgcccctacccatttctttgtgccttctgagttctcaggttaatgagagatcagaaaaggggagagtaaaggagagtagacaaagaggctaactccccaatcatgttttcttcttctatagtgttttgtaaaaagctgaagaaatgctaataattcttggctggctaaaagcaggtttagaattctgtccagatattcttgaacctctggctggaccgtgtgccaccttccacattacagtccctccatcacttaatcctacttatgttacataaactagctttccatatatagtcatcatagtgtcctcacaggctagtatttaagaaacctcttctgtccctctctcaccccttccttgggactcttggaaataaacaggtgaaagagtttaaatgaatgatgtctaaagccatgaaatacagtgatcatattttgtcttatttttgatgactaatcatatttcttcagttgaatcaatcagaaggatttgcagcacctgaacacacactcataggccaaaaagagaagacaactaaaagtctctctagtgttaccycatttcctcctcattctacaggaagatggggtccatgatacttcattttaattatcattctcaaaatctgtttctgaacccaacacaggaaatttatcaagcatagagtgccaggtaggtgaagaacaaatatagtctctgccaaagtagtttgaagcatgcaggatgcagattatggctgttttattcagtatttaatataccattatttactgttactaaatatcatgatactatttatataatgtcataatgctaaatatttaataatttaataaaattctgtttcagtatttatgcagtatttgagaaattctaaattatgacagtactcaatgagaggtaccagctccgtggcctgtcacacgtcaggtagcctttctgggtttcctcctctgaaatgaaaatacaggcatacctcattttattatgcttccctttattgtgctttgcagatattatgatttttacaaatggaaggtgtgtggcaaccctgcatctagctagtgtgtcagtgccatttttccaacagcatgtactcactttgtgtctctgtctcattttggtaattcttgcaatatttcaaacatttaaattattatatctgttacggtgatctgtgatcagtggatctttgatgttactattgtgattgttctgggcaccacagaccacagccatgtaaggcagtgaaattaataaatgttgtgttctgactgctctaccaaccagtcattctcctgtccctatccctctcctcagggcttgcttttccctgagacacaacaatattgaaattaggccaattaataaccctacagtggcctttaaatgtttaagtgaaaggaagagtcacacatctctcactttaaatcaaaagctagaaatgattaagcttagtgaaaaaaggtatgttgaaagctgaaatagaccaaaagctaggcctcttgagtcagacaattagccaagtggtgaatgcaaaggaaaagtggttttttttggttgttcgtttattggttttaagagacggggtcttactctgttgcccaggcttgagggcagtggcatgatcatagctcactgtggcctcaaattcccaggctcaagcaatcatcccacctcaacctcccaagtagcttgtactacaggcgcacaccactgagcctggctaattttttttttttaattttttgcagagatggggtctcattttattccccaggctggtttcaaactcctggtctcaagcatcctcccatattggcctcccaaaatgttggaattacacgcatcagcaactgtgtctggcctagaaaagttcttaaaggaaattcaaagtgttactccagtgaataaatgcatgataagaaagcagaaacatcctaatggctgacatggagaaagttttagatggtctgggtagaagatctaaccaaccacattcctacagcctaattcagagcaagtccctctcttcaattctgtgaaggttaagagaggcaaggaagctgtagaagaaggatttgaagctagcagaggttagttcatgaggtttaaggaaggaagctatcttcataacatgtaagtgcaaggtgaagcagcaagtgctaatggagaagctgcagtaatttacccagaagatctagctaagatcattgatgaaggtggctacactaaacacagattttcaatgtagacaaaacagccttttattggaagaaaatgccatctgggacttttatagctagtgaagacaagtcgatgcctggctttaaagcttcaaaaacaggctgactctcttgttaggagctaatgcaactgatgactttaagttgaaaccaatgctcattggtcattctgaaaatcctagggacttaagagttactctgtatctactctgcctgtgctttataaatggaacaacaaagctgggatgacagcacatctttttacagcatggttttctgaatattttaagttcactattgagacctactgttcagaaataaatgattcatttcaagatgttaactgctcattgacaatgcacctggtcactcaagagctctgatggagatgtacagcagaatgttgtttacatgcctactaacacatcatccattctgcagtccatggatcaaagagtaacttcaactttcaagtcttattactagagaartacattttataaggctatagctaccatagatagtgattctgctgatggggaatctggggacagtaaattgagaaacttctggagggattcattattttatttawtttatttatttatttatttatttatttatttattatgagatggagtctcactctgtctcccaggctggagtgtagtggcgtgatcttggctcactgcaacctcttcctcccgggttcaagcaattctcctgcctcagcctcctgagtagttgggactacaggcacgtgccacgatgcccagctaattttttgtattttagtagagacagggtttcaccatgttggccaggatggtcttgatctcctgacctcatgatctgccgacctcagcctcccaaagtgctgggattacaggcatgagccacctcgcccggccaggattcaccattctaaatgccattgagaatattcaaaattcatgggaggtcaaaatattaacattaacaagtgtttggaagaagttggtccaaccctcctacatgatttctaggagttcaagacttgagtggagaagtcactgcagatgtggtataaatagcaagagaactaaaattagaagtggagtctgaagatgtgactgaattgctgccatcccctgataaaacttgatgagctgcttcttatgaatgagcaaagaaagtggttccttgagatggaatctacacctggtgaagataatgtgaacattgttgaaataacaaaggatttagaatattagctgataaagcagtggcagtgtttgagaaaatttactgcaatcttgaaagaagttctgctctgggtaaaatgctatcaaacagcatcacatactgcagagaaatattttatgaaaggaagggtcaaatgttgcctctacccccaaccctccacatatggggagtaacagcaggacactgggcctaaagaaaaatcatgcccttcatttgtggaaggatcagctgaccattaagaatgttgccaaggcttgcaaatgtgatataccagtgggaaagcaaatgcaagcagcatgaaatagcagtatagtaagggccagatcaaaagctgtgaaaggaagtgtggttaatataaatacatcctatctttcacaccaatcatgatttttcagaatatgagctcatgaacagctgaaggagaagattcttttctgctttatgaccaactttattgctttactatcttacaagttccatattttcttgaattttgccaatggaggttttacctaacatggcaccttttaggaatgtaatcatccccactctcagttggtgagagattactgtaacaaattctgaaacactcacatagattcttatgaatcatgtttttttcccccctgtcttatggtgctgaatgaatcatgtttaactgagaattagctaaggggagagtagagcagtaaggacatakatttatctctatttgtgttttcatttactacttttatcaagaataataacattttacctcttttttaaataccactctctagaaagtaaattcaggagtaagaaactccttacctattcagcataatccaatttattgttaattccattgtctattaacayagtaaatagtgtgttggcttgtaacacttccctcatagaagtaacaaaccaacttcaaatttaagaatgatgcctcttttttcttgagaaagacacctgttccagtgcatagaaatggctagggaagatctatatctatatttagaaagatataatttcaataaatcacagactctcaggattaaaaggaatactgaatgttattgagtctttgaccaaaggcagtttggattagaaagaatgtttgctgtggaattagatgtcctggatcaaatcacagctttaccacttaatgacagcacatttcgggtgatttatttaacctctctgagccttggttttctcatgtataaaaaagggatagtgtctacattatagagttggggagaggattggagataagctacgtaaaggaactaggacagacaccataaacattttagaaatgactgtgtttgttgtcatcataattatctcaccaagtggtcattgaacttatttaaacattctggtgacataggattcactaactgcttcagttgtcatcccatgttcagagaacccttcagtgttacgtcttccctttactgagcctaaatattttcccctagaacttttatccacgattctcattcttgccagtgaggctgcacagattaagtctacgtaactaaattaagtgtgaaactagaatggaatatatgcttcaagagtggtgtgaccagtgtagatactatagatttctcatcacaatttaggatcaaactatcttccttttgctagtaaccacccttttgatacctactgaatttgttgttcataaagcctattcttcactrgagtttgggtcctccatgctgtaccagtcacaattttgagggagagactcaagtgcagggccttacaatttaacttgtatcatatttatcaataaatgttaaattccctatgatayaacaaatataatttggctatttaatcagttataatgtcgtatggcatacccataagttactgtgactgacaagtggttaagaacctggtgcattttatttaacaaacactttatatagtatttaatatataccagctactgttctaggtgctttgcatatatcaactcatgtaattctcataaacctgtagtaagtactataattattctcagataaggaaactgaggcacagagaagttaagtaactcattcaaggtcaaatagtaagtcctaaagccaggattgtacctgggctatctaattctagaacctgtattcgtactcattatgctctgttcccaaatttttctgttacatagattgttatggctttttttttttttttttttgacagggtcttgctctctcacccaggctggagtagagtgacaatgaccactgcagcctccacctcctaggctcaagtgatcctcctgcttcagcacccccacaccaggcaacataacaagacccccatctctacaaaaaattaaaaaagaattatcagggtatggtgacccatgcatgtagtcccagctacttgggaagctgaggtgggatgatcacttgagcccacgagtttgaggctgcagtgggccataactgtaccattgcactccagcctgggcaacagagtgagatcctatctcagaaaaaaaaaaaaatatggctgcagtgggccgtgtttgtgtgggactgtttctgggctgtttattctgttccactgatcttaagtgtctaccctttcaccaatactagattatgttgattaatctagctttatagtacaacctaaaatcaggtagtttgattcttcaaccttatttttctttttcaaacttattttgacttttctaatgattttaaatttctatattttagaataaacttgctatatttaaaaattttaaatcataatttatataaaatttaaaatacaatttaaaattgtattaattttaagatcagcttgctatattttacaaatttgttttgtgagttctgttgagatatttagtggaattgaattaaactatagtgtcatgggttgagtcttcagttttctttctttccagagatgagagtcttgctatgttacccaggctagaatgcagtggctattcacaggcatgattgtgctactatcagcatgggaattgtgacctgctcccttttctacctgggctggtccacccctccttagacaacctggagtaccccacccctaggaggtcaccatattgatgccaaacttagtgccaacacccaagctgcatagtgaactacagyccagagctcctgggctcaagcacttctcctccctcagactcctgagtacctggtattcttccagttctgaacatagtatatctctccattatttatagttagatcttctttgattgctttcattaatgttttgtagttttcagcatacatattctattcatgttttgttaaattcgtaccttagtatttcagtatttttggagctattgtaaatggtattgtttaaaaaatattagtttccagttgttcattgctggtatatggatgtaaaattttgaatgtgtgtttaccttttgtcctctgaccttactaaagtcagttctaggaggttttttttaaatcacttatttggtttcctatgtaaacaatcatgtcatctgcaaatagagacatttttatttcttctttccctatctgtatgtcttttatcttcttgccttattacactgaatgaaattccaatataatgtcaaatagcaatggtgagtgaagacattcttaccttgttcctgaccttaatgggtagaattcagtctttcaccacataatatattagatgttggctttttgtacatgacctttatgaggttgtgaaatccccttctaccctcgtctgctgagaattttttttttttaatctgaatggatgttgaagtctgtcaaatgttctttctctctctctttctttctttccttttttttttttttttttttgatagagtcttgctctgtagcccaggctggagtgcagtggcatgatctcagctcactgccacctccgcctcctaggttcaagcaattctgcttcatccttctgagtagctgggactacagkcatgtgccaccacacccggctaatttttgtagagatagggtttcaccatgtttgccaggctgctctcgaactcctgacctcaggtgatctgcctgccttagcctcccaaagtgctgggattacaagcatgagccaccaaacccagcctgttaaatgctttttctgtatcaagtggtatggtcatgtagcttttcctctttactgtagtaatatggtggattacattgattgatcttttgaatattgatccagctttgcattttcaagataaacctcattttggcatggtgtataatatttttatatactgatggattcaatttgttaatattttgttgaagatttttgtgtcaaggtccaaggcagatattgtatggttttttcttgtcctgtctttgtctggctttggtatcaataatgctgattttataaaaataaattggtaaatgttctctcctcttctattttctggaaagaatttgtgtagaattggtattaattcaccttaaaatgattgatagaatttgacagtgtaaccatctgggcttggaaaattttttgagaggttttaaactatgaatttaatttctttacaggtataggattcttcaggttatttaaatttgcttatgtgagttttgatggtttggttttgaggaattagtctatttcacataggttgtcatatttatgtgtgttgagttgttcgtagtatttccttatttttagaataccattgcatttgtagtgatatcttctctttcattcctgatatggtaaattgtgtcttttcttcgtaatcttgcaagagatttgtgaatttcattggtcttaaagaaccagttttttgtttcattaatttttctctattgatttctgttttcaatttcattcatttctgctcctagcttttaaaaattttcttccttctgcttgatttgggtttattttattrttattaactttttagcttcttaaagatcagtgacgtgagaactttcttcttttttaatgtcaatatttcatgttataaatataaatttccctctaaggattgctttagctgaatcctattccacaaattttcatatgttgtgttttcattttcattcagttcaaaatattttttccttttggcttcctctttgacccatggattacttagaagtataatgtttataaatgtttggagattttacttttatttatttctaagtttattctattatgattagagagcatattttatatgatttcaattctttttttaggctggattatgttttgatgaatgtgctgtgccatgtacattttaaagagtatgtattctgctattgttgggtggagtattttataaatacctattaggtacgkttgggttgatggtatggttcaatttttctatatttttgctgattttctgtttactacttccatccatcactgagagaggagtattgatgtttccaaatataattgtagatttgtctgtttctcttttcaattctatcaggttatgattcacacattttataatgcccttctttatctccagtaattttctttgctctgaagtctactttgtctgatagtaayataactattctcgcttccttttggttagtgttcacatggcatatatttttctatttttaacatacctatataaatgtattttgaattgagttcttttttacaacacatacgtagctcagtcatgtttttgcgtacattttaccaacctgttcagtgggcatatttaggtgtttttccatttaatgtaataattgatatattcagatttaggcctaccattttatttatttgttttctatttgtttcctttattttctttcatgtatctgttttctcttttctaccttcttttggggcatttgtatattttttaaaattccatatttttgttagtttttgactatgtgtccttgttaaaaaagtttttaatgattgggatcaaaatataaatatttaattttacacaacctacttagaatcaatattttatcacttcaagggggatatagaaatgttataatcatttagatcctattaccttccctctttatgttgcagttgtcttatgtattgcatttacatacactgaaaaccccattaatgttatcagttttgctttcaaacatgaaacaaattttaaggaacttaagaggtgaattgtttatttacctagatatttaccatttctgtttttccttctttattccttgtttttgttttgttttgttttgttttcttggagtcggggtcttgctctgtcaccaaggctggagagcagtggcacaatcatagcccactgtaacctcaaactcctgggctaaaagtgatcctcccacctcagcttccgagtcgctaagactaccaccatgcctggctcctcctttattcttgatgtttcaggttaccttatgatgtcatttccgtctgtctgaagaacttccattagtaattctttagaccaaggtatgctgacaacaaattatctttgttttcctcccccaagaatgtgtttatttcaaatttaatcatgaaggatatttgtgctaaatatagaattctgggttgacaggtttttacttttagccctttaagttgttctacttcattctagcctccgtgrtttctgatgagaaatctgcagtcattcacactgtttttcccctgtaaataatgtatcatttttttctaccagttttcaagaatttttcttgtttcagtttttagcagtttgattatgatgtgtttgggcatgagtttctttggttataccctgtttggtgtctgagtttcttgaatctgtaagtttatgttttttaccaaatttaagaaatttttagttattctttcaaatatttggtactacgttgtattctttcctttcttcttctggatctccgatatcataaatgttagatattttggtggtgtcccaccagtccctcaggcacagcttttttcccccaatactttttctctccattgttcacattggataatttctgttgcctcatcttcaaattcactgactgtttcctctctcatctccattctgtaattgaacctatacaattagttctttatttttgttattatattttttagttctgaatttcaatttcatttttttattattttttgcatttctttcaggaactttttaatcttacgttctggtacacttttctaataactgttttaaagctatagtcagctaattccagcatctatagcatcctggcattgtcctctattgtcttttcctaggtgagctgagattttcctggttcttgtatgctgactagttttgaattgtatcccagacatttaatatattataagactctgggttttgtttaaatcatatggagaatactgatatttttgttttggtgggtaatagatctgttttggttcaagtcaaaagttccagccaaccttctgtcagttgtagtttcaatgtcaattctgttttcaaaaagaatattttgctttccatgctatttggatctatcctctatgtgtactaccagtcagtagtggtagggtggtggacttgtgtggtagactctcctttagttcagtctcaaagtctttttggtacatatgctgtttgtgatcagatccatccttgtgcaacttgaaggtgagtctaggaggttataatcaacttaactactacttctctgagttcctccctcttcatggtctctagtactttcttattcctgggacttcctctttcagtcccacagccagaaatctagtgctttagttaccctgctgtggtatgtactttctggggctacactatgtccagggctcagcagtggaaggacagagaagaaaaaatcaactggtgtttatcccaccctcctgaggccccaacttctccatggaagaaggttcccctccctcagagatattggagcttgtcaccacctgctgacattgcagtcattaccactgcttggttggcaggatttctaggwgcctggggcactagagaatggagaacaaaagagaagaaattggcagatttctcccacactctctgagtattaggagatgcttttcctgctccttgagccagaactagagggcttctcctggggctctgtctgtctgtgcgtattctgagtttcagactgccttatttctagactgaggttctgatagggaaaaaacaaaaacagaaaactcactgcttgttcagtagtactttaaattctagtctttttccccaattcacttggtactttttatctttcagtgtccccaagtagctgtttcatgcattctatctaggttttataactatatttaatgaaaaagacagggtgggctgggcgcggtggctcacgcccttaatcccaacagtttagaaggccgaggtggtcggatcacctgaggtcaggagttcaagaccagcctggccaacatgttgaaacccagtctcgactaaaaatacaacaattagctgggcgtggtggtgcacacctgtagcctcagattgtgccactgcagtccaacctgggtgacagagtgagactctatctcaaaaaaaaaaaaaaaaaaaaaaaaaaagacaaggtggagtgtgcttactccatcttacctagagctggaatggaacattgtttttaaatggctgttatggattgaatgtttttgtatcctcaaaatgcacaagttgaagctctaaccctgaaagtaatggtatttagcaatgaggcctttgagaggtaattaggattagatgaggtcatgagagtggggcatcatgatgggattagtgcccttgtaagaggagacaccaaagagctcattcatattctctctctctctctctctctctcctttttgtgaggacatagcaagaaggcagctgtctgcaagccagaaagagaggcctcaccaggagttaaatcagctggcaccttgattcgggacttcccagcctctcaaactgtgagaaagtagatttctgctgttttcgccattcagtctatggtattttgttttggcaccttgagcagacaaatacaattgccaacatattcatgaaaaaattcttggcactacatattgcctcattcttcccaattcagtcactacttttctttataattctacctgtacatgttttctgcaagatttataacaaattatacttagctgaatttctagacagaaatagaaacaaatcccccaacactagatggatagctttagagatccaataattttgtgccatgtagttgtaacacttcaaatatatatattttggtatgtcttttttgaattaatttattgcttaattgtttggtcttcagtcaccttgactaaatttgcctgatgtttctctgtaaataatctcaaggctaggtgacctaggtcctgtttgggccaattatttttatttttatctctgagaagcttgcctcaaagagaacttatggttaggagccaacagtccatttctttcacatacatcctgttaaactataagaaacgaggatcgtattgaataatataaatgagtagaaggaagataaagcaatttgcttgtcttctgcagatagtagttttaaataaatttttatctaatagtaaacagaacatgagtaattcttgaccatcaagagaaggacaagtccttataattggagtggaactggactagaactaggctmttgtctcaagtgggacgaagactctagaatagatcagtgagctttgtacctaaggcaatttcatgttatgctctattgctttccaccaaatgggcttctttctttcttcccccccgccgcccccagtaatcttctccatctcatccattccctcttctttttctcttcctcacagtttttatatctgtgaacctggatgaattagtagatttaaagaagtaatgggattgtaaaaagctgctgatctttatcctctttaaaaatctgtcaacacctctcatcttttccttgtatgctgccttcctattcctgttccacctttccatattgtccttcacttcatggccaggctttagccctgccagtggtggccagagacatgaattaactctgtttgagtcatttaggaataaaaagattattactgacctcaattctagaataaaaatactgtagtttttctctcccacactataattttactaaaatgttacattgttccagagttaatcaggatactctgtgaaattaaaccttaattgtgatttggctacttccatcttagagaaaattaaaagagaaatattagaaaatgataatttcaggctggatgcagtggctcatgcctataatcccaacacttcgtgatgacaaggcgggaagattgcttgaaaccaaaggtttgagatgagcctgggcaacatagtgagaccctgtctctaaaaataaaagtaaaaaattagccgggtgttgtggtgtgcccctgtagtcctagctacttgaaggctgaggtgggaggatcacttgagcccaggaggttgaggctgcagtgagccatgattgcgccattgcactccagcctaggtgacagagtgagaccctatctctgaaaaagaaaaaagaaaatgataatttcatcagaacttgtttgaaagagaaacgttagtttcttgaacaaaattaggagtgcacatttgagggaattttggttatttctactgcaactgaggaaacaggtatattactatgtttgatttgtaattaactaggcctcatagcccttttttcaccccttcagggaacagaatatttcttaagtttgacatttcctctgttgatgttccctttggaaaacataaaatataaatagtgattaaggtctttccagatagtgtcccataccaaagtgtagaaagaacatacataatgtcccataccaaagcgtagaaagaacataacatgacatgataatgtaaagtaatatatgatgatatttttatctcagggctatattatatccagctgataagttgtatttgtatgtttgtttataattgaaaaagtatgtagtcttttagtcacggagcttatgagtacttaactgagcatctctctgatacgtaaaaaaactgctagcatgagaagtacaaaggtacaaagatttacctagtaatttttttttttaatctctaagaaacttcagtggaagcaggactgcttccactgtagtgaaagctaagatgtagttaggagttgtcaagctttacactagagcctatatgaagttttgattctaagtgttaatgtaccttctgacaactgtgaatgaaccttgttcctggggagcgcgttctggttttctctttgcacagttaagctgagactagcatcattctagtttgcaggtgacattctctgggaagctagtctatgggggagatgacatcttctgaacctagtccccacagagaactttgaatgagtggaatcaagaggttgcctgcattcttgctcatgtcacaatgctggacatgtgacttcagagaagcatgtgccaggtcaatatgattgggctgttctcacaatacaaggccttgaccatagagtgattcagaggcaaatgcagccttcttagactcttaaccaaaacattggcatgacataaaattataattaataaaagatatacagttatttcaaaagtaccgttttattgggacatctcaaaggactaagaaaatgtttattttcttatctcctatcttttgttaatagctgttcatcgctcatcagcctttactgaaagcttatcatgtatcaaacaatatgccaggtgtcagagagggcagcaaagagagtacaattgagttagatagagtacctgcactcaataataataacagctaacacttacatagtgctttctgcgtgccaggcttgtcctaagtgattttacacacacacacacacacacacacacacacacacacacamacacactccctcactcagtccttataaaaacccactgataggccgggtgcggtggctcatacctgtaatcccagcaactttgggaggctgaagcaggcagatcacttgaggtcaggagttcgagatcaccctggccaacatggtgaaacctcatctctactaaaaatacaaaaattaaccaagcatggtggcaggtgcctgtaatcctagctactcaagaggctgagacaggaaaatcacttgaacctggtaggtggatgttgcagtgtgccgagatcgtgccaccacactccagcctgagcaacagagtgagactctatctaaaaaaaaaaaaaaaaaaattaaaaacccaatgaggtggctactgttatcatccccattttacggatgaggacatgggtacatagagattaagtaacttgccaaagatctcacaactggtaagtggcagagcaaaatttgaaaacaaacaatctggttccagaaactgtacttttaacctcatgatagcttcctgagsaatttatgatctgagtatatatagtaagtacctcccctttcagggtaaggcagtaggtaatggtgaacagggaagcaaaaggtgactcaggttgagtaaacaacaccaagcatatctgactcaaggaatgcttcagaggccmggggtgcatgcctgtaatcccagcaccttggaaggctgacacaggaggatcactggagcccaagttcaagaccagcctgcacaacatgacaaaaccctctctttacagaaaataccaaaattaggtgggctttgtggcgcatgcctgtagttccagctacttgggaggctgagagttgggagaatcacttgagcctgggaggtcgaggctgcagtgagctgtgatcgtgccactgcactccatcctaggcaatagagtgagactctgtctcaaaaaaaaaaaaaaaagaaaaagaaaaagaagaaaaaaaggaatgcttcagtctgctccaaagaaaagaatggagtaatgtgaagtattaaatgtagcaagatgccactgcagtagctcacacctgtaatcccagcactttgggaggctgagatgggaggatcacttgagcccaggagttcaagaccagcctgggcaacatagtgagaccccatctcttaaaaaaataataaaaagtaaataaaaataaatgtagcaagaaattagaaatctttatgaacagatggcaatccagtttaatgttatgtgcatggccacaacccttattccactacatcctcctttcacatatatattatgaaggttaatgaatacaatcattgtgataacatttcttttctccctttctccctcctctggtagagtactcacataaaggctgcattcacaattgaggttagaacttgtctaggcatgtctagtgagcaatgggaggagtctgctaggaaagtactttcagaatactggaaaccttagggagaaaactcctcctgaaggtagaaaattgcagaaattataataaagcctcagctgctataggagaaggatagctttagtacttttggtagggaagcagtgtagcagcaaattttaagagatatatgagaggtatttaagtggatcatgcctgtaggtcatttagtagtagtatgcaatcaataaatattcattattacttgtgtgacagtgctyaccccacactgtcctttatagaaacatatttgcagagacctggggagaaaatgcaaacatgccagagggcttcataagaccatacataccctttaatgactccattaartgttatcaacaaatgttagtaataataaatatagttattatcattattgttcttattacagcctcattttatgttattactgattttttaatggggtcagtgagaaaataagacttcattctcaaaatattcaaatgtctagtcagatcctggcagcagctgcagcggctctccttgccatctccttttcacttctggaaacatgggctcccatgtggctgtctttgatgatgtcatcaaggtgttcagtgacatgaaagtgtgcaagtcttcaacactagaaaaggtgaagaagcgcaagaagttgctgctcttctgcctgagtgagtacaagaagtacatcatccttgcgraggccaagaagatcctggtaagtaatgtggacsaaaccattgatgatccctatgccacytttgtcaagatgctgacagtaaggactgccgctacgccccytatgaygccaccaaggacagcaagaagaaggacctggtgtttatcttctgggcctctgagtctgcatccattaagagcaaaatgatctatgccagctccaaagacgtcatcaagaagcagctaggggtcagcactgtcgtcttcttggagggcaaactttgtgatcccctccagcgcccttcctggagaatctactagtcccagacctgccctcagggattgcaggctgcccccttcctgccagactggagggcctgggggaatcccagcagagggaaggcactcccttcaccccaattgccaaacagccccccaactccctggattttcctcctctctccatccctgacagttctggccttcccaaactgcttggatcttctgattcctcttgggttgaagcagaccaagttctcccaggaaccccagttggggaaggcctatatatatattttaaaaacaaccccactctccacctgttcctccaccttcccatgctacaacttctaaccacaacagtgactctgtgcctgtctgtttagttctgtgtataaatggaatgttgtgaagatggccccttcccatgccagctggttcctctcccttggttatggccgctaatggaaaccggactagtgagcgacctttaatttttaaaaaaagaaaatacaataaaataatactcaaatgtttaagcagatttcccaaaacagagtagaatagaattcatatgaataagcaaacaatttaattgttactactggcattatgttatggattttgctttcctacagaaaataactccacaactgattttattagtatagaattaatttcttgctaagagtcatttttgcttatctcaccattggatatttgcaaagtcactaatatttcttttatccatcattcatatgtaagtaaatatgtaccttacttcctctttccaggcaagtagaggttccaaatatagccatgtgtcacataacagggatttgttctgataaacgaatccatagacaattttgtctttgtgcaaacatgataaagtgtacttgcacaaacctagatggtgtagcccactacacacctaagctatgtggtatagcctgttgcttctaggctacaaacatgtacagcatgttactatactgagtactgtaggcaagtgtaacataatggtcagtatttgtgtatctaaacatacctaaatatagaaaaggtacagtaaaaatatggtataaaagataaatggtatacctgtataaggcatttaccatgaatggagcttgcaggactggaagttgctctgggtgagtcaatgagtgagtggtgagtcactgtgaaagcctaggacattattgtacactactgtaaactgcataaacactgcacactaggctacaatttatgaaaaaatttcttcaataataagctattaaataacataaagttgtaaataataataaattatgattacatatcaacaatattttctttatatcctataagcttttttctatttttaaattaatttcttaaaattttttaaacttattttgttaaaaactaagacacaaacacccatgtaagcacaggcctacacatggtgaggatcatcagtatcggtgtcttccacatccacattttgtccactggaagctcttcagagttagtaacatacacggagctgtcgtctgctgtgatattgaagctgttttctggaatacctcctgaagaacctgcctgaggctgttttacagttaactaaaaaaaaataagtagaaggagtacactctaaaataacaattaaaagtatggtatagtaaatacataaagtggtaacagttgtttattatcattatcaagtattacatagtgtacataattgaatgtgctatacttttatatgactggtagtgcagtaagtttgcttgcaccagcatcaccgcaaactgtgagtaatgcattactccatgacgttaggatggctaggttcacaaggcgataggaatttttcagctccattataatcatgggactgccttggtatatgcgggctgttgttgacagaaacgtcattatgtcacgcaagactagataatgagggaatccttttcctcctaattggttatttgagctgtttaatctcccttccactcccagcaagtgtagtcattaaaataccttacataactatggagccttcatgattagaactgcgatatgatgatgttacatacccactcagggttctctgcttcagggccaaagtttgggcaatgtcacacctattgtactttttggatgggtttctctgtcatgagaggaatgggaaatgaaagaaggatgagcccaatgtaattctgagaatcagatttaactagtatctgataaagcttgcaaaatttccatgttgataagttgatctaatttatttgtttaacctgctgtataatgttttatcatatgaaaatatcacatttgatttatctatatggaacatttagattctaattttttgctgttttaaataatatttccatgaatttccctatatgtttctgctttcaatatatgaaagttttgctagagtaggggtctttaaacttttttgttagcttatcccacaaacaatttggaaaaacttttcctctatacacatggtagagttagaattgaacttttttattctaagtttaagtaggtggaaaggaagtaatttcctagttatgtaacttttttttttttttttttggagacagagtttttgctcttgttgcccaggctggagtacgatggcgcaatcttggctcactgcaacctccacctcccgggttcatgcgattctctcctgcctcagtctcccgagtagctaggattacaaacacccgccaccacgccctgctaattttttttttttttgtatttttagtagagacagggtttcacctgtatttttagtagagacgggttttcaccatgttggccaggctggtctcgaactcctgacctcaggtgatccacccgcctcggcctcccaaagtgttgggagtacaggcgtgagccaccatgcctggcctatgtaacatttaaagtagaattcttaagtgtatccaatattcataaataccatagtaatttgttgccattgcccatcaaaacattaaaaaaacgaacaagcattttttacaatgggaaattttacatcattcttttttctctttgaacttgaattttttttccaattctgatacagatttttatttggatgtaatatatattatgtgtgaatatcttttattgatgatgactgtatcatatttccatgcaacaaattttataaaaatttaaattgtgttaaattttctggaccataatgctcctcagtgttaaaaattattccaaattatcattaatatttttgtataatcaaataaatacttttaaattttgataattattaaatataaaaaaatcaactgggcttaaaaaattggtttatatatcacaaatgaattttatatattcctagaaggagacaagttcagcattagatcatttatccctagtttttgcttttatgttgtaaacattgagtaatattattcacataagtagatggtgagtgaaaggaagtgttttagcagtgttactcatttatttgaaagcttcccaaattatatgtcatacatcacttagtgatcttatttgtaatgatttttcaatgaatagtttcaataggttctccttcaatttaccagaaaaaaaattaatgttaaacaggttaacttttaaaagggtttgttggtaaaattattcagctacttagcagcaatatcattattgcagatgatctctttagctccttgcaggtttttacactttcaggcagtacatcgtttcagcattcagatggagaggggtattctgttctcttttaaagtgggataaagggcactgtgaaaggggaaatggggacaaggaactactaggtccacttgactacactagttctgaggcacatcagatttaggagaaagtgtatatggaagttatggaattgattctcttgaaactaagaaccttatttctcctatttgaagaccactactctgatgtttatacccaaaagtggaattgcttgtgttggagtctcctaagctgtgtaactgtttcactgaagtcacatcactgaggacattgctgtgcctctcaaggactcaggaacagtccctctgtccatatatgtaagtcatagcaatcttctatatttgggaaaaatcccttggtcgccttatttaaataactggtgagcaatgagtagtaatccatcagtgttctatgagacaccaaatttctttctataatgtggcttttgacaacttctggaagtatttttattcatgattctcacatttctttctttaaagggcatcattagtctaccatcaaccaagatgttatacaaagacagcatcgtaattcatttacattgagtgccctaaagcacaaatgcctttaaggccttctttactctctattaattgcaaaataaacagatgtctactggagaaggttattagaaataatttgtgcagtttgggagaactaggggtcaggattccttgactcagcttctgaaacaaactcaagcccactaaaccaccaaggtaactacatccagaaatctgcaaaccagaaaatgtttgccctgaataaggtaaaggacaaaaaagaataagggcaaacattttctggtttgcagatttctggatgtagttgcaaaggacagtacatttcaaaaacagagtaatggccattctcaagcaggactcagtttaattctacttgaaaagagtgagaacatttaatgtgccaaattcaagtcataaggaaaagttgaccagttaataggacaaatgccacaacattgtaaaataaacaagatttgaaatgcagaaaatcctattttacaatgaacaagtctacaagaacacaagaataaagcacaccttaattaagtcctccctcttacttgtttcaacaggtgaggtaggaaaacagtggtcctatgagtggcagcagccaatggcctggggctgcaccctgggagctagccaagacaaagatgccatgtccagaaaagaaatttcagaaatgacttatggctcagagccatgtatgtaaatgaggttattttttttttctctgaaaatggtctgtttctatccattagctttctcccagttccctgacttcataaaatttatgttaaggatttgaaatattcccagattaattttcaagtaccatgactttacttagagacttcatttttctttagggttccctgcaatgcaaacctgtaccttctttaataaatgtaaatatttaagccacgtgaggtggctcacacctgtagtcccagcactttgggaagctgaagcaggtggattacttgaggttcagagttcaagaccagcctggccaatatggtgaagccctgtctctactataaatacaaaaattagcctggcatagtggtgtgtgcctgtagtcccagctacttgggaggctgaggcagtagaatcgcttgaacccgggaggcagaggttacagtgagccaagactgccccactgcactccagtctgggcactccgtctcaaaaaagaaaaaaaaaaaaagtagtacatttagtacaattaagtaacaaaaatctacaaaagggaactgttctattatatttagaaaagataaaatttccctcctaagctagttctgacattaggtttttctatggtattctttctgaagttcctacaagagagaaaaatctaaatcacaataggagtattttttgaacttattctattgatcttaaaacattgtttaataagagacttataactgggcagggcctagaactgctttattttattatttagtgtaaccatgaaattaaacagtggtctaccattggggaccaaggtcagattcaaaaagatttaaatataaattaaagctactacacatttatgtggttgaaaaatcaaaaggtacaaaacaacagcatcacatatgatatcacttgtggcccttgcagttgtgtaacttggcagtcctgtatatatcaccttcccaggggatctctcagccatatcagtttcttgtatattaataaggggaatcttgaaagatagaggtcaagaggagaaaaatagggattggaagaaagaatggcaagagagggcaggagaaaggagagtggaacgatggacgaaaagggaaagactgaggccttatacaaaggattggcaactttctcccagccctctcttgcagttgtccttggtgtgtgtgtgtatatttgtacatgaatagaagaggaagaaatggaaagctggtgggggcggggggaagccacttatctggggaaggatagtggtgagccctggagaatttttaacttagtgcatgcattacttgaataaagttccttgtattgccttttctgatatcatttttatctagactcatccaagaatatgttagtattttgagatttagcttttgggaaaaaattcaaagctaataagcataaatatttgtgcaagaaagagaagcagatatgcagacctctaccacctcttaccagagacaaactaacctttctccagcacacattggcctgatgaaatctagaattaagctttctctcagcactgacctgcctcagactgcaaagaggttttctaactggttttgagccatgatgaaggtgctgactgtaactgcatggcagcattttcattgactccaactcttcagcaggtggcagcgttctccttgctccatgtgggtttggtgtttccttcctttcaaaagagcacgggcctcacagtcccttttctgtctgcggtccacatgtaacggctgcctcctttatattcttgtctgaaagacactctcccagtaatcttaggaactaaggaggagaaacaaatttgcaacatgtggctattcatgttttaatgtttgatccttaaggtatttagcgtcatgggctaatttcaaggcacttaaggttagagagtgaacatcgggaatcattcattcacttatccttgtttttctccatcccaaaccctatttatcatctctatttaagcaatctccttgttttctttgttcactcctttccaagccttgaaaatgtcattaaaaaccatctctagtcaaatttctaactaactcatttaggtttctatacaagctagactttcttaccatctttattcactgatagggtatatcagggaattctccgggctccaactgaggatccctcactgagttgctgtgtaatctggggcatgtaaaccctttgcgcctcagtttcttcatttgtaaaatgagattggtaaactagcgggtctatgaagtttttttctagctcttatgcactggatgataaagcagt

SEQ ID NO: 97753 - DNA, 16167 bp, Homo sapiens
cacagacagctcaggtgggtgctgaccatccccaagactcctgctggggcagactagagagaaggtccagactttgaaggaatgggacctcacccctccccgtgttgcttgcagcaaggcccagaagcaccgaggatcacttgaaatagcagaccagctgcaggggctgagccttcaggagatgcctggagatgtccccctggcccgcatccagcgcctcttttccttcagggctttggaatctggccacttcccccagcctgaaaaggagagtttccaggagcgcctggctctgatccccagtggtatgcgggcagccttctggccggctcctctgtcctcttctgcatcttcttacttgggagctgggtgaaggagttttaggcattggttagtttacatagatttatgacccttatgtcataccttttcacctgttagcatcttacatcaggaaggtttgttgttttttttaaacctcaactttgaattaccagcaaattcagtgtctttcctcagaggtgagttcagatgactggggtcttctgtgctaacatgaaacatattcacatgatttgagtgcctcactttgttagttgctgtgagggacacaaagtacaagtcatggtctctgtgcacagggagctattagagcaagggagagcaccttgacctctagtgaccagggaaggcttcttgatgctggcttgagtgatggataggaattgagtgcccaagacagggaagggaattcctttaacagctgaatgagtctggctgtatcctgtgtgtcaggggtgactgtgtgtgtgttggccctggccaccctccagcccggaaccgtgggcaacaccctcctgctgacccggctggaaaaggacagtcccccagtcagtgtgcagattcccactggccagaacaaggtaggattcctgggccatggagcaaagttgggctggattgggcttcgggtcaagctgctcacattctgtgttgagggagggagagatggtgatcacgtggacaagcagagctctcacagccccatctcccaaagcttcatctgcgttcagtcctgaatgagtttgatgccatccagaaggcacagaaagagaacagcagctgtactgacaagcgagaatggtggacagggcggctggcactggaccacaggatggaggtgtgtgcttctggggtggggtcaggcctgctctaggaatgacccggggggtcccagtgacttctctaccagacggcctgggtcagtgctaaagccacttcaaatcccttctggaagtgtagacctaaatttaaaaatatgtcacctggggagaacttcagagcccagaacttgaagaatatatgggaatggatatttaaagatacgcagaaaaaaaacgacttaaacccaactatcagcttcccagcagaaagatacgtaagacagacatgcacattggaaaacgcattttctcatctccaaaatgtcagtgcctgtgagaaagaagcttggtttcctctctgactgaagggtctgccctctgcattcaggttctcatcgcttccctagagaagtctgtgctgggctgctggaaggggctgctgctgccgtccagtgaggagcccggccctgcccaggaggcctcccgcctacaggagctgctacaggactgtggctggaaatatcctgaccgcactctgctgaaagtgagtgaggaaagcagggaagggggccaggcccagtggcttgcacctgtaatcccagcactttgggaggccaaggcagatggattgcttgagctcaggagctcgagaccagcctggccaacatggtgaaaccctgtctctacgaaaatacaaaaattagctgggcgtggtggcaggcacctgtaattccagcttctcgggaggctgtagcaggagaattgcttgaacctgggaggcggaggttgcagtgagctgagatcgccgcactccagcctgggtgacagagtgagactccatctcaaaaaaaaaaaaaaggataggccccttggcttacgcctataatcccagcactttgggaggccgaggcaggtgggtcacaaggtcaagaggtgaagaccatcctggccaacagggtgaaaccccatctctactaaaaatacaaaaattagctgggcttggtggcacatgcctgtagtccgagctactcaggaggctgaggcaggagaatcgcttgaacccgggaggtggaggttgcagtgagctgagattgcgccactgcactccagcctgggcgacagagcaagactctgtcaaaaaaaaaagaaaacagggaaagggaagaaactggacttaatcctttcccagcagctatcatgaatgaagatggtgctcaccaccactgtttccctgcagatcatgctcagtggtgccggtgccctcacccctcaggacattcaggccctggcctacgggctgtgcccaacccagccagagcgagcccaggagctcctgaatgaggcagtaggacgtctacagggcctgacagtaccaagcaatagccaccttgtcttggtcctagacaaggtaaggagctggggcagaggggcagtgtctagtggggagtgaataccaactcatccccatgccccttctgacttctgcatatacctggctggggacagtaacctcttagtgctttttgcccaggacttgcagaagctgccgtgggaaagcatgcccagcctccaagcactgcctgtcacccggctgccctccttccgcttcctactcagctactccatcatcaaagaggtggggttcagggcgtagtgtctggggatgactggcgactggggaagacgtcaacaaagaagggcagagaaacctgagaagataggagagggtcctaggaatggctcagacatggaaaggggctgagattgttagagcttgggcctcttggtgagacaagcatcctaatcgccagtgtctcctcctcagtatggggcctcgccagtgctgagtcaaggggtggatccacgaagtaccttctatgtcctgaaccctcacaataacctgtcaagcacagaggagcaatttcgagccaatttcagcaggtcaggggcgcgaagacaagaagacgtgtggggaagggtagacaacatacaggggcaacaagccttttctccagaaacagctgttgcagcccaccttctatctaatgatccctctgctgtctttgccacctgacccctgccatgcatttccctattctcacacctgccttttccctgcagtgaagctggctggagaggagtggttggggaggtgccaagacctgaacaggtgcaggaagccctgacaaagcatgatttgtatatgtgagtgcttaaggcagggatgtggggagaggggcagtcctgaggatggtatcaccatgggttgctttgggacttgagagcctctgaagacacaggcagaggccaggtattactagctcaagactcatctcacctccttctgccttagctatgcagggcatggggctggtgcccgcttccttgatgggcaggctgtcctgcggctgagctgtcgggcagtggccctgctgtttggctgtagcagtgcggccctggctgtgcatggaaacctggagggggctggcatcgtgctcaagtacatcatggctggttggtgagtctccaagggcaagacccatcctagggcattaggactcctgccctcaccccaggttctttcccaggtctgaatcttgcctctcttgtgccccattttcctcctatcctagttagttccctggcatgcctggaccattaacccttagctcccttctgttcttctcttgtaaccaagggccaaaggagtttctcattggttcaatcctctccactcacccacccccaccaccaatggtgttttcctatgtattctgttttagagcccttactttgtatttcctccttttcttttcccagccccttgtttctgggtaatctctgggatgtgactgaccgcgacattgaccgctacacggaagctctgctgcaaggctggcttggagcaggcccaggggccccccttctctactatgtaaaccaggcccgccaagctccccgactcaagtatcttattggggctgcacctatagcctatggcttgcctgtctctctgcggtaaccccatggagctgtcttattgatgctagaagcctcataactgttctacctccaaggttagatttaatccttaggataactcttttaaagtgattttccccagtgttttatatgaaacatttccttttgatttaacctcagtataataaagatacatcatttaaaccctgttttgcgtagtttatctgagaacatttaaagacacggcatgactgcccccttcctactatgtggtactgtaagctgacaggaacaggttacagcagatcaagtttgagtgcttggggaagaaaggcaaagacacaggacaaagcctgctgggcctggctgggcctcagcagacaaatctggaggagaaaggggcatcaaaatgctaagtagagacaggcccaaggaagggtagtgatagaccctttgagagtgttttggccaggtaccatccgtccgtcctgtcttcctgccgcaggtatctttggagtggcactagtgttttgttttttgtttttgtttttttttgagacagagtcttgctctgttgcccatgctggagtgcagtggcgcaatctcggctcactgcaacctctgcctgctgggttcaagcgattctcctgcctcagcctcctgagtagctggaactacaggcacatgccgccacgtcccactaatttttgcatttttagtagagacagggtttcaccatattggccaggctggtctcgaactcctgaccttgtgatccaccctcctcagcctcccaaagtgctgggattacaggcgtgagccaccgcgcccagccatggcactagttttaatgcctcagttgccctgcctgcctcctaagtagatgttaaaggctactgctgtctgcccatgtacacctgttacacttaccaatgtgtaactttagcagtagagtctgtggatctgtggagttctagtgtggtttttctctccaattgttaagctcaagggaagcaagtatcttacactctcacgtatccctcacatacagcacatggtaaaaccttttttttttgagacagagtctagctctgttgctagtgtgcacaatcacagcctactgcagcctcaactctccagctcaagcgatcctcccacctcagcctcccatgtagctgggactacaggcgtgtgccaccagcccggctaatttttgtattttttgtggagacggggtgtcgccgtgttgcccaagctggtctcaaactcctgggctcaagcaatctgtccttctcggcctcccaaagtgctgggattgcaggcgtgagccaccatgcccggccaaaatattttattgattaatttgtgctgtacttggttgacaatggcgcttccttgctgttctcccaccacctcactggcaacgggtgataaaccctttttcagatcctactacgtgtcagcctacttccggctgggggaagatggttatagcgagaggggaagaattggttcagtgatgagaacatggttggttcctgccttcgacaagctttcaatctaatgcctgtttttttccaaggacaattcagaacggtctgacaagggattttttttttttcctgcctttcggcctcagaggccatctgggaaaaagagtttagaatttccctgccatttccatgccgtgctgggaggaacatttgaaatcgggcctggcggggtaccagcaggcagcaatagcaagcggggtggagaggagcagggccaggcccccgagccgtcgccatggcaatccagcctgctttccagtagcttataccacccacgtggagtagcatacactactttgtaatatcgtggttgtgtcgtgagaactttaagattttgcagttccttgtaggcaggagtcctgtttgctgctactttacaatactaggcttaagacattttatgaaatgaactcacasaacagtctctgagaggctcaagcccctccttcccttccgggacggaggatcatagagctgtctggcgcagcgaggcctcccggcgccaccgagacgcgcagaggacggctagagcgttgctcgccgagagacttcctcttygtyaagtcggccttcccaacatggcgcagtctattaacatcacggagctgaatctgccgcagctagaaatgctcaagaaccagctggaccaggtggggacgggccccagaggcacctctttmctgctctacatcccccttgcccacgcgtacttctcgcgcccggttccaagttggcagcctacctttcccaggcgaaacctctatccgatcccaggacctgccccctccccggccgcgctcctttctccccttagtcctctcattgacccgctatcccggtcctctgtaggaagtggagttcttgtccacgtccattgctcagctcaaagtggtacagaccaagtatgtggaagccaaggacwgtctgaacgtgctgaacaagagcaacgagggtatggggtaggcgggtgagggtaacctaaagtggcgaacctgcttctctcgtcccacctcctaacccagtttttcttacctgaaacgagaaaatccattacatatcgtataccgcttcatgaaccctttgcatgttgcctgcctagaattgaaawgtacaggacattcctctgctcctattgcccctgtttccgttcttttcacactgtctgtgggtgctgtgccctgttggaactctctttaacgtcttacgttggagccgctaaccttccccaggtgtttgtcttcattgctttcacagggaaagaattactcgtcccactgacgagttctgtatcctttccacargaacggctacctgctgccttctccctttctccttcactcccccaaaaagcggggagggggattgttttgattacttcagattaccctctcctcacaatgattttgaggatacccttttttttttctttcttttttgagacggaatttcgctctgtcgcccaggctggagcgcaatggtgagatcttggcttactgcaacctccgcctcccgagttcaagagattcttctgcctcagtctcccgagtagctgggactttaggtacgcgccaccacgaccggctaatttttgtattaatagtagagttgggggtttcaccatattggccaggctagtctcgaactcctgacctcgtgatccgcctgcctcggcctcccaaagtgctaggattacattacaggcgtgagccactgcccccggccaagaatactcttattacacactttgtagctcttttatctgacttcacaccaacatccagctaatgtcttgtgaacaccaaggagtatgtatagttgagatgtaatatttccctttgctgtttgagaacattaatatggagataaagctggtggtttacactttgctaatatcttagaagatacaggcaatagacaaaaataggaggatatagaaacagggagcttggctctgttaatcttcaacttcagcttaattgtggctcatttctaaactgtcactaagaaacctggattgtgttcacttgttcagtgttttatttgaatgagcaagttatggcagtagggcatctttaatctgtagtctcagaactgacaggctaaaaggaacacaggaatagtagtgtgtagtagggaatggtttaaaaaaaaaaattagccaggcacagtggttcacgcctgtaatcccagcactttgggaggccaaggctggcagatcacctgaggtcaggagttagagatcggtctggccaacatggtgaaaccctgtctttactaaatatacaaaaattagccaggcgtggtggcacatgcttgtaatcccagctactccggcgactgagacaggagaattgctttaacccgagaggcagaggttgcagtgagccgatagcgggcaattgcactccaacctgggcgatagagcgagactctgtctcagaaagcaaaaaacaaacaaaacattgactttgtcaggaattagctacttcatgattgagggcattaagggaaatgaggctggctttttacttgtagtactctacaacagtaggaaaacattatgtctagtctttctggaggggctaatgggaagaattgcaagaactgcttagagagtgagagatgggatgaggcaggacaagagggtgttccagcatacatcattttctccttaaagaaccaacttctctgtcttctttccatttggagttataggtattgttctaaggcctccagattattcagtccttatgccttgtagctttttggaaaaagagggtctttggaggccaagcaggctggctggcggaatcatggctcatgctgggctggctagtttttcccttaattcttgcttctcagatgtatgtccctgggaagctgcatgatgtggaacacgtgctcatcgatgtgggaactgggtactatgtagagaaggtgagtgagagcatgtggatgcccctctaaacagggaagggaaattcaggggaagctctagagcgcassatggccagagggagtctccttttagccccttattcacctctgatcttgtagacagctgaggatgccaaggacttcttcaagaggaagatagattttctaaccaagcagatggagaaaatccaaccagctcttcaggagaagcacgccatgaaacagggtaagttttycctggggcacctcttgamcctatctccataataaggaacatggattgcagtgtgaaccacgggggtgtcccctttgctggagtaaaactatgtcttagtttctctttggcatctttagaatctgtgtattgcataatcactatctgtagattcctgggttgagcgtttgagaaatttagaggaaggaaatcatgtttgtgctttggtggagctcctatttaatgacgatggaatgggggaatgagatgaacacacaggaaggaatcatgatccaaacgaactaaataccagcaattataaccccgactgcacatgagaatcactcaggaagtttaaaaagaaagcttgggcccattccagattgactaaatcaacttggaagtcaaaggaggggaagttgtaccaaggtctgtttttttttaaaaaagctccccctgttataatcaggattcagaaccagtgttccaaaggtaaaaatctttccccatcatagttttctgattatgtcagactcatttaataccatattgtgttcgtttttatatctttggttagcaggttttttttttttccgagaagagtctcattctcaccacacccagctgtgttagcatattgaccgatgcattgtagaccctaaatttgtgttagtgaccccacagtggatcactgagttaaagttttattaacaatgccaggcgcagtggctgacgcctgtaatcccagcactttgggaggccaaggcaggtggatcacctgaggttaggagttcaagaccagcctggccaccatggtgaaaccccatctctactaaaaatacaaagttagcccgggcatggtggtgcatgcctgtaatcccagctgttcgggaggatgaggcaggagaatcgcttgaacccgggagacggaggttgctgtgagccaagatcgtgccactgcactccagcctcggtgacaagagcaggattctgtctcaaaaaaaaaaaaaaaaaggttattaacaaactgtarttagtcggtcgcctgtccttaaacttgcctgtcacttctccttaactctaggttctcctttttgcttctaacctttgactcttatttttttccacagccgtcatggaaatgatgagtcagaagattcagcagctcacagccctgggggcagctcaggctactgctaaggcctgagagtttttgcagaaatggggcagagggacaccctttgggcgtggcttcctggtgatgggaagggtcttgtgttttaatgccaataaatgtgccagctgggcagaatgttggtcttttcttggattaagcaagggactggtgatgagatgggggtgtggtcgagagtgtgggccccgtctcagagcctgatgcgcaggggtgatgcgatgcgcctcttggaggctccatcgcagggccctttgaccagctggaagaaatcctaggctgggagtgtgctgctgctcactctgcagagctggttgccaagggaacggttggcaagcggaagtggggctgcgctggcgcttcctcttccgggtcggcgctcctgcctccctgcagggagctgcttatgggacaccgcttcctgcgcggcctcttaacgctgctgctgccgccgccacccctgtatacccggcaccgcatgctcggtccagagtccgtcccgcccccaaaacgatcccgcagcaaactcatggcaccgccccgaatcgggacgcacaatggcaccttccactgcgacgaggcactggcatgcgcactgcttcgcctcctgccggagtaccgggtacggtccgcgaaaagtgaccctgggactgcgtgcatgcatgcctccggggtggatggcattccgccaacagggtcactccgatagcgcccggcagcccaagcacccttcctacccttcctgcctccctgaagtccagcattaatcccctacccggcgacacccggcagccccttcacccctgtgtacctcgcaggatgcagagattgtgcggacccgggatcccgaaaaactcgcttcctgtgacatcgtggtggacgtggggggcgagtacgaccctcggagacaccgatatgaccatcaccagaggtaggttctcagataccatttatttaacttccttgacctcagctttcctctgtgctccaattcagccatccactgccgtagtccgcgtcagcgaaaagaactgcttcatcactgaaatcaaactcccactaggactacatcatccttccggccctgcctgttcttcacccatctccctggcctgggacctcctttggttcccagggagtccctcaggccccttatctcatctccttccttagccaaggctttttttccatcagcaacttcatcaccccaactaaataaacccatctgtgattaatccattctggtgcccttgctgctgcacctaactgctgggcccacatgattgtggcagttggtgacagttcagatgtgtgaagttttctacttcatttacacccttccaaagggaaatccttcttgctcaagggtagcctattccaatccttttcttctccctcaagcctctaccgcatcaaactgagtgtccctgcctctcttcaaaagaagttgagcatttcctcagtctcccacctcaaacatcctcagctccctcctaccaactaagggaaatttcttcccttctattggaggttaatcctctgtcctgtttccagtctattactttcttctctgggattcttttttcttttctttttttttttttttgagacggagtctcccactgtcgcccaagctggagtgtagtggcacgatctcggctcactgcaacctctgtctcccaggttcaagcgattctcctgtctcagcctcccgagtagctgggactacaggcacccaccaccacacccggctaatttttgtatttttagtagagacgggtttcaccatattggccagagtggtctcgaactcctggccttgtgatctgccccgccttggcctcccaaagtgctgggattacaggtgtgagccactgtcggcctatcctctgggatttcatgtcacagttccactagtgtctctgcctctccttccctacagcctaaaacccttctcaagtatcttccatcttgaaaagaaacacaggtgtaaaaacaaaaccctccctcaattataccacaccacgagaagtaattatcttggagagagggattatgatgttttaagtctctctccttttttctttttttagcatacatattataaatgatgtcaggaagaaaccctcccaatatttacagcctaagctctcacccttgcttctcagccacccttcaaaaaacagctgaccgtggcttcacctgttcctttccagttcattcccctcaagcccactctcccagtgtcttctctggaactgctcggcagaagggcaccagttacctcagcaccaaaccagggagctggtaaagggtctcaactgatctctttagcacttggcattattgaccacttccttttatcaaattgtttttaagatggagtctcgtctgtcacccaggctggagtgcagtgatgtgatctcgactcactgcaacctccgtctgctgggttcaagtgattctcctgcctcagcctcccaagtagctgagactacaggcgcccagctaatttttgtatttttaggagagacagtgtttcactatgttggccagtctggtcttgaactcctaacctcaggtgatccacccgcctcagtctcccaaagtgctaggattgcaggtgtgagccaccatgcccagcctcattttttttatttttactttttttgagatggagtttcgctattgttgcccaggctggagtgcagtggcactcagctcacttcaacctccacctcccagattcaagtaattctcctgcctcagcttcccaagaagctgggactacaggcgtgtgccaccatgtccggctaatttttccattcttagtagaaacagagtttcagcatgttggccaggctggtctcaaactactgacctcaagtgatcacgccttggcctcccaaagtgttgggattagaggtgtgagccactgagcccagcctgtatttactcaatatttaataataaaagtcagttaacaaatggagctccctaggtaattctgagatggactggtatttagaaatcatggctgtagtttctgcttccctaacatctgttatatcttttctctattttctgccccactgctgttcaaattcttgccttctttattcacctgaaccattgcaggtaatctccttgcatctgttctccatgctggctggtgcaatgctgtaacatgcacctgcctgcttaaaatcccccaatgacttcgattacccacagataaagtccgatggtctggccctgcctgcccttccagctttttcttttgccattcacttctcacacctgagctgcctttgctgaagttccatcaagacacttgtctctcagccatcattcatgttgttctctctgcttggaatgctttttctctttcaccccttgtctatctggtggacacccactaattcatctttcagaactgacctgaaggctctcctctgaaccctttcctcatcccttccttcctttcccttgtctcgtctagtgagagtactcagggggttgtgtttgtcggcctccggcagatgaatctgaaagcaaggacagtgtcttggttttttatccttaatgtctaataaaacataaaatgtggcagataggaagcattgagttaaccattgaatgaatgcatggagactctagccaaggtccctcacctcagccccacctccctatgctcctcaggtctttcacagagaccatgagctccctgtcccctgggaagccgtggcagaccaagctgagcagtgcgggactcatctatctgcacttcgggcacaagctgctggcccagttgctgggcactagtgaagaggacagcatggtgggcaccctctatgacaaggtggggacctgaggacagagatgccccccacatgcatttccagcaggccgcctgggagcagtgctcacacagcactcagcactgggcctcgggtcagggttcctggcctatagcaggcccaacactcatcctctccctcagtcaggctcatctcacaagggaatggtgatacctcccctgtctacatcctggggtggttgtgagaagtggatgctgtaatatatggggaagggctttgaaaaccataaagcagcatggccccgtctttttattgacacacacaaacagcaattgctcagcacctttgggtaaacagaggggaggctgcttatgtgtggaagcagatggctcagaggttctggctgccctgaaggttgaggggagtgtatgttaggcaccactgtagttcactagtggcacataaattgggaagctcagctgagaagagttttattatgaaactgtctttggattccaccagtgtcccctgcaagcagcttcctgctcttagggaaagaatatggctagtggccctggcatgcaagtcaggtcgcacagtactgaggacacttacttgtttacaagtcaaagcccaggttcagtcagctgtatttcttgcaggtaggctgttgaattcagttctcagtttttttgttgttttttgttttgagacggagtcttgctctgtcgcccaggctggagtgcagtggcgcaatcttggctcactgcaagctccgcctcccgggttcacgccattctcctgcctcagcctcccgagtagctgggactacaggcgcccatcaccatgcccggctaattttttgtatttttagtagaggtggggtttcaccgtgttagccaggatggtcttgatctcctgacctcgtgatctgcccacctcagcctcccaaagtgctgggattacaggtctgagccactgcacccggcccatcagttctcagttttagcttgcccattttctgccctctgtaactatagagtttttggaatatcaagattttagactgcctgggtcagttttcccttccactgctgaagggtttctaaacaactgactaaatttttgttgttgtttttttttgtttttttgagacggggtcttgctctgtcatccaggctggagtgcagtggcacgatctcagctcactgctacctccgcctcctgggttcaagcgattctcctgcctcagcctcccaagtaggtgagattacaggcgcctgccaccacgcctggctaattttttatttttagtagaaacggggtttcaccgtgttagccaggctggtctcaaactcctgacctcaagtaacgcacccaccttggcctcccaaagtgctgggattacaggcgtgagccactaatcccagcaacaattgactaaatttaacccgtatttttttttgagagactgttgcccaggttggagtccagtggtgccatcatggcttgctgctgctttgaactcctgggctcaagcagtcttcccacctcagccccccaagtagctgagactacaggtgcatgccaccatgcctggctaattatatatcttaatttttttgtagagagggtcttgctatgctgcccaggctggactcaaactcctgggctcaagtgatcctcccacctcagcctaaacccatgtttttttttttttttttttgagacggagtctcgctctgtcgcccaggctggagtgcagtggcgggatctcggctcactgcaagctgcgcctcccgggttcacgccattgtcctgcctcagcctcccaagtagctgggactacaggcgcccgccactacgcccggctaattttttgtatttttagtagagacggggtttcaccgttttagccgggatggtctctatctcctgacctcgtgatccgcccgcctcggcctcccaaagtgctgggattacaggcgtgagccaccgcgcccggcctaaacccatgttttaactgagcatcaggttggggtccaaaccaagaagagctgggcataggagttactttctcagtgctctgagagtagcacttttctacataccacaggtgtactgttatggaggcctattttgtagggtaattttgcataaagtttctgccccgagactcttgaggcattatcctaccatttattcagacccaggagacaactgctgatgtcatgaggcacattatgggcttccctggaaccctaacccagcaaccagcttttggtgtctagtctcacactcattt

SEQ ID NO: 97754 - DNA, 26173 bp, Homo sapiens
gcttagctgagcataaggatttgcgagtcatccctgttgcatgcattaatattttattcctttttattgccaagtagtattccattgtttggatgcaccagtttggttagctgttcacctgttgatggacatttggaccatgttccgttgtgaactattacaaataaagctgctataaacattcatgtacctgtctttgttggatatattctatcatttcttgtgggtaaatagtttggagtggaagggctgactcacagttaagtgtcgtttaatttttttttttttttttgagacggagtctcactctgtcacctaggctggagtgcagtggcctgatcttggctcactacaacctccgccttcctgggttcaagtgattttcctgcctcagccgcctgagtagctgggattacaggcatgcctggctaatttttgtattttgagtagagatggggttttgccatgttgggcagactggtcttgaactcctgacctcaggtgatctgcctgcctcggcctcccaaagtgctgggattacaggtgtgagccactgcgcccggccgcatctttttctgtttttctttttcttttgagattggagtcttgctctgttgccctgactggagtgcagtgatgcgatctcggctcactgcaacctctgcctcacgggttcaggtgattctcctgcctcagcctcctgagtagctaggacttcaggtgtgcaccagtacacccggctaatttttgtctttttagtagagatggggtttctccatgttggacaggctggttttgaactcctggtctcaagtgatctgcctgccttggcctccaaaagtgttgcgattacaggtgtgaaatactgtgcccagcctttttttgttttttgagatgggttctcattctgtcacccaggctggagtgcagtggtgtcacctccactcactgccacccctgcctctggggctcaagccatcctcccacctcagtcctcatgagtagctgagactacaggctcacactaccatacccaactaattttttattttttgtagagacagaggtctacccatgttgcccaggctggtcttgaattcctggccttgagtgatcccacttcagccttctaagtagttgggattatagatgtgagccacctcaatgtattttttattttttattttttgagacggagtctcgctctgttgcccaggctggagtacagtggcgtgatctcagctcactgcaagctctgcctcccgggttcacgccattctcctgcctcagcctcctgagtagctgggactacaggcacctgccaccacactcagctatttttttttttgtatttttagtagagatggggtttcaccgtgttagccaggatggtctcaatctcctgacctcatgatctgcctgcctcggcctcccaaagtgctgggattacaggtgtgagccaccgcacccagccttttttttttttttttttttttttttttgagacagggtctccctctgtcactcaggcttcagtgcagtggtgtgatcacagcttattgcagcctcaaactctttggggtcaaacaatcctcctgcctcagcctcccaagtagctggaactacaggcacacatcacgctcagctgattattattatttttgtttctgtagagacattctccctatgttgcccaggctggtttcgaactcctggcctcaagcaatcctcctgccttgccttcccaaagtgctgagattacaagtgtgagccactgcacccagcccttggtgcatttctcaatgcctatagttatataatgttgcaaaaatggaatcatgtaatacatttgttaagcgtatgaagcattttttttttaactttggatttttaggctgggtttggtggctcacgcctgtaatcccagcactttgggaggctgaggcgggcgaatcacttgagatcaggagtttgagaccagcctggccaacatggtgaaaccccgtctctactaaaaatacaaaaattagccaagcatggtggcgcatgcctgtaatccgagctactctggaggctgagtcacgagaatcgcttgaacccaggaggaggaggttgcagtgagccaagatcatgccactgcactctggtctgggtgacagagcaagactccatctcataagaaaaaaaaaaaaaaaaagttggatgtttaagatgtgttgggcaacttccagccgcccatttcactctgcaatagagcatgtgctgtgtatccttctgtagcctttgttatgctcagataatcatatgcaaacatgcacacatctgtatggggtttgtgttacaaaaacaaagccatgtcatatgtatttctttgttaacacagaacagtagttactttaggttggttggtatgaattaacagcttttcaaagctgcctaatattctaggttatgggttttccaattcagtcgttcatatattgatggaaattcactctgtttgcccatttttaccactacaaacaatgctgcagtaaatgcagaagactttgaaaacattatataatcacatggcttgtttgggggcagattcccaggagtgggatattggatcgaaagggtttatgttttctttcttttgagacagagtctcactctgtcgcccaatcacagctcacttctgcctctacctcctgggctcaagggatcctcccacctcagcttcacaagtagctgtgagtacaggtgcatatttttttattttttgaaagggggaacaattttaatagacaacagaatgctttctaaaagattaacgatagtaggtgttagcacatttatgttctgctattttcatttattttgagattcctcattatcaccttaatttgtatttcccttataggcagtgtctaaatactggtaaataaattagctagtctcagtcgcacaaactcagcacagtctaaggtggtactgctataacagaatccctgagactgggtaatttatttatttgagacagggtcttgctctgttgctcaggctggattgcagtggcgtgatcatagctcattgcagccttgatctcctgggctcaagtaatcctcctgcttcagcctcttgtgtagctgggactatagacatggaccaccatgaccagcattttttttttattttttatttttttagtagatgttgcccaggctggtcacaaacttctgagctcaagagatccacccacctcggcctcccaaagtgttggagccaccgcgcctggatggagattaagtttctaacacatgagctttgggggacacattcaaacctgtccacctaaagtaatcaaaagggtcagaatctaatttcaatagtttattcaagcacaaaacatgagggtggactacctggaaacaccgactccaaatgaatggagtcagtgtttcgaagtagagaagttaaggtttcatttacacacacaaaggcagaggagttttaggattacattcttcatatatggtcagtgcgtacttacagtaatttggttataggccgagtgcagtggtccactcctgtaatcccagcactttgggaggccgaggcgggcagatcacctgaggtcaggagttcaagaccagcctggccaacatggtgaaattccatctttacaaaaatgtaacaattagctgggcatgatggcaggtggctgtaatcccggctactcaggaggctgaggtgggagaatcgcttgaatctgggaggcagagggtgcagtgagccgagattgtgccattgcactccagcctgggcgacagagccagactctgtctcaaattgaaataataataataaataatttggttgtaagcagtgtttctttttgggaggcatacatttaacattttttacagagggtgtaatagtcatgggtttgctgtcatctggtctaagtaaagcaggacaacaaaagggaagttatctataagaagggtcattaagaaggcagcaggtttttgtcccatgtttaattctctccaataattgtacagaacaagaaaaacaagcaggtctaatttattatctcagaaaaaattataaccatacatggctgagatcacagtcacctctctctccaggtttcaagtgttgtgggggttccaacatcttttctatttattttaaaaaaccacagcagaggggttgtgcaccctttcatatttcttggctatttggatttgttcttctgagacatgtccattcctattttttgctcattttctattgtttttgccttttttctaattagtttttaagatgtatttgtatattacaggtattggctctttatcatgtatggcaaatattttttcctcatctatcattgtctcttgacttttatcagtgttaattttcggggtaatcaagtatatctttttacagtttgaggttcctgtctttgcagtctctcaacccctagaatacccttatagtctcctaaattatattctaaatgttttgttgtttaaatttaagattctacgccatttatcaacgaaatcatcttttcctgattgaaataaaatactacatttgtggtatttccggattctgttgcactaatgtgtctttcctaccaacaatatcatattgttttattattgtggttttttgtttttgagacggagtctcatgctgttgcccaggctggagtacagtggtgcgatctcagctcactacacctccgcctcctgggttcaagcaattctcctgcctcagcctcctgagaagctgggattataggcgtctgccaccacgctcggctaatttttgtacttttagtagagacgggggtttcaccgtgttggtcaggttggtctcgaactcctgacctcaggtgatccccccgccttggcctcccagtgccttggcactggcctattgtgttttatatactatgtttgtcatctggaaaggcaagctcctgctccgtcttgtaaagttttcccagtactgtagtagttatttttatttttatttttgacagtctcgctctgtcacccaggctgaagtgcagtggccccatctcggctcactgcaacctccgcctcccgggttcaagcgattctcttgcctcatcctcctgggaagctgggattgcaggagtgcaccactacacccaactaatttttgtatttttcgtagagacggggtttcgccatgttggtcaggctggtctcgaccttctgaccttgtgattcgcccgcctcggcctgtcaaagtgctgggattacaggcgtgagccaccgcgcccggccgtagttattgttttatacgattttaagatcatttaattaaatcctctgaactccgtggagattccaatagaagtgtgtatttgtaatttttgaactgacaaccttctgttacctttcatctaatatgttgttgcatcagttcaaatactgttttaaatccttcgataagtcgtctctattcgtagctttttgggtcacttttttttttttttttttttttccaaaaaaacaggaagtctttttacctgcagcgtcaactgagccggttttccggcgcgcgccagcccctcccctgctcccgccccaaggttctgcgttaccatgggaacaaaggttgacgtcacttagggcttccttgctggacccaagggtcgatggtgaagggagacgggtggagaggcggttttgctccatctacgcatgcgcacttcctgctccaggactcccccgccgtaaatctcgttccggctgggccttttccgccgcgactctcgcttaatcccggagaaactgccccctgggggaggggagtagaaaaaggctgaaaccagcgacagccaatcccgcgacactacaacgcaggcgagattgattgagtccaccaccgcagccaatgagagagctcgccgtcgctccgtcatagagttcgccccaccccatcccctcctttctggactcggagctcagttcacgcagtaacaaatgaagtgcgcgctgcgacacctcccagcccaccgaactccgccgccatttcctcgcttggcctaacggttcggccaatcccagcgcgcatcaagaaggactgaggctccgccaatcggaggccgccgatttcgacccttcgcctcggcccggcccaatccaggccccggccccgccgcccccggcccgcccccgcggtgccctctctcctccctctttgtgcgtctcgcgccgccgccgcccgccgcgtgagaggacgggctccgcgcgctccggcagcgcattcgggtcccctccccccgggaggcttgcgaaggagaagccgccgcagaggaaaagcaggtgccggtgcctgtccccgggggcgccatggcgaccggagcgaacgccacgccgttgggtaagctgggcccccccgggctgcccccgctccccgggcccaaaggaggcttcgagccgggccctccgcctgcacccgggcctggggcggggctgctggctcccgggccgccgccgcccccgcccgtgggctcgatgggggccctgaccgcggccttccccttcgcggcgctgcctccgccgcctccgccgccgccccctccgcctccccagcagccgccgccgcctccaccgccaccgtcccccggcgcctcgtacccgccgccgcagccgccccctccgccgccgctctaccagcgcgtgtcgccgccgcagccgccgccaccccagccgccgcgtaaggaccagcagccgggcccggccggcggcggaggaggtgagtcgggccgagagagcgcgagaggcgtcgcgcggacgggcccggccgcctgaggggcgcgcggcggcggcgacggcggctgcacgcggcaggggcgcgcgtgcgcgcacggggaggcccgggcggaggcgcccctgggcgcgcgcggcctggttctagggcctcgagtgcgcacgcgcgctgtggggggagggctgggcgggcgggaggcgctctgtgcgcagacgcagtgaggtggccgggctgtgcggcgcaactgtatagactgggggcccactattgctgtccagtccgctggtgtcgggaacaggggtggcgggtgttcagcgctggacggggtgctagctgtgaatgccagcagggcgtgaaagcctcacctgatgacgtgcagcgactcccttctggtcttgaggaaccagaatgggaaccgtaccaaggatagctcctctgcttctacagcaaggcagggttttcatccgggagaggttggcatgcttcagatgatggttgggtctgatctttcttggtctcttttggggagagaattttagtttgtttttttttttaaatctgttcagtatgtttagatctcagtctgatcggctgccctgtcgctttgttttaaaaagcttttccctctgatcctgtaccccttgggaaatagaaggactcttttgtggcaaatgtagggagtttctgcctatgtacggggaaaggagaacttggctgctattgtataggttgttgaatttttgatagatccttttaagagttcagaccctcagtgtccaactggccaggaaaactgaatgctgatcttggctaaacttatgaagacaaaggtgatcttgttgaagaattgggcttttcccacttggtagggtgtaactaggtttagttgtggtccggcctctcgtacaaaagtgactggtgaggggagtggaggtgggtggagcccccagtcccatcaggactgctttacaaatctatgattcttcagtgtatttttgtctcccctggggatttcagagcactcatggttgatgtagtatctatctaacactctctgcagccatatgcattaagattaccacgtttatatatctgacagtttttctagacaaaagaaggtgaaatgttaacttgcctgaccaaggaccacatacccttgtagtggccataagctttaaatctctgatctctgaggtttgttttctgtttttttaatgtttaagttttaggttaagctctcagcttcacagtctgctgagtttctgtgtagtaccttaaatacccttagctgtctgttgataactacttrtatttacatcggatggattttgtctctgccttttagacttcccaagtaagaarcggaagaggagccgctggaaccaagacacaatggaacagaagacagtgattccaggaatgcctacagttattccccctggacttactcgagaacaagaaagagcttatataggtaaatatacgttctgcatccaaatgcactttgagattgttacgatttattctgagcaagatctgcattttttgaaagtttgagattgtagttatcttttttgagatgagatactttcacgactttggtatcatctgtcagtttttgcccagtgagttctgcatttgcagctccttgttttggtctgttcgtaactgcagtgttctccatgagtatcaggaaggtagggtttcacttaggagtaagaacagtccccagtccagcagccacccttttcagctgctgttcattgccagttgatgaggtgagtgtcatctgcctctctggacaggccccagtggagaacaccgcaggtactgtaaaccaagtacttttcacagcgtggcctttcaccataattttrtatttctccccctaaaatgtggtcttttactttttataggtactttctgaaagaaaaaaaaatgacaaaaagtggttctgaaagtgtgtttacaatttacccctttttattttcttgaatttaagagtttaaccttcccttcaacatcttttctggtttggtctatggagagctgtcttaaaatgaaggctcttgtatttacttttaaagaactctgctgggaaagggatattgcatggatatggaatgaagtgctaggataaaaaggttttatttgctgggaggttttgagaattaatgactatccacagtggaattgaaattaacctcaaaattgcttttttggaaaaaaaagtttttaatgcaagttttatctttatatacctgtgcagctgtctcaaaaaagttcactttataaacatttcctactaaccaaataaacatcccctttggaggaaattcgggcaaagacctcctaaacytacgaggctgtggccttcacaaccaaaaagcttcaaggccagcatgttactacttttgagggtcttaatttcctgttttttagactgctgagaattttgargcgttggaattgtctgtctcctttcacagtactactaatacttgttctttcccctactgttcctgtctactcccacccattccrttgtgtctcatattagactagtctgggtctttacatccttgtgaaatgcccctagtggagtgatatcccaagaacacaagcatacttagaagatgggaagagcacaaattctttatatctccatttctgtttttgtggagggctagttagttcactgggccctaaggactatttatagctataatcaaaatagaatcaaaggagaggtgtagttctccacagaagagaatgaccctttttatttagatcaggccccacatctccatagtcagctaggaagactcaccttctcccctcagtgaaggtgactttcacctcgagttgttgagcttaatactcaactgcaaagtcagaactttttaggcataaaggagcttggggaaccatgtgtcttactacttttctgtctcccacggtacatactgctttgtccaggatgccctcaatatctttttttttttttttttgagagactgagtcttgctgtgtcgccaggctggagtgtagtggtgcgatctcggctcactgcaacctgcgtctcccgggttcaagtgattctcccacctcagcctcccaagtagctgggactacaggcgcacgccaccatgcccagctaattttttttgtakttttagtagagacggggtttcaccatgttggccaggatggtctcgatctcttgtcctcatgatctgcctgccttggcctcccaaagtactgggattacaggtgtgagccactgtgcccggccagtattttctttcgataataatgggttttcatttcttcagggttttagtgtgtgggtgtggtatagccctgtggatgtatttaaagttagaaggaatctttggttagacacgcattaatcctatcttggagccagctcagttttaacccaacctagtaacatttgcccttattggagatgcctgctgaaaattctcagatgctgcgaaggtaaggaacaggtggttattccgcatgttgaagaaagctgctctggctctgcagttcccattatcttggaaaatcagctgtgtaacatttccctggcgtcactggcaacttttgtgaaaccctcatctctctttttcatgcacagcctcattggtcaaggcccgagggccaagtacattgtccttgaacacacattccattcttctacacgcctgctccccatatgaacagtgagcctgaaaacaaattcttagcactttatggttactggtttattaagatatgtggtttgtcatttaatatttgaataaatatttcatataattgaataagagctgcaggtattgggagacccttactagtacaggtctggttgtacagaaagagtatgtacaaatttctataaggtgttgaattttgttattaaatgtcttatttaaggaattttaaatgtattaatgaaaatgatctttgctcaattggtatttttccttgtcccatgttaattgggtctcattttgggctatgtttaacatttaatgaagaaaaaactcaattcttgccctcaagtaatttgatgggagtcgggtattggtgacgtaacatggtttatggttctgggtaccaatggtaagcaagccttggtggggaggaagaggtgaaacacctcctaataattgcttggatgttagccttagtgaacagtctttattgctaacccctcttccaacaaactgtttgcttccttaagtgataaccattttgaagtgaaaaaaacctatagatgtaaaaggactcctgccgataggtggttgggggtttttgcttcaatgtgttcactgatcagtcgtccctttcaaagtctccgagttcttcatgcttgttgttgagatttgagatgtttattggtaacattgtcttttttccatccttttttttctttcctaacctggtttcttccagtgcaactgcagatagaagacctgactcgtaaactgcgcacaggagacctgggcatcccccctaaccctgaggacaggttgggaaacagttttaaccagctgacagtaacgcttttacctttttctcaatacgttttactggtggcaacatattgtgtcagttcaataaaatcatagtrtgacgactgtaccctgaccactttggggattaaggtttaattagaaatatgtatggtcagtcaacagttagaaaattggaataaaacttaaaaatgttgggagaataaaaagttacaggaaaatggacaactggtttccarttggtaagcatgtagatcttaacctgatttacccacccttaggggacagtgaggtggcccgttaacctgccttttcagtacctgctttggccaaaagcccagggcatagagtttttctcacaggtacacagtgcagggactaaaaatatttttgagcatcactgaacttgagcaagccaggagctctggtcagctcattgctgcagtcttcctgctcatggttttgagatggtttcaaaatcagatgagatttctaaccaacttctttcactgccagttaactttcagccttggccattgccttgggggtgttgggaggggccagaatattctcacctattttgggaaggcatgcaaccaaccctaaattactttttttttttccttaaagggagcgtgggcctcaaacagctgtggtcatgtcatttcagttkgcagtttctctcacctcagaaaaataaattgtgtgggggagatgaacttttttaaactggaattttattagctgattgaacagctaaaattggtcatttaattagaagggcagtaagtctctccctctcactgaattttctcttagtacatacagaatagttgaaaagactttgctttaaaaagtagtgtttttggtttttgttacccagttaatagcttattaaatcaggaagatgatgtaatggctttagaagtcactcactcatgcatctttcttccgccctttgccaggaaacattaacttccttgtttctccatattgactctttaatttgacttactacatttgctatattttacctatagatagattttggttgtagggttgtgttgtgtttcgtttctttttgaagattttttttttttttaaatttacattgtaggtcatagaccacaactgtttagtgcctttttggcctttttccctttaataatatgtctacaggtcaccagtcaattcctccaaaggttgaatttttaacaaaccttctttgcttcctggataactgggattagaatttagttgatstagccgatgcctgttggaggtgaagaagtcgggccagtctaacctctagaatactagcttttgcctttcacttctgcaatttgggaggaggttaaactgttgtgaggccttcacatggccaattgggtgctggtaagacttgtttttgtaactagctaagaatgcttaattctagacagctgtggggtgggaattagaaatgtcaagcatgttagaaataaaaccagagcagggtttttcctcccttctattcagttttgaaagaggccctaatgcctgattggttttgcttttgarcccaggttggagggaaatgcatgggttttcttaattaagataatttcttaaaaaggtgttatatcacttaagccactttattgttattttgatgctgcttaacttgcacagtaaaaacatgtttaaaacttttcttgtagacttaaatgtataagatggtagtctaatgagctggggtatgtttgcttttgttcactcttaatggattgtgctaacagtttatacaaatgctagaaacggaggtgtcatttagccgtcattagccatgaacaaacctgaccttttattccatcgtgtgtgtaacgtggtgtgacatggttccctttaggctgaagacagtgggagcagccgagttcagtccttgctctccaactaggcaaggttctctcaactaaaccaagggtataggagtcttgattactttcagtatgtttttttaataacctgatccacatggtctcttcccttcttgcagctgctactaaattttcattcagaatatcaagctatggtcctttttgtaatcttaactcaaaattctaggagtgtaacctctcttttttattaccgcaaaatccagctgtggtaaactgaccattttatcattacatttttttacttgtagcaacagcattttactccttaaaaaaatgagagagagaaaatctgctttctggacttgtaaactctggtggagaatcataggttttccccttgctgtttgcaggttcagaccctagacaagtatgaccaaatctgcatttgcagcctctcgcagaagctgctttagcactttaacgtttttctctacccagactccccaacctcgaacagccagaaaacaggttgtctcctgggccttggacacagccagccaggccattgaaggaaaagcaaagacgaagcgaaccatctctctccattgtgggggccaagtagctgcagtagccttcagtcccagttgcattgggttaaagagctcatacatactatgtgttaggggtacagaagcttttcctcatagggcatgagctctccaagagttaaccttttgcctaaacttggggtttctgtggttcataaagttgggatatgtattttttttcaaatggaagaaaatccgtatttggcaagaagactccaggggatgatactgtccttgccacttacagtccaaagattttccccaaagaatagacattttttcctctcatcacttctagatgcaaaatcttttatttttttcctttctcacacacaccccagacccctaacgttaagccagcttccatctccccattccacacgatcttgagtagcacacgttatggtcggttcctccgaagagtgttgtattagggtctgagaggcagaggggctgggaaagacttgttatagtccgtgtgggaatgagagaagtcggtgcagaatagtaaacgggagtctgtttcccacaggtccccttcccctgagcccatctacaatagcgaggggaagcggcttaacacccgagagttccgcacccgcaaaaagctggaagaggagcggcacaacctcatcacagagatggttgcactcaatccggatttcaagccacctgcagattacaagtaagcggaggggctcggtcatctgggatgaagacacatgcagatcatgggtgacctgctgggatgggacagtattggtactactcacctcttgcctcaagtcacccataattagcacttggtaccaatatttggttttagaaaagccgctggctgtgtcattctccagaaatgtgcggtgacacaggcttttctttcttagacctccagcaacacgtgtgagtgataaagtcatgattccacaagatgagtacccagaaatcaactttgtggggctgctcatcgggcccaggtgagtaactgctggtctataggatatagaattcctttagagcctgtgagatgtgtccgttttgtgcctaattggggactgttggcttacttttcccctttttggtaggacatttcattttggctgaattaatgcctttctgtgagaaggtgtcttaacttccccactagtgcggagaagtcaaatcctcaggtttactgtggctgaccataatatagagttcatggagctcttggtgggaaaatccaattctctgcgcttgtggtttcccaccaatgccaaattggtccagcctctcttccctcttgagtgtgaatttgtcaggtataaacttagtcatttctgcctctctagagggaacaccctgaagaacatagagaaggagtgcaatgccaagattatgatccgggggaaagggtctgtgaaagaagggaaggttgggcgcaaagatggccagatgttgccaggagaagatgagccacttcatgccctggttactgccaatacaatggagaacgtcaaaaaggcagtggaacaggtgagyggtgagcccagaaaggaagcctcctrgcagaaacctaggtggaggccctaagcacttaactgtccattgcattttcactagataagaaacatcctgaagcagggtatcgagactccagaggaccagaatgatctacggaagatgcagcttcgggagttggctcgcttaaatgggacccttcgggaagacgataacaggtatgtgatcagtttaaaggagagtgtagagacctgaagaacctatggaagtagagattgttcccttgcattgacctctttttcctttaataggatcttaagaccctggcagagctcagagacccgcagcattaccaacaccacagtgtgtaccaagtgtggaggggctggccacattgcttcagactgtaaattccaaaggtgaggggctggctcttgcggtttcctggtagcctgcgatgtgcaggacaacttttctggcacattcattggttgctgttaatcttaccaagagaaacatcctttctgttagtgtggtctgtaatggtgtgatttaaagcccaggatgattagaaataggctgtacagatacccctgtttgtttgtcttgagcccaagaaaactggaagtttccattttgggtatgtttttactggggctcaataggaaattcactgcttttgctgttcagaattggttcaagaagactaagcaatctctacagatttctgaccagttgcaagtcagcactcgatatcaacactttctgactggctggcgaatatgtaaggttttgtttaggaagttcgttctggcagttgtgccagtcttgcatagattttcctttcctcaaactggraatgaagtttgatgaaattgacttgagagaacctgtgcttcatcggtgctcagggtctcctgtgctcttcgcccaggggcccctctactctggtgatcccagatgcagaactgggcacgaaactgaagatctgatgagactgttgagagccatgcccagtaaggggttagaaagatgtgtgatgatctggtgattgaattcttcaraactttccatatgttggttcctcaggataaaagcttccttcttaacaagtttttcccctttctctgtttgtgtcccccaccccacttcaggcctggtgatcctcagtcagctcaggataaagcacggatggataaagaatatttgtccctcatggctgaactgggtgaagcacctgtcccagcatctgtgggctccacctctgggcctgccaccacacccctggccagcgcacctcgtcctgctgctcccgccaacaacccacctccaccggtgagcctgggggctggctctcttggtctggcttccccattctctactgcagagactgggagctatggccacgtggtttgggtagagcagacaatggatgtggatggcaacattgttcttccgggatctcaggccagtttggggacttctcacttcgggaagaccttgttcttgtgttctggtcctgtgtcataacccgaagaacaatgttgccactakgrggcgcasgcagggacgttggcaggaaatgctctcacgtagtctctcatgtctaccacccagagccgcccaccctggatgaattctggcccttcagagagtcggccctaccacggcatgcatggaggtggtcctggtgggcccggaggtggcccccacagcttcccacacccattacccagcctgacaggtgggcatggtggacatcccatgcagcacaaccccaatggacccccacccccttggatgcagccaccaccaccaccgatgaaccagggcccccaccctcctgggcaccatggccctcctccaatgggtaagtaagtgtcagaccagaaaccttgggggctttgggataagcaaggggttacgtcaggtcgctgttggctagaagcagctctcaagtggctgggcaatgtgctgggtctgcctggcttgccagggttgtggctctggaaggagcaagactccattctggttcagggagtgattctgtgttgggtaagcacagacctgccttttacaggcatggttttcagaactcgcgtaaggatagcaactgaggttatcacaggggtggcttccctggccagttccaatgtcctgctaagtccctgctctttccttccatcaagatcagtacctgggaagtacgcctgtgggctctggggtctatcgcctgcatcaaggaaaaggtartggctgtctgctggctgtgggtcttcacctaggcttgggtgagtgggggttctggcccaagtccccgcctttccctgaggcctcatctttgcctccayctgtccacaggtatgatgccgccaccacctatgggcatgatgccgccgccgccgccgcctcccagtgggcagcccccaccccctccctctggtcctcttcccccrtggcaacaacagcagcagcagcctccgccaccccctccgcccagcagcagtatggcttccagtacccccttgccatggcagcaaagtgagtagaatattttgggcttgtgggggtgggtgggatgggggtggggctgacaggaaccatagagcctcacacaagcaggcaggtgtcttgggatgagcccctgggctctgctggggttgtaaacagaaagggcctcctggtccagggggtggaggggcatcttgaagaggagagctgatgtttggtgtggttgtgtctggggagaggttcgtgggggcctggaggggagcctgctattgtaggtagggggccagaagtccagaccctcgcaggctgagtgagcggctggctggactgagcctggtgcatatgggtcgagtgggatggtgcatgcttgctctggcaagggctgcgattggggtgagagactgcagaggtgggactgggcagtggggagacagcagctgtggccttgaggttgaatgtgccgttcggtggtggcggcggctgggcggagggacatcagagctgttcttgtgtctggtaccttcccctcagcccttccaggggcattggtgacaaagggcttactctgttaagcccagagacctcgaggctgaccccagggtagtcctgcccacccctccactccccatcaccagccccgcccacccgccccccaccaccgtaccgcatgccaagcaaggagcaggcgcccctcgcccccatcccaaggcagcagccgcagacagccgcggtgtgcccccgcgcgtgtgaccttgggcttctttaccaccccagatacgacgactaccaccacgagcgctggcacagggtccatcccgccatggcaacagcagcaggcggctgccgcagcttctccaggagcccctcagatgcaaggcaaccccactatggtgcccctgccccccggggtccagccgcctctgccgcctggggcccctccccctccgccgcctccaccgcctggttccgccggcatgatgtatgccccgccccctcctcctccgcctcccatggacccttctaactttgtcaccatgatgggcatgggggtggcgggcatgccgcccttcgggatgcctccagctcccccaccgcctccaccacagaactagactkgttttttaagaaaatatatattatatakagagagaattggtctcgtttaaacacgccgaacctcaccatatggagccagacattgggaygcacgcatgtgattgtgtgtgcacgcatgtgtgtgtgtgcacgcactgggctgggccaagcgactgaggattcgcttgggaacgggcaggtggtagtaggggcgccagcttgggctctcctggcgccccgtagcatcgagtgtcttctttgtcttctttctctcctcacccaactccctttgcctctccccaaaccgggccgccaggatccctccccgcggcggcgatggcccgagccatgagagtgaggactttccgcgcccattggtgacccttccaggcagacagcctcagcaacgcccctggtggacaggatggttcggcaaagcagcctgagttatttttgtggacggaatcggaacacgctggctccatatcgtgaaatttttattaatttttttytttttcctttgttacttctttatcttttcctttcttcagactccgtccaaggagatgctctccccggtcttctgctgcaatttagattcctttcccttctctccagttctccttcccttaccaaggagaggggagcaaatggttttgggcaagggctttggccattcatgtcaagctggttgtgggtttttcaaggtgccatagccacccccaaakatgtttgtttaaagcgtggggttttttaatctctgccacccttgtcaagggagtcttgtaaagttgcckagggtaggttcatctccaggtttcgggattcccatccgtcctggcgatcctgccagcagtgggtgggcagcctgagctccstcgggctcgcctgccagcctggagttcttcctgtgctccttgatcacctgagctgcctcagattccatttggtcctctccttcctggaaggcttccttttwtgttttkttttaatcccaaatgtctgaatgttttgcagtgtgtaggggtttgagccccttgttcattctccttcctttttcctcccgcttccctctccatgaagtgattctgttgacaataatgtatactgcgcgttctcttcactggtttatctgcagaaatttctctgggcttttttcggtgttagattcaacactgcgctaaagcggggatgttccattgaataaaagagcagtgtggttttctgggtctgcttctttattttctttttaatgcctgccccgcccggtttttcttttcacataaacttcctctaccaccagcagcagcagcagcaccaaaggtgccttaactttcgttcagcaccaggtccgggggggtgagactgtgggtggttaattagggaagcccaccacctgcctcctgtgtgtggctttggtggtgggagctcagtgtgtgggtggctccacagtctcccctttggtgactagttaacatcgctgagaaccaattttgcccctccttgttcactgctcatttttctagtctctgtcctttgaaggctttttcctggggctcagacgtccacgtttgatgagctccagtggtgatttgtgcctggaagctgccacctaaggccctgggcctggggaggcatcaacactaaaggtcaagccaactaatcctgcctgtcaggcacagagcagctaaaattaaaaccgccaagtggcttttttccttctctgctggtgacttgcagcctgccagcgctgtaggctttggcgggggtcggggggacaggataaagtgccccatcttgtgctttgcaagcacttttcaaagggtcttctgctttttttccatgtcttgggcggcgagtgggtagttactgttagggttccagaaaaatccatgtggagtctccaccaggtagtgaggtcctctcctgggcagaggtgccttagagctgccctggttccacctgcctctccttccttcagggcggctgagggacagtaggctcccccagcatctggctgctggggccagcaactggcctgggctgctttccagctgtgagctagggctggctactgctgtttactggggtgtctggtcccccgtccaggaggcctgtgctttgctatgggtctgccaggcttgaggagccctcagaagcaaggcaggctcagtgcgtttccccagccaagccctaaacttcggctcaccaaaaggaggacatcttttttgcctttgtccttaagtggcagaatgggggcagggcctggggcctggctaccctctttgaccttggcttcacctcattgcttctcccacaagcttggtttccctggtgggctcattgggtggttaattagctctttgaagctctggaagcggcaaagtggcgctatgtgggttttagaaataaaatcaataaatgacttaaccacagcttagctatctcctccgcttctctcccccaggccagctccattcctgtgctccctccctttctgctccctgccgtcagcttttgttaaggttttggagaggaagtggctgactaaggcatcagtctccaaggtgctagaggccctgaaatggaagagacagcaggaaggcttggccctctgaaccgtggcaagcacttgcctctggcagaatcagagagagaaaggcctgcccacctgtcttaagacacctggggtgggaaagcaagccatttactccatcacattgtgacagggctgtgcttgccccaccccctctcctcacgttcatttctgctgctgtagcagcactgtccccgtccctcaaggcctggcaaggcctggcaagaggaatgccagtggggaaaggtcagcctcagggctctgttactgaggttcagccaagggctctggagaaacccaggattggtccaaggaaggaggccgggtttctagttagaaacttagacataaataacctcgagtgagttcaggttgtaaaagtgcttcagggttcattaaacctgcatacacaacaccaaggaggggcggaggaagcagggaaacagatgagatcgtgctgcccaggtgtgatcatgctgggctggggcatgcagtgtcaccccgggacaaagcctggaaacagtggggagtgatggcatgacaaagacggaaagaagccacagaaaaggtagttggagaaagttaaaaatttcccagtaaaaatgttcctgagagcaagcgccctgggtgcaagaggggagagtagctgggaaaggatggaatgaacttggccttccctgcctgtaagatgtggatggtctatggggatcgggtcctcagtggcaggaacataaagtcttgcaggaaataggggtcaatgcaaagaaggtgtgtgtggccaaagcaggctgccacgattgggctgtgaggtgacggcatggttaacaagctactgcctgcctggcagtggactgccaagaagtctcagctctactcacagcaaccctccaagggacaagtgcgggctgtgaagaaccttggatgccaggccaagctggagtccaagctgtgcttagtggaggatggggatgaggcccaggagctgaggctggggtgcaaactgtgaaaggggaagagaccagacagctgccagcattgtttttttgtttgtttttgagacagagtctcgctgtgtcgcccaggctggtgtgcagtggcgtgatctcggctcactgcaacctctgcctcccgggctcaagtgattctcctgcctcagcctcccgagtagctaggattacaggcatgtgccaccatgcttggctaatatttgtatttttagtagagacggggtttcgccatgttgatcaggctggtctcgaactcctgacctcaggtgatccacccacctcggcctcaaagtgctaggattacaggcgtgagccaccgcgcccggccagcattgttttttaatggtttatgaaacacttcttaagagaaattggaaattaacagaaaaatgtaaggaaaagttgtttgcatccccgtgtctgtggaggtgtattttggtgtttttttcccgatcttttttctctacttggaaatgtggcaggcaccacagaagacagtgtgcccgtgccttttgggggcaggggtagagcagggcttgggagcctggagacctctgtaggacttgaagtttggcccacatactaagccggtgattccagggctgggtctgccatggctcagaaagtgatcggaggccgggcgctgtggctcatgcctgtaatcccagcattttgggaggccaaggtgggcggatcacctcaggtcaggagttccagaccagcctggtccaacatggtgaaaccccgtctctactaaaaatacaaaacttagctgggcatggtggtgggtgcctgtaatcccagctactcaggaggctgaggcagaattgcttgagcccaggaggcggaggttgcagtgagctgagatcatgccattgcactctagcctgggcgacaagaatgaaactctacctcaaaaaaaaaaaaaaaaaagttctcagaaacagcttggctttctccgaaccaggctctcaatagtatcctgcagctgtccaggcttttgacctgcttccttggccttcagaacagaacacccagctcttcccctccaccggcccaccacccgggaggcccaaacagcctttgaactagcacaaggtcctggttcctttctcttaaagaacagcaggatccgaagcctgccctcacaagatgaggaggcagcagctgagaggcagggatttttttttttctcattggagagtctaaatttggtgaaggaatccaaagctcagaaaggtaaagcaaccagcttgaggtcacacagcaagtcagtgctggggccagaacacagcagtgaatgggaggatagccaaagcctccagggaagggctcaaagctgtggggctatgcacacaaatggggtgaggtcctcgaggtacagattaggcacccattttataggccaggtcacagagctggtttacaaaatcctgctcagagtgtggccccaggtggcaggaagaagtgaaagaaggcctctaatcacttcctaagcagtggaatcacagggagaacttactgtcattaaaccagtatgatgatggagtggggaatgcctcagtttctcccaccgccgagggcctataggactacagttcccagggccccgtgctgcaggctagcggcctcccgccaatgctggccagtaacctgagcatccctctccaaaaggtcacttcagggctccttgagggacagcaacagggggagcctagagctgctcagcttcggtgggggtggagtgagggctgtggccctgcctcacacaacctccctcacaccacccctgcaatgcagggtcgtgggcccctttctcaaagacatccagtggcctctgctagttgcacctcttccgtcaggggacactgacttggctcctgcaccacagcctgcagggggtcctggttccttttgccacaacacatggcctcccatcctggttcagccactgacagacagctccccaatccagcactctgcctgctccttcttgtatccaaccctccaaaaggcagggacaagggacagaagaccatgtgcaaggcctggaggaagtgggtcagcacaggcctgtgaacaagccaggccagtcttggcggcccaagtggagctcacctctccctcccctctcctctcctccccttgccctcaaaatagctccctgagctgccaggccaagaccctcccattgcaggggaggcggggcgtgctgcccagagccaggctttaaatccccttgaggctggggagctccactccttggctggaggcagtgctgaggccgccgtcccctctaccatcagtccagtccggcccgccctcctgcagccatgtcccggcccctgtcagaccaagagaaaagaaagcaaatcagtgtgcgtggcctggccggcgtggagaacgtgactgagctgaaaaagaacttcaaccggcacctgcatttcacactcgtaaaggaccgcaatgtggccaccccacgagactactactttgctctggcccataccgtgcgcgaccacctcgtggggcgctggatccgcacgcagcagcactactatgagaaggaccccaaggtgctgctggggagcctggggtgggggtatgggctgaaggcgctgccagggagctggcgatcttgacttaagtggctgcccctcgtcactctaggttcttgggggtggagaatccaggggtgccaggcacaaggggtgctgggacaatctgagggagaaacctggggcaggagtgggggtcagggagctcagagcaggtgggctggctgcaaagggtcagtgcccactcggagaaggttggagtgggtgctggtgggcaggacggcgcctgtggcctggctgggcccaggtggaaggacacatcagttgctgcatgtatgcgcggtgtgcctgtgcagcaggcggggctggggcagctggggcggcagagatcaagtgtccggtggggtcactggtaaatgtcagcaacctgacacgcctcggtggggagtgggggaggggcgggcagacggcccaggaggggacccaggaaactgggagaccaggcactggcagcatcctagtttctggtgcctctgggtctccttgggattgaggcttgagggccaaggggaactggacagtgcaaggatgggaggtgacagtctctagcccagtctctagccactgtgtgaccttgagcaaatgacttttttctctgggccttggccttgccctcctgctcttggaggcgcttccacatgtcctggcacctgctgggctgtgcagggggaaggggtgcccattctcccgagtacctcagtccctgaagtgggtatggccagcgctatttcccagatgaggagactgaggccaaagagagtgatttgtccaaagtcagaggaatgctgggaccagaaccttaaccgctgggccccaaagcctgagacagggagaaacaaattggggacagggatgggactgctgagcagggcaggcgggccagaggtccaggcgtggctgggcctggctgagtgttggtgtgtggccctgaccccattccctgcccatccgtctctctgggcagaggatctactacctgtctttagagttctatatgggacggacgc

SEQ ID NO: 97755 - DNA, 36268 bp, Homo sapiens
caaggtgagcagattgcttgagctcaggagttcgagaccagcctggacaagagggcgaaaccccgtctacaaaaaatacaaaaattagccaggcgtgatggtgtgcgcctgtagtcccagctactcgggtggctgaagtgggagaactgcttgagcccaggagcctgggtgacagagccagacctcgtctcaaaaaaaaaatttaaaaaattagccagggtgctggtgcatgcctgtagtcccagctactctgaggcttcagtgggaggatcacttgagtccaggatttaaaggctgcagtgagctatgattgtacaactgcactccagccagcctgtgtgacagagtgagactgtttcaaaaagcaaaaagaccaaaaactgaaaaccttaaaaccaaaccaggtgtacaaatcccagtttaggccgggcgtggtgacttacacctgtaatctcagcactttgggaggccaaggcaggtggatcacctgaggtcaggagttcaagactagcctgaccaatatggtgaaacccagtctctactaaaaacacaaaaacattagccgggcatggtggcacgtgcctgtaatcccagccactcaggaggctgaagccagagaatcgcttgaatccaggaggtggaggttacagtgagccaagatagtgccactgcactccagcctgggtaacagagtgaggtcccatctcaaaaacaaacaaacaaaaaacaaatcccagttcaggcaatcttcctgctgaagcttcaggtcatcagcccccagatgggctgcagataaaccactaggctttcagaactgagcatttgtttgttgtcctccaggttaagatgcagtgggggctgctggcagtccatgccaggtgcacgtggcaactggcacaagtggctgtggctggaaggcaggagacctggctccctctggtgctgccagcctggctgtgtgctcggggatgggtcccttccctctctctgtgtcaactcccaccctgcaccaatcagggtgactgaatgtggggagggagggcgatgccccttaaaagggctcgcttagaggagtgaatgtacccctggcaccgtggtagcagacaattattgatgtttgctagttatggaaggcggggcagaattagtcaccgtgaattagccctgtggtcaaccagagatgagacctttggatggacttgacctctgtgaccccttcagcctggccctgggttcccccagccctctcatgagtccacagtgtcctctagcttttgctcaggccaggctggccagcccagcccccattgctgcagagtggtcgccaacagagcccctcctgggttccgggcttatcacctgcctccttccattttcctcaccaccgtctgcccaggcagggcttatgggtgtcggggaggtgttgagggtgtctttgctctagatgcggtccagagagactatggggtttgctcatggttacccagctcatcgatgctagacaaggacaagagcctgggtctgcagagtgcagggataaagccttgagtcccagccctgaggggagggaggcaattgccagggctggccagctcctgacaggattgccccccgcaggtggtactggccatgccctacgatacgcccgtgcctggctatcgcaacaatgttgtcaacaccatgcgcctctggtctgccaaggctcccaatgacttcaacctcaaggactgtgagttcatccactggtagccagcaaccccagcttgcccgccggccacgcccagcgcaggccttaccctgtccccacttttgtccctcagtcaatgtcggtggctacatccaggctgtgttggaccgaaacctggcggagaacatctctcgtgtcctgtaccccaatgataatgtgcgtcaccccctgggctgggggctggaagcctgagtccttggcagcaggggtcagggagagctggggaaggacacttgctggtgccctagtcacacccagggcatattgctggccttgtgcatcctgtgcccccacctcaagtcttttgagtgcaaggacacctgagtcctgaggaaactgggttagcgaagggcactttggaggggctgttccctggcgacacccacaacacactcggttcttgtacccctcttcctgacactgtctctcgccactagttcttggtggaggaaaggcccctgggtcccagagagggggccggctcagggctcaggggtcccggtatgggtgggagtccctcctggccacacccaccgcagctttaggccatgcccccaccgccctgactcacgctgcctcatgctgtccccagttcttcgaagggaaggagctgcggctgaagcaggagtatttcgtggtggctgccaccctccaggacatcatccgtcgcttcaagtcttccaagttcggctgccgtgatcccgtgcgcacgaacttcgatgccttcccagataaggtaccatgcgtgtggagggcgactctgtgaccggacagtgtgtgctaggcctctccctccagcctcggcctgcctgccccatgtaatagataagggagtggagactgggagtgtgggagggtcagttgttcaggattcacaatccacaggctcagaacctgggcttccctcctcctcccgccccactccccccattcctcccacccccatgagcaccggcctgcctctgcccacagcccagtcacagaaccgtgctgggctctctgggggcctccaaatggcatagggcagtgaccatagcatggaatgtggtttggagcccagactgacccctccccctaccccaggtggccatccagctcaatgacacccacccctccctggccatccccgagctgatgaggatcctggtggacctggaacggatggactgggacaaggtgggcttcagggcccctctgccccatctgatgctctctgcctcggggttcccttcccagtttgggagcgtgggaggatatgaatggagtgaagggatcagagcctgaggccagagggaccgtcctggaacctggcactgcagtgggggggcccactgggatgcgtagtgtgtgaggagacccactgggctgaggtcagcatcctgactgcccaccccgtgtgccaggcgtgggatgtgacagtgaggacctgtgcctacaccaaccacacggtgctgcccgaggccctggagcgctggccggtgcacctcttggagacgctgctgccgcggcacctccagatcatctacgagatcaaccagcgcttcctcaacgtgagtccggaggcttgggggatggtgtgggggtgaggggggacacccagtctgggcctgggagtcggggcgtccagccagggccctgagactctggggcagtgggggcactgggcagagctctgggggtgtggggctggggactggggatgggggttcctgggtctggttctagctctgggctctctgggcacagcgggtggcggccgcattcccaggggacgtagaccggctgcggcgcatgtcgctggtggaggagggcgcagtgaagcgcatcaacatggcacacctgtgcatcgcggggtcgcacgccgtcaacggcgtggcgcgcatccactccgagatcctcaagaagaccatgtgagccccgctttccagatcccgcccctctctaggccccacccactcaacgcctctgtcacacagaagccccgcccttcaccgaccactctctggtctctgggccctggcgcctttcacaggtggcgtcattcttacaagcacagcagccccttccagtgccgccctgtcctgagatgacctcctcttacacacagcacccccaaccttccccaggtctgcattccctgccccaggcccctttcagcaagacaccagggtaggggccccagggcagaggccttcattgtacaggggtgagtggtgaccctcgtccaacctcatcctgcagcttcaaagacttctatgagctggagcctcataagttccagaataagaccaacggcatcacccctcggcgctggctggttctgtgtaaccccgggctggcagaggtcattgctgaggtgagaggccaccgtagggccagtagagtcaacatgggtccctgcagggatcagctgggtatggtcgtgtaggtggttcactgcatcagggctcccagctgaaggctgaaatccctcctgcactgtgttccccaagcctcgcatccacctggaggagggacaccatcttatttgcatgagggtgctctgtgtgctaatggaggccctggctgtggaggtgaacacagcagagggagtcatccatgggtcacatctgaagtgagcctggaagggggcagatatctggtagggaaggcgcaaggtcatgctggcgttaggaaaaggccaggaagccaggaaggcctgctggggtcaggtggggtcagccatcagagctcaaggacgggaggggaggaaggtgcatggatgccccgtgccccatctgggcggctggaggaggaggggctgggagggcccccagagcagcctgctgggtgaagggggcttggctgacctggaaatggccccttctgtgttgggaggagggaggacatggggatgggcttggctgagagccgtcttcccatagcgcatcggggaggacttcatctctgacctggaccagctgcgcaaactgctctcctttgtggatgatgaagctttcattcgggatgtggccaaagtgaagcaggtggggagagatgcaatgtgggacagctgtgctgtgtggagagcgctggaggggccagatgtctgggtcaggcgtggcaaatagagctcatctctcctgccagcccaggccgttggtggaagttgcctggagtctgtggtgggaaggcatcatctgacctcacatgaacagtgctgacattgattagcaatgtctgccctggtacaggagtggacagaagtagccagtgagcctcctggtagccatcctcctggggctgactggagtgtggactgtaggatttcctgaggctgtggcctgttggtgagcccttccccgtctctgcctccaggaaaacaagttgaagtttgctgcctacctagagagggaatacaaagtccacatcaaccccaactcactcttcgacatccaggtgaagcggattcacgaatataaacgacagctcctcaactgcctccatgtcatcaccctgtacaaccgtgagtggcagccactctaccctgtctctcagtgctcccccgtgttcctgcggcatagtacatattgcccaaccaacatctcctttggacttgggactactcttgggacatggaattatccccatttcacagatgggcaaactgaggctaagagagcatagcaagtgattgttcgagtcaggcctacggtgtcccagcccagcctctgtcaggagctactacccagagggaaaggtaggcccactggatccctctcgtttctccacaggcatcaagagggagcccaataagttttttgtgcctcggactgtgatgattggagggaaggtgagaagccaggctccagccctgggctcccgtcctttgatatatccaggttgaggtcagcccagctgagttgcaggatagggggtggggggccaggcagtagagctgaccccagactttgtcccctcaggctgcacctgggtaccacatggccaagatgatcatcagactcgtcacagccatcggggatgtggtcaaccatgacccggcagtgggtgaccgcctccgtgtcatcttcctggagaactaccgagtctcactggccgagaaaggtgggtgctgccaacagggaccctagggaggctctgactagttcagtctcaggaagaggtatcagtcgtctcttcctgggatacttgtacttgaaagaagaatctggagagggcaatgcttaaaccatgaggaggccaggcgcagtggcccatgcctgtaatcccagcactttgggaggccaaggtgggtggatcacctgaggtcaggagttcgagaccagcctggccaacatggtgaaaccccgtctctactaaaaatacaaaaattagctgggcrtgrtggcasgtgcctrtaatcccagctacttgggaggctgaagcaggagaatcacttgaacctgggaggcggaggttgcagtgagccgagatcacgccattgcacttcagcctgggcaacaaaagcaaaactccgtctcaaaaaacaagaggaaacaaaacaaagcaaaaaccccatgaggatgccctctaatggtggaatttcaggcagtacagggtgaaattaccttcaaatctgcaacagaggtggggaaatccaggttggacctagatggtcaagaatcaacaagaggtagagggcagtgggggtgcggtgtgagagggaggcttggctggtgaagactgggagtttggggtggggcgactctgagtccagctatgcctggggccagcctaatctgagagtccccagctggtgtgagggtcttccctgagttgacttgtccccctgctgccaccccacagtgatcccagmtgcagacctctctgagcagatctccactgcgggcactgaagcctcaggcaccggcaacatgaagttcatgctcwacvggsctctgaccattggcaccatggacggggccaatgtggagatggcagaagaggyrggagaggaaaacttcttcatctttggcatgcgggtggaggatgtggataagcttgaccaaagagggtatgggggtcagggttcacgggcaaaagacacccaggtgtggctgctggagagtggtgctgggagcaagcggcacgtctggaaagactggtccaggcccagcaaggtcttggtcatggccagcaggattctgggaaactttagagggcgcttacagcaaataaggttaatgaaattggaaaagaaagaagtaatatagaactgaaggaaaaggaagagaatattatatcaaccctaagagataatattgtttgggaaatggaagtaaaaaaatccttgctctacgccgggtgcggtggctcacacctgtaatcccagcactttgggaggccaaggcgggcggatcacaaggtcaagagatccagaccatcctggctaacacggtgaaaccccatctctactaaaaatacaaaaaattagccgggcgtgttggcaggcgcctgtagtcccagctgatcgggaggctgaggcaggagaatggtgtgaatccaggaggcggagcttgcagtgagccgagatcgcgccactgcrctccagcctgggtaacagagtgagactctgcctcaaaaaaaaaaaaaaaatccttgctccctgaaagccatgggcaaaagggaaatatgggcacagtagttacaaggggcctatggtcagaaacagttcttcagagaagacattatcctggcattacattaaaaaattttattttattttattttaatgtatttttttttttgagacggagtctcgctctgtcacccaggctggagtgcagtggcgcgatcttggctcactgcaagctycgcctcccgggttcacaccattctcctgcctctacctcccgagtagctgggactacaggcacctgctgccacgcctggctaattttttgcatttttagtagagacggggtttcaccatgttagccaggatggtctcgatctgctgacctcgtgatctgcctgcctcggcctcccaaagtgctgggattacaggcgtgagccactgcgcccggccttttgttttgttttgagatggagtcttgctctgtcacccaggccgcagtgcaatggcacgatcttggctcaccgcaacctccaccgcccgggtacaagcgattctcctgcctcagcctcctgagtagctgggattacagatacccaccaccacgcccagctaatttttgtatttttagtagagacggggtttcatcattttggccaggatggtctctatctcctgacctcaggtgatccaccctcctcggcctcccaagtgctgggcttacaggggtgagccactgcgcctggcctatttatttttatgtttttgagacagagtcactctgtcacctaggctggagtgcaatggcmtgattttggctcactgcaacctccgcctcccaggttcaagtgattctctcacctcagcctcccgagtagctgggattacaggcacccaccatcacgcccaggtaatttttgtatttttgtagagatggggtttcatcatgttggccaggctggtcttgaactcctgacctcaagtaatccacccgcctcggcctcccaaagtgctgggtttacaggcgtgagccaccgcgccctgcttgaatcctgatatcttagcattggagagagattttccatgttattagtcttcaaaaatattttaaatgtttgtataacattccatcctatgagcatgtcacaacttatttaatcaattccatgtggctggacactaaggttaatttccggtttgttaaatattactgtgatgagcaaccttttaatgtctacgtccacatctgatgatttccttaagataattatcagaagggtgatatttctgagttaaaaagtatgagttcttaaggctcttgatacagattgccaaactgctttccagaaagtttctcccagtttacactcccacaacagcttcccagarttggcattaaacactgaaagaagtgtctcctgtgaggcttcactagaaagctggctgtcccatgggcaggagggagctgtgagatgttgtgagcatggtcccgcatgctcagaacgaggcctggaagaaccctctggctgcaggatggagacagtgctggagggggcaggtgggggaccactgtgggggctgacaccataatgcagggagagttgcctgagagtcgcacaagggactagagagtcgcacgagggattagagattttgtggggagygctggtttctggttggaacggttaggttttgagactggcctgtggagcgctttgagccgtggtgggggcgctgagggtcagctgaagggttatctttttttttttttttgagatggagtcttgctctgttgcccaggctggagtgcaatggcatgatctcggttcactgcaacctccgcctcccgggttcaagtgattcttccacctcagcctcccgaggagctgggattacaggcacacgacaccatgcccggctactttttgtatttttgtagagactgggtttcaccatgttggccaggttggtcttgaactcctgacctcctcagatgatccgcccacctcggcctcccaaagtgctgggattacaggcgtgagccaccatgcctggcccagttgaagggttgtacctgttagctgctcttgctgccccagggcaaggccggatatggacttgggctactggaggagaaaagccattttggagcaaacaaactggttaagagacagcagtggcgtgtgggagaaaagagcttgtttgggggccttggctctaacacttagctttctgtatcctccgggcctcagtttcttcattcacaaaggagggatgaaaagctgagcagagaaggggagttgcagggaggccctgcaggggcgatgtggcagccctggggagcagcaggctggacctgggttttgaccctggggcatgggacttctcagcttttctctggaagaggagccaggaacccctttccggggagctgaccacagctctgtcctggcaggtacaatgcccaggagtactacgatcgcattcctgagcttcggcaggtcattgagcagctgagcagtggcttcttctcccccaaayagcccgacctgttcaaggacattgtcaatatgctcatgcaccatgaccggtgagctggttggcccgggaatcactcaggtggggccgcagggcagatcgaggctcaggtgtgtggtggggaagccggacgcgggtcctggtagttggagccaggcgcctttggaagcagcatgaccctctaggtccccggctgtccactgggacagggcaggcttggcccttgacctcatagaacttaycctagccccctaaaggaatagcacatgcctatcctttcccctccaggtttaaagtcttcgcagattatgaagactacattaaatgccaggagaaagtcagcgccttgtacaaggtgaggggtcctgggccaggggttggcagggctttggtggccctggttgggatgaggcagaaggtggagatcctgccagcagagtgaaccagagcttccctttgacctgcagaacccaagagagyggacgcggatggtgatccggaacatagccacctctggcaagttctccagtgaccgcaccattgcccagtatgcccgggagatctggggtgtggagccttcccgccagcgcctgccagccccggatgaggccatctgagcctccagaccagaccccaaaccagcccttgagtctgtcacactctcttgggccagccccagcacctcatgcagagggtggggtactggagttagatctctaagcccctcctggaaccctcattttccccactctcaatgtcccagtgtccagcgtgactaaggacacgggcccccttccgtcctcgggctcccggtcccctcctatttatggggtctgaccaactgcacccactccctaataaattcattctccttgggagcctccttactcctctttgttgggaaatatttttagctcttggcgggctcaacagcagccgcgcagtcacccccttatcctccaccctcggcaggtgcgtcccacggcgggacggtgatgggaggtggagggggcgacccgtgggggcggggcctaggcctctccagcccctttcctggcgtcaccctccacgcctctcttcccagtgccgtgtccatactaggtcagcggccagcctcgctggccgggggcggggcgtctgcctgggtggggcccaccggggctgggagccgggacttgggctgaggcttcccggaccacggaggatccgcgctgtcgagggcaggacccaggagggggaggaagcagaggatgctcggcgccttcttggctccgcccttagccccgccctactgcggcgtttaagggtctcttagcaggtggctacactggatccaaagtcgggggagtgttacggcagggaacactcgcagaccgcctagtctaggccctcattatggggaaactgaggaacagaaaggtcctgtttctaagtcttacattaccaagactgaggtgcgggggcggtcctggatcccccgccccaaggctgggaggggcacgcctcggaagggaggtttggggtcggtggtttcacagtgagtgtgtctgaagccaaatggtcggaaaccgttacccgctctcctaggcccggctagtggggaccccaaccgcctgcggctgcccctcccaagttcctccctgttggccaggcatccaggtctccagtctccgagctgcggagaacccaccgccacatgcggctgcccctttccattcgaccctgtggggagccaggcttccggggccccgttcctcctgtgtgaactgggccccccgcccccattcccagacatcaaggccgcgtctccagatagccacgatttcattcctcgctccccacaggtccctctccccaaaatattcccatcttgtcctagcccatcccccagactatctcaaggaccagctgtccccacgcccccgacctccactaggcctgtgccacccgctgcctgcaggaagacgcccggtcccgggccgggttagccccatgggaacggtttgtctcgaaaacaggaacccgagctgggggctgggcggggcgccccttccccaccgcagtccgcttcctgcccctcccggcttcctccgcccgacacccaggcagggcggggggcactggggcgtccgcggttgggggaggggctcttcgtttcggtcccccctccgcgtcccgggcggcggggcctccggtcgcccgccctcggggcagctagtggcgcagccccccgcccgcggccctggcctcccgggcggcgcggcaggggaggggttaagctgccgcagggaccgccgcgtgcggggcgagagggagcccccggtgggggtggcgcagccggcggtgcggagctccgcgcaggggcggaggggggagggggcagcctggcgcgggggcgggggcggggcggcggggagcggggccgcggcgtggagagcgggcgggagccgcagccgcagcgaggccggcgggcgggagcgcacggaggtggggtcggccaggccggtgcgggctccttgcggcaggtcccaagagtgagtgggcgagcgcgggcggggcgccaggcgaaggagggcgcggcccccagcgactccccccccgcccagggcggcgcgggcgggctgggggcggcgagcgggtggggagtctgcggcccgggtctgggagagggggcagcggccacgagagctaaggcgcgctggatccccggagggcggaggacctccacggtgcacccagcttttcccagccaccttccagcggggccctcccccgcgtacccccatttggcagatgagaaaattgaggctcccagaggccaagtgattctcaaggtcacacgaggaagcggtagagccaggcggggacggctctgggtggctcttaggaaaagtccgcctgagaactccgtacaggagctcccctgtcctccagcctgggggagtgagtatgtgtagggccggggtacctttccgtggggcaaggctctgccaaaatctgggagtgaggggagtcagggagctggggccgcagggcgggccctgcaccgcaaatgggaggggggcgacggaatgggcgtgcgcacccatgggggtgtgtgcatgtgtgtgggagtgtacatgcgtggagaggcactgccttgcgtgtgtgcacacgtgtgaggatgtcagcgcctgtgtggccgcgggactcaaggctggcctggctcaagtgaacagcacgtccaggaggcgacctcgtccgcgggtttgcattctggggtggacgagctgggtatgtgtgcctgagggtttcttcgtgcaggtgtgcacagggtgtgggtgccattgtgtgtgagagacggaggatgggaggccggtgcctgtggcccggtgcgtgtaagtgcggacgcctgcacctccacttaggtccccggcctccgacgamtaacttgggtgtggagtgtttgcccctgccagggtgcgtatgaccccgccagtgaccggagttgctaatggtgtcatgcacccaccggccacccttggcgcgagcgcccccctctggacaccctgctccgtgcgcgctcacagttcgcctgtgcggggccggggccagggtcaggagccggggatagggaggaagagggcctgtggacaagctgagccgggacccctgggacctttgcggaggtggcctgggagcgctcagttcccaggctsaggcttcccgctgacgcctcctggccgcagcgggctccccccgccccaggaatgttcctctcccatccagtccgcctcccctagggcaggccccctgggggctgccgcagccccgcctcgccttcctgggctcccgggagggggcgaggcgrgcaggacgcctgggttctctccccccacctcccataccagggagaaattcctccgaggtcccctcaggctctgggttcccaaaataaccctgcgggggaagggaggctgtggagggagggaagcgggaggggcgcagagccgagctgcggggtgctgcaggtgcctctggggagagggcgcgaggagaaggcgccctgcggggggctgggcgccagccagtcctgggatcttggttcgtccccatcctcgtgaagcccctcggccttcccgcgactccgagggtgggccggaagcctctctgcgggtccgtttcccaactggcgggttgcaccatcccgggccagaccgtttaaccccgggagtggccgcgggggacaactccgcccctgtccagcagggggcgtgcccgccccgccccgtttctgcccgcggggccgctcccccgcccgcgactccgcagactcccgctctgcctctcccgggacaggggttcggtccgagcccggtgggaggctcccggagcgcagcctgggcccagcccaccccgcgccggcggccatggcaggcaccctggacctggacaagggctgcacggtggaggagctgctccgcgggtgcatcgaagccttcggtgagtggctcgggagggcacacggagcctgagcctagccccgagtctgagcccgggtccctgcctcccaggcacagtccagggcacagccctgacccggacccaccctgctccgcagcgtgcagtctctttaacgaaagcctcctccgcaacgcagggcagagagatgcacgcccttcagacagatgaggtttcccttctctagccttccccagcggcggcgaagggagggccgggtcccggactctgacacttgaggggcattatctgtctcccggggaatccggaggaactcgctatctccggcctgggagctgtttccggctaatggggggcggcttatctggtgaaggggtgccccttccccccaagcgctcaggaaatgacctctggattcttgaccccggggaacccaggctccttccgccccagctggttcccctccggacgatgggcggctcgggcgctcccctcctccagtcctcagggcgtgcctatctctcgcccaccacacctttcctctctaatttgcctcctgctctcggagtcctgggcaagcaggaggtgggcggggtcgagcgtgcacccgaaggaccgatacctggcgggttgcggggtgaggatgaggcatggtagctgcggacccagctcagccacctgtctttgacccttcggagtcagatgactccgggaaggtgcgggacccgcagctggtgcgcatgttcctcatgatgcacccctggtacatcccctcctctcagctggcggccaagctgctccacatatatccttcgccggccttgccaaggcccccgccgtcggagcccrtgcgcagcccctctgcccagcccaggtgcagaatgagcctcgctcctaagtataggccactccttatcccagagctcaggcgtcgtcccagcctccaactagggcctaggctctgccccctccttgctcctagcgactcggtcctgtccccaggctctgtccccagccgaggccttgccctccttctccctagagtctrgggcctgcccctgcttcaggcttgggtgcgccccgtgcatctctctctcccagagcccaggctttgctttcagcctccctcagcacctagtcctccacccccacctccaacccctcccagagctcaagcctcacccccagcatctccgcagagcgcaagccccatccctagaacgtgtctcctagaaccaggccccgcccccagcctccctccacgcaggcctccctttctagagttaagcggcctccttaaccctctccttcacctaccaacaatcccggaaggacaactccaattccctgcaggtgaaaacgtgccacctggtcaggkgagtctttcccctggggctctagcccctcccctttctcccttctctctggcttcaggctggcctggaggagggggcagggcgctgtttctgggagtgggtttgaaccctggcttgtccgggtgggcagtgctgccacaggctcaccccttcctgggtctgggccttaattttcttttctgcgcagtgcgggtggttgtctcaagggtctaatgtacacttggagtggcgaaggaaagagstggaaccatagtttgagggtctttttgcttaggtgactataatctcaaatagctccttgcagcctgctgggtgatggtgggggaagggctatcttgggtgactccccgctcctccaggtactggatctccgccttcccagcggagtttgacttgaacccggagttggctgagcagatcaaggagctgaaggctctgctagaccaagaagggaaccgacggcacagcagcctaatcgacatagacagcgtgtgcgtggggggagcacagagggctgggggggcactcagtatcctataccatctgtgcttaataaatgtctgttgaactgaatgagtgagggtcatgttgctctctcgcttaaaaaccttccatggctccctattgccttcaacatgcctcctctgggcagcttggcgttcctgcctcatcttccactgccaccacccatcccacacacctcctcctgtagctgcgctgggtcggctccccgtcggctgagctctcgagtcctttctcatcatggtgctctgctcatatcatcccccttgctgcctcctccgtgttaccaagactcagttcaggcatgaagtctccgtgggctctgagggttcggggctcttccggggtagaatttgtcgttcccacctctgttttccatggcactttgtacagactcctgtacaaagacctctgtacatgtgtcacgctgttttgtgatcatgtgtttctgtgtctgtctccctcagtagactgtgagctcctcgagggcaggaaccgtgtcttactcatctctgtattcccagcgcctagcacagtgcctggcacagagtacgttgttcataaatgtgtgttgagtgcatgacggggtsgggggagatgaggaggagttgctgggactgggaacattygtgcctaggacagtgcctcgcattatgtaggttctcagtaagcgtgaatggtgtgtctgtgtgagtggggggccacgagkcatgcgcatgtccagcaaagggctcactacccctgcccccccagccctacctacaagtggaagcggcaggtgactcagcggaaccctgtgggacagaaaaagcgcaagatgtccctgttgtttgaccacctggagcccatggagctggcggagcatctcacctacttggagtatcgctccttctgcaagatcctggtgcggcycgagggctggggggtcaggggtccaatgtgggctggaagagagttctaggaggggcagggtccctggcgtaggctgggtcacagggtgcatcaggggtttcagtgtaaccactgaaggtcagctggagggtgaggagtggctatcagtgaggggagaggcyrgcaaggtgctgaggccactcctcatgcccccagtttcaggactatcacagtttcgtgactcatggctgcactgtggacaaccccgtcctggagcggttcatctccctcttcaacagcgtctcacagtgggtgcagctcatgatcctcagcaaacccacagccccgcagcgggccctggtcatcacacactttgtccacgtggcggaggtgcctgcccctccctccyggtgtctcccaaccaccccacatgccagtcaggccaacccttcccttcccctaacccactgccttctctctagataagctgggccaaattctgggcccactcagtgactccctgcctctccgtccccatttgccttccagaagctgctacagctgcagaacttcaacacgctgatggcagtggtcgggggcctgagccacagctccatctcccgcctcaaggagacccacagccacgttagccctgagaccatcaaggtgcctgggactggggaggggccggtgcttcccaggtctgtcttcactgggtcctcccagcagcactgggggctgggcacagctgtcctcatttgatagatatggaaatggaggctcagaggggttaagtgcttttctcagtttgcacaatggcaacagcagagtgggggctcacaggtcgtcagggaccccaaagctagtacttttttttttttttttaagacagggtctctctctctgttgtccagactggagttcagtggtgcagtcacaagctcactgcagccttgaaytcctgagctcaatcgatcctcccacctcagcctcctgagtagctgggactacaggtgtacgccaccatgcctaatttttgtattgttattaattttttttttttttttttagagatggggttttgccatgttgcccagactggtcttgaactcctgggctcaagtgatccgcctgccttggcctcccaaagtgctgagattatggcttgagccattgtgccttgccacttgtagtttcttcttttctttctccttcattttttattatttttgaagtattttgaagtattgagtaacatacatatagaaaagtatataaaaacatatgagactgggcgtagtagctcacacctgtaatcccagcactttgggaggctgaggtgggcagatcacgtgacatcaggagtttgagaccagcctggccaacaaggtggaaacccatctctactaaaatacaaaaattagccaggcatggtggcacgcacctggaatccaagctacttgggaggctgaggcaggaggagaattacttgaactcaggaggcggaggttgcagtgagccaagattgtgccacttcactccagcctgggcgacagagtgagactccatctaaaaaaaaagaaaagtatataaaaacatatgaatagtttaaagaaaaattgtaaagaaaacactgtgtaactactgcccgggttgggaaatagaaccttgccaggcccccaagcgcccagcactttagagcataactccctccccacgacttttgcaatgatgatcttgcttttctttatagcttcaccatgtaggtatgcggtccaaaacaatgtggggctttttgttgtctgttttgaactttctatgaatggaatgttgtttgtgttattttatgtcttgcttttttcattccacatggttctgagagtcttttcattctgtcatgtggagcaattgttttttcattttcattgccatataatattttattgtacgtctaccccaattcatttatttatttatttttttgagatggagtctgtctctgtcatccaggctggagtgcggtggcgagatctcatcactgcaacttccgtctcctgggtttacgtgattctcgtgcctcagcctcctgagtagctgggattatgggctcgtaccaccacgtctggctaattttttgtagagacaggctttcaccatgttgccgaggctggtcttgaactcctgagctcaggcaatccacccgctttagcctcccaaagtgctgggattacaggtgtgagccactgcccccagcctaccccaatttatgtattgattctattgttgaatgttggggtttttccttttcttttctttctttctttttctttcttttttttttttttttgagatggagtcttgctctgtcgccaggctggagtgcagtgacgctaatttggctcactgcatcactgcaccctctgcctcccgggttcaagcgattctcctgcctcagcctcctgagtagctgggactacaggcatgcaccaccacacccggctaatttttgtatttttttagtagagatgaggtttccaccatgttggccaagatggtctccatctcttgacctcatgatccatctgccatggcctcccaaagtgctgagattacaagtgtgagccaccacgcccagctggtttttccagtttttgctgtttggacggggtggctgagtatgttcttccaggtcattgtcctgtgctgccttgcctccctgagcctctgtttctcctgttaaatgttgatgattccctgcatccaggcctggtttagaggtgtggtgcttttggcagtgagtattgccttgaattcatggcaatgaattcaatccccaggggctgagagagccagtcgtgggggacagtaagggaggtttttactctttcacctgtccctgaccctgactcctcctcaccccctcctacatttccagggctgaggtagggaggatagttgtgggggtatgactcctctgtcctttgtycccagctctgggagggtctcacggaactagtgacggcgacaggcaactatggcaactaccggcgtcggctggcagcctgtgtgggcttccgcttcccgatcctgggtgtgcacctcaaggacctggtggccctgcagctggcactgcctgactggctggacccagcccggacccggctcaacggggccaagatgaagcagctctttagcatcctggaggagctggccatggtgaccagcctgcggccaccagtacaggccaaccccgacctgctgagcctgctcacggtgaggagcagggggcagggaggtggggagctgggcaccaggggttgacagtttccccaggtcctggctgtgggcgtggcctggggctctgggttctggccaagaaactgagatctagcgtgggctctggggtttggagtggatgctgagaaggggtccaggctctggttggggctgtggactgaggtctgatctccaggctggtatgtggactgtgggcagtttgaactgggcctgggtcccgggttgagttctggcaatgggctgtgttctagggctgggccaagctctgcattctgtgggcaggggtggtttctaagcatggccctgggctcggagtgaagttctgggcttggctttacacttggtcttggggtctagggtgggagttgggttctggtttagatccagacaaggttctagacattgggctggggcttaagtgttaaggtttggagtggattmttagctgcttctgggctctggaggggatcagggttgaaatcagagcttctggctgggttccgacctggcttcttccctgacatcttggcaatatgttgtgttcaaggtttggggccatgctgtggtttgatctgtgcgctgggatgacatgggggttgctgtgctgtgttctaagccaggctttgtcctgagtctagcttctgacccgagctctggctgagctgtggcctctaggtcgacctttggccctgggctctgtggcygtgggcaggggccagtgggggtgatcagatctgtgtgtcccaggtgtctctggatcagtatcagacggaggatgagctgtaccagctgtccctgcagcgggagccgcgctccaagtcctcggtgagggggtaytccctcctctccactctgcccttccctcctgagaatcccaggatgtgaggatgggaagagctcttagcagccacctcacccatccatcttgtaggacagaggcatcctgggggtagggcagtagtgttgggyagacttccctctcccagggattcccctctctgttccccggggctctgggctycccctgcctctggccctagctcaggcccgaccatttccatagccaaccagccccacgagttgcaccccaccaccccggcccccggtactggaggagtggacctcggctgccaaacccaagctggatcaggccctcgtggtggagcacatcgagaagatggtggaggtgagctcctgcggagcctgagcagtgtgtggggagaggccagtttgccggagcactgccctggaagccagcacgagtgtcctgttcaagacccagcactcagcccctaggagtcacagggcctggcaggccagctgcacggggctgaagtgcccctgggtagggtgsgggtggaggtatggaacgggggtggtgtcagagacctctctgagacacacctcatcaaatggactgggaacgtgggaagggacaggacctgmtgtcccctttactctcccctcttctggctctgcgtgtccctctgcgtgccccagtctgtgttccggaactttgacgtcgatggggatggccacatctcacaggaagaattccagatcatccgtgggaacttcccttacctcagcgcctttggggacctcgaccagaaccagtgaggagggctggggacctgggggagagggaaggcaactcagcccacttctgcctgggcttcagtttcttgtgtgcaagatgaggtcactgagccagatgatcttggcctgggaagctgccagtgtgggaaagggcacttgcttttgtggggaggagaggctgccagctgtggaggcgcagtggtatctcacaaattcagacagatggggggctccacctgagtcttgcaaagactgtgacctggggactgtggctacaaaagtgctgttttatttgtggagctcacagctgtcaagaagtgtgggcaacttgagctcctggatagtctgttctaatgaatagataagaaaggtttgtaattagcagtacccagttgtttatcaacagttcatatgctgacaatttggaaaaacagctggttctctgaagtaggttaaacatgccccctgaagccagattcatgccctatttttgctgagcagaaaaaactccattcaaaatttaaagtccatctcaggtcgatttattttttaatgttacctgtatttcaaaaatctgttgttttttatttccacattacaaaaatccacrgtaaaataaaatctaggtggtaaaataaatttatagtgaacaaaatgtttaaagtaagaagtgagaggccaggtgcggtgcctcacgcctgtaatcctagcactttgggagactgagttggcaggatcaattcaggccaggagtttgagcccagcctgggcaacagagtaagaccctgtctctacaaaaattattattattatttttgagacagagtctcactctgttgcccaggctggagtgcagtggtacaatctcggctcgctgcaacctccacttcctgggttcaagtgattctcctgcttcagcttcctgagtagctgggattacaggcatgcatcaccgtgcctggctaatttttgtatttttagcagagatggggttttaccatgttggccaggctggtctcaaactcttgacctcaagtgatctacctgccttggccccccaaagtgctaggattacaggcatgagctactgctcctagcctaaaaaaattttttttgggcatgggtggcacgtgcctgtagtcccagctactcaggaggctgaggcaggaggaacccttgagcccaggaggttgagactgcagtgagctgtcatcacaccactgcacttcagcctgggtgactgcgcgagatcacccccatcaaaaaaaaaaaaaaaagaaaaaaaaaggaagaaatgaaagtcccctctttccttttccactggtagaagttgccatgattaagcactgttaacaatattaagcttggcagtatgtggattcttccagtcttcttttcccaggcaggtgcacattgatagagattttgtttgtttggtgtctgtttcatggacaaacaggattagagcataaatctagttctgcttgtggcttttatcatagctgctttatttcttctcccagattttaggcagaggtagttgagttccatgttttctccctgggttggtgggtggatttttatctagaccaccttttcagtgagaatgaccctttgagacgatggaggcctcagcttcatgcagcggtctcagccttaaccctccacctcctgcaggccccaggctgtgtgtgtgtgtgtgtgtgtgtgtgtgtgtgtgtgtgtgtgtgtgtgttggtgagggggaagccctggttgggtatcaaaacctagcacctggttcggcaggagggagaccagcaccggctcccaggaccaggcccagctcaccacttcattgtaaagctccctctttgtttctggaacttgggtgtttccatttctttcttacaaaattatctatgcatttacagcaattgttgatatatctttaggcagcatctaggtacttgtagtgggttctcttttttcttttttcttttttttaatcaccctctcttttttttgagacagagtctcactctgtcgctcaggctggagtgcaatagcgcgatcttggctcactgcaacctctgcctcccaggttcaagtaattctcatgcctcagcctcccaagtagctgagattacaggcactggccaccagacccggctaatttttttttcttttycttttttttgagacggagtttygctctttgttgcccaggctggagtacagtggtgtgatctcggctcactgcaacctccgcctcccgggttcaagtgattctcctgtctcagcctcccgagtagctgggattacaggcgcgcgccaccatgcctggctaattttgtatttttttttttttgagacagagtctcactctgtcacccagactggagtgcggtggcgcgatctyggctcactgcaagctctgcttcccgggttcatgccattctcctgcctcagcctccggagtagctgggactacaagcacccaccaccgtgcccggctaattttttgtatttttagtagagacggggtttcaccgtggtctcgacctccagacctcgtgatccactagcctcagcctcccaaagtgctgggattacaggcgtgagccacctcacccagcctaattttgtatttttagtagagatggggtttcaccatgttgcgcaggctggtattgaacttctgacctcaggtgatccgcccgcctcggcctcccgaagttctgggattataggcgtgagccaccgcacctggcctaatttttgtatttttagtagagatggagttttaccttgttggccaggctggtcttgaactcctgacctcacctcaggtgatctgcccacctcggcctcccaaagtgctgggattacaggcatgagccactgtgcacccggcctaaaaatcaccatcttgacagaacttcacgccttgctttttgttttttttcatctttgtgcttgttttccacttaacccttgatcacagacatctttccatgtggattcatgtagaactacctcattcgttagaacagctgcagagtattccactgtgcggttagtccatcatttccctaaccatcctcctgctgatggacagttagactgttccagtttttcrgtatgattctatgccaggctgccatgaacgtccttttactgatccactcaggccagtatttctgtaggagaaattcctagaagtgggataattggatcaaaagatatgcacattctaaattaggagagagactgccaaactgacctcagacaaggttgtaccagtttgcacccccatcagcagcgtacaagtgcctgcttcccaacttcctcgccaacagtggatgctataaaaagcttcacaattttgccagtctcattggcaaatggtatcttggttaaatttgcatttctttaatactaatgggggtagggtatcttttcatatgtttattggccatttatttcttctgtcaattgcctgttctgattccttgtccattattctactgggtttgttggtctttttctcattgatttttagaatctctgttaatggatattaaccctttgctgttgaatgtgtttgcaaatattttctccctgtctgtcatttatgttgtctttttccatataaaatttaaaaacttttgtgtgctcaatatgtcagtcttttcctttctggcttcttggatttgtgttctgtgtagaaaggccctcagcccctcaagattataaaattattatatcttttcttttttttttttttttctgagacagggtgtcttgccatgtcacccaggctggagtgcagtggcatgatcttggctcgctgcaacctccacctcccaggttcaagtgattctcgtgccttagcctcccgagtagctgggattataggtgcctgccactatgcctggctaattttttgtatttttagtagagacggggctttgccatgttggccaggctggtctygaactcctgacctcgtgatccacccgccttggcctcccaaagtgctgggactacaggcgtaagccactgtgctcggccctatatttttttcagatagccagttatcctaatgctcccttgatttgatggaccacctggatcacacattatgagccccctcataagcaggtgggagtctcaagcgagggccagtcccgatgggaatagcacttggtggctgaggaccctcctatctgtgcagacactgttgtaaaacttcacatgcatcatctaatttartcctcaccaaaatcctatgaaatgtaggaatgatcattacacccatttatagataaggaaacggagggacagggagattactccgctacaggtcaagaggcagggaagtagagctgcgatttgaactgaggtctgtgtctagaacacgtgctcattctttccctaaaatgtattcataggtgaaaaagggcttctgcggaaagccctgggttatgtgggaaaccctggatttacagctgtctttccagcaggatgatgcaggagagagagggatgcgatttctcccaatctctcctggtcccagaactcattagagagttctccctgctgagggctcccgactggtgttgcacacagtacacttcgggagcccgaggctgatggttccatggaaagtacacagtcattttagtttgcacaccaagtgtgaagtgggcaggacaggccactgttctgagaaggaacccagggaaagggactggcccaagaccacacactggttagcggcacttcccacatctgcctgacccctagtccagtgccgccttttctttactctgcaacaggagtccaaaatcaggagttccatgaggacactgggaacagtgggatgggttaggccagcggtggatggttctggggagggcccgagctgaagcgcccccgcaactccccacagggatggctgcatcagcagggaggagatggtttcctatttcctgcgctccagctctgtgttgggggsgcgcatgggcttcgtacacaacttccaggagagcaactccttgcgccccgtcgcctgccgccactgcaaagccctggtgagagtccctttcccggctcacggcccaagccacgcccctccagccccggccccgccctcccttctggccccgcctctgccagagcccttctcaagccaggaaaacctggtaattctatttgcctctcctcctgtggttctgcccggggccctgaggcgggctctaaagccctagtctcaccctcaagaaggaagaagtagagtcatcacctctaaatccctcctcccaccacggcccctcctctattgcagatcctgggcatctacaagcagggcctcaaatgccgaggtgagatggaatgactggaagggctgctgggcagtgttttttttktttgtttgtttgtttgggagagttactrttttggtggggcaattgccaaggagtgaagtaccttaaaatcagaggcgcatggccgggcatggtggctcaagcctgtaatcccagcactttgggaggccgaggcgcgcagatcacctgaggtcaggagttcaagaccagcctgaccaacatagcgcaaccccgcctctactaaaaatacaaaaagtagctgggcgtggtggcacccacctgtaatcccagctacttgggaggctgaggcatgagaatcgcttgaacctgggaggcggggtttgcagtgagccgagatcacgccactgcactccagcctgggcaacagagagggctctgtctcaaaaaaaaaaaacaacaaaaaaacccccaaaaccaaaaccccacaaaatcagaggctcaagatgactgatgtgaagggagtggcgtttaagaggccatttattttgatgacgcagctgcccaggaacagagaacatgggagaaggcatagactgacaattaggaggaggagaacactttggaaggagactcttattttggtggggcagctgctcaggaacaaaggttcctggtaggggggcrcaagcctgcgggatgggatggagggtattctgaccaatgtccctggctggctctccatttgctctcccccagcctgtggagtgaactgccacaagcagtgcaaggatcgcctgtcagttgagtgtcggcgcagggcccagagtgtgagcctggaggggtctgcaccctcaccctcacccatgcacagccaccatcaccgcgccttcagcttctctctgccccgccctggmaggcgaggctccaggcctccaggtaagagggagtcattctgtactggcctgtggagggaaggatgcagggctactggggcaaagaacgcaggatggaagccattccaaagtgcataattctctttttgtggtgggataataaagaagggacaggccgggcgcggtggctcacgcctgtaatcccagcactttgggaggccgaggcgggcggatcacgaggtcaggagatcgagaccatcctggctaacacggtgaaaccccatctttactaaaaatacaaaaaaaaaaaattagccaggcgtggtggcggacgcctgtagtcccagctacttgggaggctgaggcaggagaatggcatgaacccgggaggcggggcttgcagtgagccgagatcgcgccactgcactccagcctgggcgatagagcaagactccgtctcagaaaaaaaaaaaataaaaaataaagaagggacaggtaagggtgccagaaagtggccaggaagccctggaccttctgaggctgaggagagagaccctaatttataaagaggtataaaagtgaaagaggcttcaagattccagttacagtcttattttgttggaggggttaacaaaggattggagaaggtgttatatgagccattggcttgcctttccctttctggctgctctggaggctcttctggggaaagtcccttgccctgataatgtcctggcagctctcttggggtatttgatggttttaggtcagtttgctgaatgacaactggccaaatgattattttgctgagaacagtccgaacaactatgttaaactggggtctaaggtagttgatcacaactgtttgggttggcataagtcctcaaaaaacagaggcaggcacagggcatacatcctcaaaaatagaaaagataaatccatttgcattgagccttccagaagtgctggggtctaaaatgtgaaatacacacaaaattgacatttaagcaaactgcgctgacaaatctgtggctgaaaaagctgtggcaaaacaaaaacatagaaaaagagcctcaaaaattgggctgaggccrggcatggtggctcacgcctgtaatcctagcactttgggaagccaaggtgggtggatcacccgaggtcaggagttggagaccagactggccaacgtggcaaaacatcatctctacaatacaaaaatacaaaaattagctgggcgtggtggcaggcgcctgtaatcccagctacttgggaggctgaggcacgagaatcgcttgaacctgggaggtggaggttgcagagagccgagattgcgccattgcactccagcctgggcgacagagagagactctgtctcaaaaaaaaaaaaaaaaaaaaaaattgggctgtgaggtcatgcagggaattgatttttggtgggtgggtctgcttctgggatgatgtggatgcctcccgtggagaggggaagggttgatgaagtcccagggacctggaagtgtgttctgcagcaatccccctcccagcagagatccgtgaggaggaggtacagacggtggaggatggggtgtttgacatccacttgtaatagatggtgagtcctcccacagctggcaccagagctccccactgagggctgggggggagctggggagtatcagggaaatgggtgctttatccaaatggctccaagccaggtgggctactaccttgttgttaggggggtgtcttcctcacaacctgtttttctcttcccagctgtggttggatcaaggactcattcctgccttggagaaaatacttcaaccagagcagggagcctgggggtgtcggggcaggaggctggggatgggggtgggatatgagggtggcatgcagctragggcagggccagggctggtgtccctaaggttgtacagactcttgtgaatatttgtattttccagatggaataaaaaggcccgtgtaattaaccttcaccatcagcgcctagaatcccggggggtagggggatggtatactttacaggatgacaatcttgggagctagaactttgtagccagagaaacttgggaggtctggaatctcatgtgtctggagtcttggggaagagaatcttagaagcagaaaaccttggaacataagaatcttggggagggtctaggatcttgaggagaccagatccttggacatctaaaacttgaaactagtaggtctgcacccgagaattgcagggccagtcatgcatacccaaagccttcagcccatggccgaaattcccttgctggacagggggcctttcagcccctgcttggacgcttccagtaacagggccctcactgcaggaatcgtgggagggagaggggcagcacagagttgctggctgtcggggaagggagggagggccctgggcagtccgagggccctgctgggcttgtgcctcagggtgggggctgcactcctccgccttgcagcctcctggcctggtgctgctgccagccggaaggacagtgacttccagaggaaatgcatattgatcctgctttcagcctccggtggtggcttctcccaacccagctcttccctcctgagcctgcagcacggaggttttgggggtcactgctacctaaagaaggctaaggccacttctgaggctggtctgggagtttactaaaggttctgaagctgggccgggctgcccctgggatcaggagactccagacagcagtcctgacaatgggaactacctcctcagtcccccaaactgggaggtgtcccacagcagctgtaggattgtcctaggggtggagacctgagcaccttccactccaaagcacagtatctgtgggcctggcagtggcctcagttcccccatgagtgccccggtcccccaccccagggtttccccacatcacatccatccctgctttgagaccccactccccctggcctgttctttattttgggtcactcccttctctttcctggtcatatctctcctgcaggcctaccctgtgttgggccccccagccctgtctctgcatcgggtgcccccctgcccctccttctgtcctcagccccctccgcccttccccctcttgaggctgtaatatccgtttcacgatttgggggctgagttgctataacaacagacggcgattgtgttgtgaagagcagctcgctcctgtgccgcctgcctcctgtgctgcctccatccctgcagcccagtcggttcctcttggctcctctcgtcactaccctccagttccagtctggcctcttcctggtgtgtgtgtgtgtgtgtgtgtgtgtgtgtgtatgcatgcatgcatatgtgtgtccaggtctgcctgcccgggatgtgacaagtagcggtcttcatggttgcatgtgtctgaatttggtgtctgagcttcacattgtatgcgcctgtgtgcatgtgtgtgcatggacatgcatgctgtatctgctgtgtttcccctcccccatgtgtccccactggcctttgcacatgggagaagggcatgtgctcagcatatcactcaactgtccacattgggtgggtacctgtgtgtggtgtgtgtgtgtggggggtgtgtcttgaagtggcaggtcccaaatgcttaggcaatctgaaccttggaccttgcagagaggagagatgtccctgtaggtgggagggacagggagatgcagcagctgcccggtgaccttttctgcccttgatgggcaaagctgggggtagggaaaggagacaagtgctcatacttacctccctccctgcccaggctcctctgtaagggtctgagtctgtctctgtgagccattgcatctgtctgtctatgccctgatgcctggatggacaaggggtgtgtgtgtgtgtgtgtgtgtgtgtgtgtgagtgtgaggctgcaggaagaggaacagtgggggatgggcaggaaagtgggctgtggggtcagggaggcgatttcgcattcataggccctgacgcagcagttccattctctggctccttcattggctttggtggggatgccctgggggtctctccaaggtcagagtgggccctaagtctgggacctggcttagggatcacccttctcgactcctaggaaaaactccttgcagcctgggtccccctcttaccccttcacaggctggggaaggagtttcccacccggggggttggtgtccgcattaagccactcagtaattgaccactctctttgaagtgcctgggcaggggtccaggatgactgtgggcaggtcccctgggtgcaactgttctgggcatgcattaattgcctggtgtaggtacctgtgtgcacaagtgtgtgtgttcttgggcagtatatgcttcctgtgggtgtgttaccatggtggggcatttctgcaggtgttcttatgtgtctctgggaatgcccagtgttcacagatatgtgtgcatggctgtgagtgccccaatgtccatgcattggtggttgaatgtaagtgttcttgcatgttgcctctggctaaggaagtgccaactaccaccagctgtgcagatcacagaccctgcaacagaaaccagggtcctggagtgagctggcagaatggtctggcacacatacacacacacactctgtctctcactgtctcattcagcagcccagtgaccaacctcggggtatacacactaagtgccagtgtgtgtacacttttattggcggagtgagtgaagggtgtcccccagtcccccacactcatacacatgcacagtgatgcatgtacccttacaggagagacctgcgccccccagcaccactctaactgaaactcatggatgggaggaggagaacagagaagggggctgctgccaggtgccctcagtcaccaggcatgtgcaggcgcaaccctgcccccacacctactcgtacctcggtccagggttccaggcagaactgagagtttggcctcaaactctgggattcccatgaggcaggactgggaaacccccaagttcctaggtctaccccgcccccatctctgcctttccttcccccaccgcctccgtctttatcccagcaaagccccttcctcttcagttctgggggctccaagccaggggccctccggacggtgggaggtgggggccaggctaccgactggaaaaagcccccagcagccatggacccaccgagtcccccttctctaggctcctcgaagcccgggcccgcccctgggggtagccagcagagggcgctgcggcccaggccccgcatcagccctgctctcgcggcgtcccaagtcggggtccacagcctctccttcggcttgtcccagccccgcgctgcgcgaagacctgctggccgtggggggagggtgcgggacccaaggccccgaactaaggggcgaggggcgaggggcgagagtgcttgggttcccggaaaagacactgaggccgggtttggggcccgcctggttgggggcccgggcgcccgagaacctcgagaggctgggaggagcgcgggtgctggggccgggacgcctgggtcccgcgcgagggagggagtgggcctgtggagccgctggactggcggcttctgagcccttgcattggctgcgctgctcgcccgtcagcgcagcgtggtccaatgcgcgcgtctcgggggcgggcactggtgctgatgctgccgtcagtcggtgttgcagggatgcggcggcgggagcagccgccctgactcgcggagcatcctcctcggagaggcaccgcggcggggcgggcgggcgggcggggacgcggcggggagggagagaggcgcgaggcggcagacaccgctagccctggctctgccacccgtcggagacggggcggccctgtagctctgctacccaccctccagcttctggcgccccgagaaccaggtaaaatgggggggggggcgctgcggcggagacgggcggggggcgggagccgatcgggggaggggagcggatcggagggggcgagggaggcaggacggatgaattggggggcgggggcgccgcgctgagagggctggcccggtgacagcgaggaggcaaagccgctgggggcttgggggtcggaggctcctgtggaaggggcactggccctgagagctgaggagaatggggaggggtgggaggaagggtctttgggggaagggatggagagaggaggggcatccagaggacttagagggggttcttaaaggggggtccccagtctgtgctagccccagaggcttgaagcagcgccgggccagaggagctgttgtgttctggagggtctaaccagcgagaaactgggcttcgtgggaggagaggagagggggctggagaagagagagaagtggagagggaaggaaaggggccaggccaagggcttcgtcctgaggggacccactgaggaccaggctttcctgggggatgggagccaaggggagaagaggttattgggagagagcagaggggaatgtgccaaggtgctccaggcagagatgggtctgtgctggtggagagctgggaaagatggggtctgagggagaggagcggaagcttgcgggggaaggctgggggtgatgagacagggagactgggaaatcagtaggagggggctttgctggggtgggaatgcgctgggggcggtgacagggttctggtcagagagtgctgcagggggagaggaagctgcagggcccttggcttgctcccccacccctaaagaggaagggaccatttctcatgtcccagcctcctcccccagctgaagcagcaatcttccctggggtctttgggttggggtatgagcccttgaacccttgatgggcttttggggcacaattggctttggggtgctgttgtctcctttactctcacccccctcctgaatcttgggagagggcattcgatgcctcattgagctagcaagggctgggaggggctttttcttggtgtctggaggtgaaggaggaggctgtccacctggaataatgaaatagatttttagggggtgggtcttgggtccccagtcccttggctgccctgggggcttccagatagccctgttttttcatgtgttggcgggtgggcgtctctcctcttccattcattcttatccttccctgttgtctaccttcccagtgtctgggtgttccttttggaggagggtggacattagggtcttactttctctgtcttctgccagagaaggagaaagaaagaagggagagggaaggagaaggggagggaggtctgcagtctgctaactgtgaggccttctgttttgtgggtgcttcagcccctcagtccctacctcctcttgcttccagggatggctctagggatgctggcatctgaggtgtggctggatcttttgggagacaggggagaagggtctggctgggggctcttcattcatgctagaggaagtgttctcagacccatcctatcctcagatccacaggggtgggcgggatggaccaaccagccacggctgccgggcagttctttccagcccaggcctgggctgaatccatatgacattggagttctgagaggaggggctgggtgcgcgagtggctggtggggacccctctttccttccaggctcagtcactacccaggtccagctgctccctcccgcttacccttgccagtgacacagacactctgacaatgatacacgcgctcggtggcacccacccagacacacacctacacaggcacacacacctgcgtacacaatacacctcctggcagcatacagcccacactccccacccagagaggctgccacctcatgcctgcctccttgagacctcccccaggtgccttgctgccatgtacacaacacacacacggccactacgtgcccccagagcccccagcgcagcactgccagccctcacccttggatgcacacagcccccatccaaccactcacctccccaggctcacagccatcgcaggcacac

SEQ ID NO: 97756 - DNA, 14874 bp, Homo sapiens
actgcactccagcctggagacagagtgagactgcgtctcaaaagtaaataaataaataaatttttctagttaaatggttgttttgttggggaatgggtctgctgagctccttacaccaccattttggaaattggtggtgtatttaaattttttaaaatatcttattcctatggttccctcccctttgtcatatatttgttatatttgtctttctcccttttttccccctgaaacaaggtaactagtggtttgtcttttttttttttccaagacagattcttgctctgttgtccaggctggagtgcagtgtcccgaacatggctcactgcaacctctgcctctcaggctcaagtgatccaccatgcccagctaggttttttggtgtgtgtgtgtgtgtgtgtgtgtgtgtgtgtgtgtgtgtgtgtgtgtgttttgttttgttttatagagacaggatctctctatgttgcctaggctggtcttgaacttctgggctcaagcaattctcccatcttggcatctcaaagtgctgggattgcaggtgtgagccactgtgccaggctgtgtttgtctttgttaataataataattttcaccgggcatggtggctcacacctgtaagccagcactttgggaggctgaggcaggtggatcacaaggtcaacagatcgagaccatcctggccaacatggtgaaaccccatctctactaaaaatataaaatattagctgggtgtggtggggcccacctgtagtcccagctactcgggaggctgaggcaggaggatcacttgaatcccggaggctgatgttgcagtgagccgagattgcaccactgcactccagcctggcgacagagagagactccgtctcaaaaataataataataatgatgtctcattttattacactgtgctcagagaatattgtttgtatatttctactttttttaaggtactgatgatttctttgtgacctaagatatgatcattttttgtaaatattttgtttctttggaaacgtggttttttttttttccaggggaatttttcttggttggtgtgtgttattttgttttcagattttttaaaatatcagctccatacggatctattcatcttctttctattcgtttttgtggtattggatggtttacaagattcctagctcaatagcacactgttaggtcaatatagcaaagttcagatggtttagaagctttttatttgtttgtttcggtgtgggggtgggtagggttttgtgttctcccattgcttggttctcttcggaccctcaatttctcccttctgcattttcccacttcacttactcaattgcccacggatgcttctggcccattttagcccttttttttttttttttacccctcccgcggaatcagtggactttaacgacctccccttcctatcgcacatacttgtaagccccttccctgaggtctgagctctgacttcccaggacgtcttcttggtattttcagattttagaatgtcgcagtctttctgatagttgctctcgaccaaccccagcccggatcgatactcctttctcccctccttccccagcttttcttggcacaaagcctcgtgcctgggagaggccgcagcgcacgacggcgtgcggggatatggtcgctttctttttatttacatttatcttgaagtttggaccttctctgctttcaagttatgccgacgctgtggttttggcagcgttttatttttcctttcttgttgtctggggctgtgtggacagcaaaagttggcggatggggacccaggcagccccttgggcctcaggacccggaagtccccctggctggcttgtgactttttaagatggagttcagttcatcagcgtgacagcttttcttattttctaacacgcgcgtttgaggtcataaattcctctctaagaattactagttgtgtcctccaactttgacagacaatattttctttctttctttttctttttctttttcttttttttttttttttttttttttttttttttttttgagacggagtcttgctctgttacccaggctggagcagtggcgcgacctccgctcactgcaacctccgcctcccgggttcacgccattctcttgcctcacccacctgagtagttgggactacaggcgcccgccaccacgcccggctttttgtattttcagtagaaacggggtttcactatgttggccagactggtcgctaactcctgaccttgtgatccgcctgcttcggcctcccaaagtgctgggattatcggcgtgagccacctcgcccgggtacatttgattaatttttaggaagatgttctgtgcgtgctttcctgcctttgttgggtgcagtgccagcttattcgtccactaggtcaaatttcttcatcatattcttcatatcttttactgctttgctaacttttttgccttgcatgtgccatcatatctacaattatgattgtgatttgtttttccgtgtggttctgttgattttacacacacacacacacagacacacacacatgcggtttcttgcttattgactttatttttaggagtaaacaaattactatatatttttttctttacctggattctggttaggtaattatacacttttttttcttccttccttccctccctcccttctttctttcttctccttcctttttccttttatttttctcttcctgcctctttcctttcctttattttccctcccctccttcccctcctcttcttaccgacaggatctccctatgttgcccagaccagcactacaggtgcacaccaccacatccggctgtatatttttaaaatcactacataaattctctttctccctagttatgctttttgtccaaagttgtgtttttttgtttgttttttgtttttttttttttttgagacaagttctcactctgtcacccaggctggagtgcagtggtacaatcttggctcaccaaaacctctgccttctaggctcaagcgattctcctgccacagcctcccaagtagctgggattacaggcattcgccactaccacccacctaatttttgtatttttagtagaaatggaatttcaccatgttggccaggctggtcttgaactcctgacctcaaatgatctacctgcctcggcctcccaacgtgctgggattacaggcataagccaccgcgcccggcctaaagttgttttaatatattagtgtagttatcccagctttcttttagtaattgcatattattttttctatctttatattttgaaatttttaatattcttatttatttatttattcatgttttagagacagggtcttgctgtgtcacccaggctgggtagaatggcatgataatagctcactgcagccttgaactcctgggctcaagtgatcctcccacctcagcctcttgagtagataggactgcagtcacgtgccaccatgccaggctagtttatttttggtagagatggggccttgatgtattgcccaggttagtctctaactcctgaactcaaatgatcctcctgtctcggcctccaaaaagtgctgagattataggcgtgagccaatggacctggccatatatatattttttgagctggtagtatgttattatgttttatgtgtattcttttatatccttttacgtgtatcctttatagcatgcaatattaatatatgattttacaaattatatatacatttacatgaatataaattttataaatagtatattagttagcatagaataaattttgctgtgataattgtagcaggcagaataatggactcccaaagatggctacatttcacttcccagacctgagaatatgttatctcacatggcaaaaaagactttgcagatggttaaggatctttttttgagaccaagtcttgctctgttgcccagactggagtgcaatggcatgatctcagctcactgcaacctccacccccagggctcaagcaattctcctgcctcagcctcccgagtagttaggattacaggcatgcaccaccatgccccgctaatttttgtatttttagtagaggaggggttttgccatgtttaccaggctggtcttgaactcctgacctcaggtgatctgctctcctctgcctcccacaatgctgggattacaggggtaagccacctctcccagccaagttaaggatcttgagatggggagattatctgggcagattgaagagcccagtgaatcatgggattctgaaaagtgaaagagaaaggctgggcatggtggctcatgcctgtaatcccagcattctgggaggccaaggcgggtggatcatgaggtcaggagaacaaaacaaaacaaaaaaattgccaggcatggcggcacatgcctgtagtcccagctactcgggaggctgaggcaggagaattgcttgagccctggaggtggaagttgcagggagccgggattgggccactgcactccggcctgggcaacacagcgagactccgtctcaaaaaaaaaaaaaaaaaaagtaaaaacaaatattctccccagtgtgggagatcggtgtcagatctccaggggtggcactgaaggaaatcagcctgaaggccctcccaaagttaaagtgactagcccactcccaggcttctttttggtacaccttcctgatctctaaccttaattactgggggaggaggagaacagttgaaaacacagctggtctaggagattcattcggtttcatggaacaccttctctgtgcaggcagcgtccaggaacagctgtagaccacacagccaggctacccagcgtgtgggcccagcagccaggctggaactctatctctacttaccagctgagtggctggcaggaagttactcagcctgtcggtcagcaacccaaactctgtgtgttagttgtttgttcgctgacaaaatgaggcttctcatcattctcatcaacttcacgggcttgctgtgaggaacacgtgagctgattccatcacagactcctcagtaggcagcagtaggtgtttagtgaacgggctatggatgctgccccactcactacttcctttctaggggaggccgacttcaaatgcgtgcacacacacaaacaggatggcctgatgcagaccagctggtctagaaaggccttcacggcctcagggagcctgggaggcggcctgggggagaccatgaaacagcagatacaccagagaccagagatcagagagaaaacaaaggacccagagatccacagacatccagacaccagaggcaacaagaaactgagagactcagaggcccactgagacccaggcagcttgttctgtgttacgaggggaaaaataaaataagaaacaaaagagagactcggggggcctcagtgaaacctagagactcaaggaggccaggagattcagagacacccatagagagccagagaccctgccctagcaaggcacaatcaatgaaaaaaaactcgcccaccaggccctcgcagtccgggtctcatatcccggctcagcaccttggcgctgcatttgtcaagaggggaacagggatcctagctccctgcctgtcctatggggccttaggccctggggtccagctggcctgccttcacccctcttgtagttgatgaagctttggagaggctttcaaaccctggggagccacagctgggtgccgactggactcactggcagagaggcaggcggtgaaggccaagcctcgccccccaggaaggccctgattggtggacgggctgctttgggcagggccgccctcaggctatataagcgcactcgcggcggcgttggtgttatgctctgggccattcctgagctcgggtaaggctcgctgcaggaggaggctgggttgcttgcgggcgcctagatggaggggcccagattggccctggggtggtcgaccgcacgttctcctcggccccgtggttggcttctctctctcagggatgagggtgggtttaggacgggagcttgaaatgtttgaagtggccccatcaacttgctctaaatccaggtatttttctaatttcattcctccctgagggcctcagtttcccctcggtgtaagggatcagtggccctttcaactctgctttggtgaggggtcgggggtggttgtgagttggggcctagaggagcagttaaactcttgggttttttttttctttttttttggccaggcgcagtggctcacgcctgcaatcccagcactttgggaggtcaggagtgtgagaccagcctggccaacacggtgaaaccctgtctctaccaaaaaaatacaaaaaaaattagccgggcgtggtggcatggcgcatgcctgtaatcccagctactcgggaggctcaggctggagaatcagttgaacccgggaggcggaggttgcagtgagccgagatcgcgccactgcactccagtctgggcgacagagagagactgtgtctcaaaacaaacaaacaaaaaccaaaaaacytcttggggttttggagaccaagggcttcacttttaaccggctgttaggcctcagcttcagtttcctcgtttgacgaccggtctgagttaaacttacctccttaccaggatggaataagataaggcccttaagcacagccccaggcacttaggaagccctcagcggtgcttgttgctgctgttactctggcctgtcctggggtgccaggaggagggtgagggtgccacaccctcacctatagcaactctttgcttcttttctggcctccccactcttgttgcatcccggctgccttctgttctgagcccccaagtctctgcacccacccctccaccgtcctggcccctgtcaccaccctcttgatttgtgagcatcacgggggtacatgctaagtcctgagcctcctttctctacaggtcaccctgccccatctccatctcctatgagatgagtgactcccaagaccccaccacttcccctgtagttaccacccaggtagagctggggggctgcagccggcaaggtgggggcaatgggttcctccgttttcgccagcaccaggaggtccaggccttcctcagccttctgggtgagtttggagggctggcacgggaggggccgtgaggtcaagtgtgaaagcagatgtgaagtgtggggtctcacctgcctgtacagacatctgagacctctgaccctctccctctcaggtatcccagcttaggcaggtgggaggggtgtcctctcagaaactggattcagggccaggcaccgtgagtcatacctataatcccaacattttgggaggctgaaatgggagtatcacttcaggccaggagttcaagaccagcctggtcaacatagtgagactccatttctatttatattaagaaagagagagagaaagagaaaaagggagaaaaagagaaagagagagagggttcagtggtggcttgggctttggagcttctgatgccactcttctccatggaggtggtggtaacctgcgtcctgtcatgtcttctctaccctcagaggacagttttgtccaggaattcctctccaaagacccctgcttccagatttcagataaggtgagggagtacaggctgggggtctcttgagggtcaggttgagttggtgggaattgagtgccctggtctggtagggagagccactcaccttccatccttaccccctcatctttgcacaccacttcccaccattttactgactttctttccctgcagcaaaacctccctgggtgcaaatgaacctgggtgcaagcccctcctcctcagagaataactaaccccccaccccgatctrtctctgcagtatctcctggccatggtgctggtctacttccagcgcgcccacctgaagctcagcgagtatacccacagcagcctgttcttggccctgtgagtggtgggggcaggcagtggaggcatttgctggaggtgtcagatgggacagggcagatgtgtggcctctgctccctgaccttgtgcctctgtggctaggtaccttgcaaacgacatggaggaggacctggagggccccaaatgtgagatttttccatgggccctgggaaaagattggtgtttacgagtggggaaattcctgcaccagagggataagctttgggcacggatgggtttccgggctgttgtgagccgccagtgctgtgaggaggtgaggctgggaggcaacctggggwgtggggaaggctggggttcccaccccatttactgtccactctgctcctcccaggtcatggcaaaggagccattccactgggcttggactcgggaccggcgcccccaccatggtggggttcagagggtctgtccacaggtccctgttcgccttccccggggccctggcctctcgccgccccactgttccccctgtggtttgccccagcactgcagcagccacttgcttaagcctgtgtcatccaagtgcccttctctgacctctgaatgtcatcgccctccctcccaaaattatctctcaagggtcaaaaacgcctggggtggggactttctcatcgtcttgcctccccagatgcaactggaaccaggcacctactccctccgcagtgagtgcaggatgggacaggagctgggggctggtgtgggagcttgggaggcaggagtgaggaccaacaatatgagagagagggccatgggcctggggtcgacgtgctgcccctcccgtgtgagcttggcaggtttcttctctgagcctcactctttcctctccccagtcttcccaaagcctccggcacgccctgggcactgaagctctgcagggtgaagaacagcacgcctgctggcccactgactgacacaccattggctgtgctcccacccctgccccttcctcccagcctgcagcttgtgcccactctggtgccagtcccctctaataaattcatgtccacaggacaccaactgtgcttaggtcctggcctggttccttgacccaaggttggggtggggagggggtatctaccagggttacaacatgtgagcacaggctctgtaacagcttggccccttcccattggtggccagttattctgagcctcagtttcatctctgtgctatccatgcctatggatgatgagatctacacagtctagatgggattaaatgagatgaggtatctgcagcccttagaagagggccagggagccgaacgtggtggctcacacctgtaatcccagcactttgggaggctgagccgggtggatcacttgaggtcaggagttcaaaaacagcctggccaacatggtgaaacccctttgctactaaaaatacagaaactagccaggcatggtggcaggtgcctataatcccagctactcgggacgccaaggtgggagaattgcttgaactgtggaggcggaggttacagcgagttgagatcatgccactgcactccagcctggacgacagagtgagactctgtctcaaaaaaaaaaaaaaaaaaggccaggaacatattgggaaacaaaacttgaatggaagacagctctttatttagtctagaaatgccttcagggccaggtttacttaggaataagacttgatcccttccttgagctacagtcaaatataatattgtaattataataaacaacccccctcccccaagagacatgaggactcaaaagggttaatttctttttttctttctttttttttttttcacatcactcctttattatactgatctggaaaaagatttagtacagttatgctcagatgaacactggacccatgtggcagggccaagcaagtagaacatgattcagaaatcagtgaaagacatacttggacaggaccaagaggcatttcactgtcacgaaacaaggcaggaagggattgtaatacccacaccaggaagcactcctgcccctcagaggtcaaggagctgatcctatattggtatgaggaatggcttattttctgatgactacatgtgggactatttcaaccgccacgagaaaccccagaagggttattgttttgtattatttatatatactatacttcttaaattaaatgtaacacataactaaattcaggattgatcccaaccttctagagccagctcctctggcgtcagggaggaaacagttgtcacatcaccatgcaggttacattcatcttccactggaatgactagagccctcaggcagtggcctgactgcagacgagcagaggactggctcctggggacagacaggctctgttgcttctcctcattggtcatggcttagcatggttcctccccacaagtccttagtaaacaaagcaactcgcaaaaacccaagtcactacttttaaactctgttggataaggggagcttttccacagcttggactgagaacctgtgctctagaagtgctattctgactagattgtatgaagggagtgggtgcaggagacaaaatggctaaaatgaaaatgggagtcactggtccccatctgcagctacaactcaagatgtctacagatggggtcagtgtgacatgtgcaggtgggaggggcagagggacaagacaggcagggagggtgctcctggggacagtatcctccctgctggccttcacttcttggccttgccctgggcagccacagcttccatggctttgcgtaccatctcttcatcccccagaaactgcatgggcttgataggcttcaagttcttgtcccattcatagacaatgggaataccagtcggcaggttcagctccatgatagcctcttcagagagaccctccagatgcttggcaatgccccggaggctgttgccatgggctgcaatcagtacacgtttcccctccttgatctggggaactatttcttcattccagaaggtcagagctctggcaatagtgtccttcagactctcacaggagggtagcagatcttctgtgaggtctgcatacctgcgatccttactgatgttgctatagaaaggatggttgggctccattggaggtggtgggacatcataggagtgcctccagatcttcacctgggcctcaccatgctttgcagcaacctccgcctccctggttcaagcgattctcctgcctcagcctcctgagtagctgggattacagatgtgcgtcaccacgcccggctaattttttttttgtatttttagtagcaacggggtttcatcatgttggtcaggctgatcttgacctcctgacctcgtgatctgcctgcctcggcctcccaaagtgctgggattacaggcgtgagccaccgcacccagccgtgaggtgccagatttttatctttgccaaactgctaagtgggaaacagtctcttggtgaaattttaattcacatttgcttttcagtgagctcaacatcttgtcatatgtttaagacctatttgtcttcttttatttgtgaactttttttttttgagacagggtcttgctttgtcatccaggctggaatacagtggtgcgatcacagctcactgcagcctcgacctctgggatagctgggactacaggccaccatgcccagctaactttttgtatttttggtacagacagggtctcaccgtattgtccaggctgatctcgaactcctgggcttaagcgatccacccactttggcctcccaaagtgctgggatttacttttattttattcttagagacagcatcttgctctattgcccaggctggagggaagtggcacaatcatagctcactgcagcctccaactgctgggctcaagccaccctcccatctcagcctctggagtagctgggatgacaggcatgcaccaccacacctggctaattttctaatttttttatagatggggtctcattatgttgcccaggctagtctcaaactcctagcctcaatcaatcctcctgtctaggcctcccaaagtgttaggattataggaatgagcgaccacacccagaacatgattttttatatatgtatatggagaaaaatactcctttaagatgttaattgtaaatgttttcttcagtccatcattttgacataactgtatggatttttaatgtagtaaaaaatgcaattttatgacttttgggttttgtgtcatagttaaaaagactgtttccacactgagatgatacaaaaagtttctcctttagctcctggctgtattttttttttttttttttttgagatggagttttgctcttgttgcccaggctggagtgcaatggtgcgatctccactcaccgcaacctccgcctccatctcccgggttcaagcaattcttgtgcctcagtctcccaagtagctgggattgctggtgtgtgccaccatgcccagctgatttttgtatatttagtagagatagggtttcacgatgttggccaggctggtcttgaacacctgacctcaagtgatccacccacctcagcctcccaaagtgctaggattacaggcatgagccaccgtgcccagccagcttctggctgtattttcgttttcatttttgtacgtttaaatattgaaggttaacatttaatttttatttttatttatttattttttttgagacgttgtctcactctgtcgccgaggctggagtgcagtggcgcaatcttggctcactgcaagctctgcctcctgggttcacgccattctcctgcctcagcctcccaagtggctgggactacaggcgcccgccaccacgcccggctaattcgttttgtatttttagtagagatggggtttcaccgtgttagccaggatggtcttgatctcctgacctcgtgatccacctgcctcagcctcccaaagtgctgggattacaggcatgaaccaccgcgcctggcctattttttattgattttttagagatggagtcttgctttgttgcccaggctagagtgcagcggtgctcactgaggccttgaacccctaggctcaagagagcctcccacctcaggctccgaaaatgctgggattacaggtggtgtgagataccacaccagacctagagtttttattttttaatttttaaaaaaatttttatttatttttttgagacggagtctcactcttttgctcaggctggagtgaagtggtgcaatctcggctcactgcaacctccgccccctgggttcaaacaattctcctgcctcagcctcccgagtagctgggattacaaacgcctgccacccaccatgcccagctttttttttttttttttttgtatttttagtagagacgaggtttcaccatattggccgggctggtcgtgaactcctgacctcaggtgatccatctaccttggcctcccaaagtgctaggattacaggtgttagccaccacacccagcctttttaaatgtttttttcattaggaacaacatattccaaacctataaattgagttcatctgtaattttttctaagatacaaattatgaatccaacttactttttttccagattgctcccttttcttcctaatgtcttttattaactcatcttttctcaacagattagaaatggtacttttatcatctactacattcctgcctgtatttgaatctgtttctaaatttctctgtcttctattgatctctatgtgtcagtaaccctctttaattattaccttttaatgatagatttgttgtgttttaatatctggtaggattagtctatactcattatgtcttttattttcagaagtttcctacttgtttaatttgccatatgacctttaaatcagcttttctagtccctccttatctcccaccagaagactcttaaaatttttcattgtgatacacttagagattaatttaaggagaattgacatctatatgaagcatcttcatatgaagaccaaggtgtcagcccccttgcctctgctttttggtggctagtgactcccaaatttgtacctctattttgagcacaaggtctgttcctcacccctaggaatctcctcttggatagggggatcccaaagataccccataccctgatcccatactgtccctccagcttagtgcattcccccttctctttaatctactcaggtgctcaagccagatccagggtctgaagttgtctttggtctctcctggtgtccaagagccatatctaaccagtgactaagttctatttttttttttttttttgagacggagttttgctcttgtcgcccaggctggagtgcaatggtgtgatcttggctcactgcaacctccatctcctgggttcaagtgattctcctacctcagcctccctagtagtggggactacaggagcccaccaccacgtccagctaatttttgtattttttagtagagacagggtttcgccatattggccaggctcgtctctcgaactcctgaccttatgtgatccgcccacctcagcctcctaaagtgctgggattacaggggtgagccactgcgctcagcctgtggtatatttgtaatcactgatgaaccaatattgacacaatattattaattcaagtccatagtttacattaaggttcactcttagtgttgtacattctgcaggtttggataaatgcatgtcatgcatccgtcattacagtatcatacagaatagtttcgctgtgctaaaaatgccctgtgctccatccctctcctacccctctgaatccctggcaactgctgatctttttaccattgctagttttgccttttctagaacgtcatatagagttattggaatcatacagtatgcagctttttaataccagcctcttttacttagcaatatgcgtttaaggttatgctatgtctttttgtagcttgatggctgatttctttgt

SEQ ID NO: 97757 - DNA, 31451 bp, Homo sapiens
tgatggaccagagggcccggcagctggccgccctcattggggagagtgaggtgagccggggcagggcagggctcaggctcactgtgacccagggggccgctggacatgactgctgtggccacatgaggagggggcttctggtctctctagcgcagtaggcttggcagccctgggattttgaggagatgaaaaccacccatttgcattcaggaggccttcaggtcacacctgggctggaattcctccagctccatgtaggcttggagtgggggtacaggggtctcagccacttcatcagggcagtgcgaagccacagaagctgttcagacgtggtgtcctgggagtcatgaggagggcagtggcttccgtggggaggggtcaggcacggaggttcacctgcgcttccagatccagtccccccagggcctgcggcaggcgggcggggagagatgactgcaattagggctgcctggagctgttagcggagaggctggtgcccactctgcggttgagtcctctgttgatttaatcaggagctcagcagcaaggaaaatgagcgactgtaggcaaggctgggggacacaggcaggggaggagaggaggcttggggctgggccaggcctttccagaacaatctgggagttactgagcacatgcagtgggctggcattatgttatcttccccacagcccatgtggaaaaggggtttagaaaggcttgatttatagctcttctcatgcagacagcctcctgttacagagcagtccagcagtggcttggactaagggaggctgacaggggtgctaggggacccaggaggtggtagaggacagaagggtctggagggaacagcatttctgaaaagagcattctcctttctccctataggctcaggctggccaagagacgtgccaggacacccagtctcagcagctggggtctcagccgtcctcaaaccccacccccagcccactggatgcctccccccgccggccccctggccccaccacctcccctgccagcacctccctcagcagcccaggtaaggagtggcctgggtcgggggtgggctgcagggaggcaccccccaccctgtcctccagctcctcacagggcctctgctccccagggcagcgtgatgatctcatcgccagcatcctctcaggtagggggcggggtacctggaggcagggggttgccttggaggttcccccaccccccgcccacctttgctctgccgctcccagaggtggcccccaccccgctggatgagctccgaggtcacaaggctctggtcaagctccggagccggcaagagcgagacctgcgggagctgcgcaagaagcatcagcggaaggcagtcaccctcacccgccgcctgctggatggcctggctcaggcacaggctgagggcaggtgccggctgcggccaggtgccctgtgagtgtctgggccgcctgtgtgctatgtgtgctgggtgtgctgatgtgaacatgggggtcggtgggcatggagagatggcaagagctgctccttgacccccagggaggagggttcagtgcaaggatggaggaggctttccacaccaggcgtccctgtgtcccccagggagtgacatctcttttgaagtccatgaggagcatgttgcccaaacaggctcccatcacttgggtggagctaacaggcctcctggtttgcataacagacctggccccatgggatggtgtctgccatcgcttgccaggatgtgcccccctacacaccctccccatcccagtccatgtgacgggcccaggcatcacccagaggggttctcctcgcagaggtggggccgctgatgtggaggacacgaaggagggggaggacgaggcaaagcggtatcaggagttccagaacagacaggtgcagagcctgctggagctgcgggaggcccaggtggacgcagaggcccagcggaggctggaacacctgagacaggtagggggcctgcagtggccagggaaagcctgctggatagacccgtcgtcagcccggcatcacctgtcagctccctgtgtccacaggctctgcagcggctcagggaggtcgtccttgatgcaaacacaactcagttcaagaggctgaaagagatgaacgagaggtgaaagccgaggattgtctatgggaagggctggggacttctagtaccagaaggagggcagagtctgtgcttctgccgctgacccctcctcttcccctgccggcttctccagggagaagaaggagctgcagaagatcctggacagaaagcgccataacagcatctcggaggccaagatgagggacaagcataagaaggaggcgtaagggcaccgggaccgggggccatctgggtactggggaggcagggcaggtgtctgggccccgagccatcctgcgttgctcccgtgcagggaactgacggagattaaccgtcggcacatcactgagtcagtcaactccatccgtcgggtgagtcaggctcccgggccaccctaccccacctcccttccttcactcatcagacacccatctccatgcctggcctggtgccacgttgccctcaaggttcttctagggcctttctcaagtgcccaacagccccagggtacccacatcatacccaaagccaactgtctgtaccagtgtccctggctttggcgtccttgggcccagtcctctcacaaccctgatacattgccctgggagccttcgcccacctgacttctttttctttgagacagagtctcactctgtcgcccaggctggagtgcagtggcgcgatcttggctcactgcaacctcttgggttcaagcaattctcttgcctcagcctcccgagtagctgggattacaggcatccgccaccatgcctggctaatttttttatttttagtagagatggggtttcaccatgttggccaggctgttctcgaactcctgacctcaggtgatccgcccgccttggcctcccaaagtgctgggattatagatgtgagccactgcacccggcctcgcccacctgacttctatacccagccagagcctcgaggctctagcccctccctcagggcccctcagctgagcccttgcccacccctgtagctggaggaggcccagaagcagcggcatgaccgtcttgtggctgggcagcagcaggtcctgcaacagctggcagaagaggagcccaaggtgaggccatgggcgaacaggtgggcagacggggtgcaaggcagccaggcctcgcctgtgatgcccatccttctcccacagctgctggcccagctggcccaggagtgtcaggagcagcgggcaaggctcccccaggagatccgccggagcctgctgggcgagatgccggaggggctgggggacgggcctctggtggcctgtgccagcaacggtcacgcacccgggagcagcgggcacctgtcgggcgctgactcggagagccaggaggagaacacgcagctctgaactggctgagcgaggtggccacagggccagggcgggcgctgggtggagggcaggaggcaatgacactaatgctttttttttttttttttaactttttatctagaaattttatttttttaaacccggggcaagtacctcagctaactcccttcatcctcctggggcccctccttcctgccctcagtcttaggttagggccttggtcagggctttgctccctgtgacacccacaccctcgagctagcagcgtctcctcccttccccgggagagctggctggagacttggagctccgggaagtaggagtcacatttttttctctattctttggggattttttttacatgaataaaagtggatttcagggaccctgtgtgcagtgtgatttggggtgacaggactctgggccctaagtttcctcatctataaaatggactttgggcatttggtggggttgaggtcacgcctccagccaagggctgctgggttgaacctgagcttgccctgccgagtctgctgagcttccgtggccttctgcttgtgccctctgcccccaagccgctgttcctgttcccccatccccatgactttcgtctctccgaggctctccctgttctctcttttctgaggctcaggcctctgcttcaggaagccttccctgccccgcttcctgtggcctgatatgacccaaacgcctagcatcttccgctggggctgctctgggcccccgacaggcagttgactctatcaggtgatggatcggccagggtggagcagggcagctcagaacctgcccaacaccgggggacctgggtcttcagaaataggtgggcagtaggcctgcctgtgactctgggggaagggaagtggacagtcacagacacgcaggggctgggccacccagcatcccctcatccctgtgagggagatgttatgcctgttttacagatgaggagactgaggcccggagccatctgtcgtgtgctaggccacagctaagtcaagacgtcctgacctggaggcagggcaggcctggaccctccgtggtggactgtcttcagccagcctggacctgtcccatgcctcaagaccagcgaaaagtggcagagagcccacagtgcgggctccagggcggggctgggctcgcagcagggtcggcttggcacctcttcaaggcctctcccagcttcctggctcttcccaggctgcccgcctgcatccctcctccaggggaaggcggcctcttatctgggcttatctcctgccaattgagtatcttctttgctttgtttttgctgcagcctcaggcaaacagatggggtggggaggccagggaaacaggctccggagtagggccctcctccctcagggtcaatgcaatggccccagacttcctcacttcttctgtgggacgctgccctatcccccagttctgctcactccagtgtattccgtatctaggctcctcagcagccaactcccaccttcctgactctagctggtgtccactgagggacacactccaagtcagttcccaggtcctcaaataccagctgaatgtctaacttctgggtgtgacattccagcccctagaagcctggcctctgctgctcccctgtccttccatgggtccactcctccttgcgccgggggggatgaccctcacctcaccttccggtcgcagctctagctgcctcctccctgaagccctctctgactgccctgccgattccgggccctcgggagcttccgcgagcagggccgtggcgcaatgcatctctgtgcccggcaccaagaaccggcccgggttatagggggcgccaataaatctttctggaacggagcccccgctctgtccgggtccccgcatgaagcctcagtttccagcgaccgcgctgctgccagcctggctcagccgctccctcccgccccgcgaggtacccgggcggcgctggccccgggccggccacacagtagctgctggaaagggctgacccaaataggagcgagtgaccctctctggggggccgcggcacggtttgcagagcgcgggatcgggctgccggcagcgctgcggtcccaatgcgcgtgctggggacttggacctgggccgcgcagcccaggcccgcgagccgccgcgaccccttccgtctctgtcgctggatgtcaggcagagcctaagtttccctcgtaagacagcggcctcttttgaaagtatccgtgagagcactaccccggcctgccggagccccagtcgacgcacagaaaagcctcggcggcacagacgcgggctttattaacatttggtagtgagcacggcccccagggcatcgcgggggctcgggtcccggtgacgcaacggttaaacctggctcgcgacttagcgcaggcgcctgggggaaagcccggagcctgagggcggggccacggagccacttccggcggctgtgggcggaaaacccaaaacttccgatgggaccaagccttccgtggcttcacacgcaccggaagggaatctgggtcagccctccctccaaaggagacagcacggatcctctttttgcataggcctgasggaagtacttccgcccatattcaagatggctgcccagggcagtgggaacgggtggagtttcgggatgtggagcgaaggtcactgggagggggcggagcttcccctgcccaagttccgatcccaccaggactggragactcgcgtccagctggagctttgccgcatctgcgttgctgtgcccgcgctcttcgggcgaggaagtcccttctggtggagggagaaaagggttacatgagttagattaccatggcagctcgagccaggctctccacttccgtgagccttcctctaagtgagatcgggggggagataatgaaggccacaactcccaggaggctccacgccgggcggtcagggacgctcgcgaggacgcatgggcccccaggaatgggaactggttagatcccaggaactccgtgccggagacgggaagagaggatgcctagggccctaaatggaaaggccagagctggagacctagcacccagaagatgagaccgcaattcgagaatcaaagggccgggagcgatggtgagcgcctgtaatcccagcactttgggaggttgaagcgggaggatcctttgaggccaggagttccaggctgcagtgagccgtgatcgcaccactgcactccagcctgggcgacagagcgcacaggtgccagcaaggagcacaaataccagcatgcctggtcttccaagaattcggggaacccaggagctttggcctggagtgggatctagactacagatcccagcatgccctgtgagcacacacacacacacacacacacacacacgcctggagtgggatctagactacagatcccagcatgccctgtgacacacacacacacacacacacacacacacgcctggagtgggatctagactacagatcccagcatgccctgtgactgacacacacacacacacacacacacacacacacacacacacacgcctggagtgggatctagactacagatcccagcatgccctgtgactctctcacacacacacacacacacacacgcctggagtgggatctagactacagatcccagcatgccctgtgactcacacacacacacacacacacacacacacacacacacacacacacgcctggagtgggatctagactacagatcccagcatgccctgtgactcacacacacacacacacacacacacacacacacacacacgcctggagtgggatctagactacagatcccagcatgccctgtgactcacacacacacacacacacacacaccaggcgggggaagagctggggagtgggggcggggaagtcttgtgactacaaatcccagaatgctctggagctaggaaggaacaggacggctttggggaggggtcgtgggactccagatccgggcgtgccttgggacaaggcagggacagaccggcggggggcggcctggtacttcaggtcctggcacgctggggactggcgctcaccttaaaggagtccacaaactcgtcactcatcctccggagctcgcggccatakcgctgtgmtgcccagaggttggggggcgccgagcgcgarcggccccgaaaggggctgggctcctcccccatcccttcgtcgtcctccgtccccgcggggtaggagctgtggcgactccggatctccacagccccagcgcctgcagagggtcagtgggtaggggggcgacgttaatctcagctcctctaagcccctggccctgcctgaaccctccccatcagctctgcaggcccactcgtgggtcttccaggggcgcatcacagcccacctctcagagccccagtcccttgtatgtgaatcgaggggaagctcaggggcctttggtgaagatttaggttaacttctcattaatcccacgaatccttaccgagtgccaataatgggtgaggccctgtgcctagcacaaaataagggcataagaaatactagttacatcacaaggtcaggagatcgagaccatcctggccaacatggtgaaaccctgtctctactcaaaacacaaaaattagctgggcatagtggcacgtgcctatagtcccagttactcgggaggctgaggcagaagaatcgtttgaacccaggagggagaggtcgcagtgagccgagatcacgccactgcactccagcctgggcgacaggctttttttctcaaaagaaaaaaaaaaaaagcaagaagtattattagtgcaagaccttcatggggcctcctggcaacccctgggttggtagctatttcatagtgtctgttctacatcggaggaagccaatcccttggataggaaagtgtcctgccacagccggcaggattgaatgcctcctctgcaagggacctgcagagcccctggagaacaagaacttggccgctacatgtccgcatcccccacagagccttctctggagacagtgtctggaactgttgacgtttttaggtaccattgatggtgcacttacgtgtaggccgagacattcccttattatcctcctaaccaccctgggaggtgagtaccaaacatgcttaggtgagaagacagaagcttagagagttaagacttgcccagtttctgtgaagctgtggaggcctgaggctggaaggttccaaaggtttggtggaatccagagtccagtgatgatcagcggagctctgtgtctctccccttgtctagccagccttcgactctcttagcctgtgtcctcacctttatgaggggataatcctagccctgactcccagtggctgtgtgaacatcacataaaattaaaaaatgtgaaagtgctttgtggctgggcgtgattcctcacgcctgtaatcccagcactttgggaggctgaggcaggtggattgcttgagttcaggagttcgagaccagcctaggcaacattgcaaaaccccatctctattaatttaaaaaattaataaaagaaggccagacgtggtggctcacgccagtaatcccagcactttgggaggccaaggcaggtggatcacctgaggtcagaagttcgagaccagcctggcctcaaactctggtgaaactccgtctctactaaaaatacaaaaattagttaggtgtggtggttcacgcctgtagtcccagccactcaggaggctgaagcaggagaactgctttaacccagtgggtggaggttgcagtgagccgagattgtgccactgcactccagcctgggtggcagagcgagactctgtctcaaataataataataataacaaaagaaaaaagaaagtgctttgtaggctgcaagtgcactatgggttattattcagaggcccgcctactatggtctatttgaactgtgctctgtgccatctcccaactcctgccaactccactcctctacccagaccgataaagacttagaaccactcccctgagcaaacactcagagtgcaatgacagagtgagaagcaggtggggggctgggcgcagtggctcacgcctgtaatcccagcactttgggaggccgaggttggggagatcacgaggtcaggagtttaagaccagactgaccaagatggtaaaaccccgtctctactaaaaatacaaaaaaattagccaggcgcggtggcaggcacctgtaatcccagctactcgggaggctgaagcagaagaatcgcttgaacctgggcagcagaggttacagtgagccaagatcacgccactgcacccatctcaaaaaaaaaaaaaaaaaaaaaaaaaagagaggcaggtagggaaacatgctgggtgtttatggcaagatatgtctgtcagggaggctctttggaggaggtaaattacaggccaggaactgaaggcgggggataaccattggaatgtctcttctcccctcagaggacctgaggacctggcctgtgggccagtgcagggcctccaggggtcccagctaggacacataaatgagacacatgactaagaaagcaagtaggtggccgggtgcggtggcttacgcctttaatcccaacactttgggaggccgaggcaggcgcatcacgaggtcaggagatcgagaccatcctaacacggtgaaaccccatctgtactaaaagtacaaaaaattagctgggcatggtggctggcgccttagttccagctactcgggagggtgaggcaggacaatggcgtgaacccgggaggcggagcttgcagtgagctgagatcacgycactgcactccagcctgggtgacagagtgaaactctacctcgagaaaaaaaaaaaaagcaagtaggcgcagtggctcacgccagtaatcccaacactttgggaggccaaggcaggtggatcacttgaggccaggagttcgagatcagcctgacccaacatggcaaaaacccatctctactaaaaatacaaaaaaaggccaggtgtggtggctcacgcctgtaatcccagcactttgggagcccaaggcaggtggatcacgaggtcaggagttcgagaccagcctgacccacatggtgaaaccctgtctctactaaaaatacaaaaattagccaggtgtggtggcgcgagcctgtaatcccagctactcaggaggctgaggcgggagaatcacttgaacccaggaggcagaggttgcagtgagccgagattgcaccactgcactccagcctgggtggcagagtgagactctgtctcaaaaaaaaaaagaaactagccaggcatggtggtgtgggcctgtagtcccagctactagggaggttaaggcacaagaatcacttgaacctgggaggcggaggttgcagtgagctgagatctcaccattgcactccagtctggcagtctgggagacagagtgagactttgtctcamaaaaaaaaaaaaaaaaaaaaagcgagtaagggaacgagaggacggaatccggaaaggcctagggtaagataggctgtgatcagagtgcctgggcattctgagcatcaccaaagcccagagctgcccccaggtcaggtggggatacctcaagaccctggaggagtgaggtggcagtggggagaggcatactaggtcaggagtaaagattacagatgacagccaggcgtggcggctcatgcctataatcccagcaccttgggaggctgaaggatttcggataggggcaggagagccgggaacagaaggggcactgacggaacaggcctgtctgcagagtaatttccagttctgtggtgcggtgactgtggagcaggggtcagctaggtgggccaggccctggccacattcctgctctgaccttagcccattctccaaccctttggggccccagtgtcttctgtgaaatgggggcagttccccatctgccaggatcgccatgacaacaaatgagagcaggaaagccccctaccrgcccctcatagcctgaggcctctgagagtcccagccaggtgaatatccagctctccctgttgtacagatgaggaaacagaggcagaggttaagaacttgcctgaggccgtgtggctgggacagcctgcttagccacctaaatacgcaggaaacggcagctgttctcctccactagctctgagtggggccacaggaccactacgcttgccggacacaaggccccacaggtggaaggtgagtgacttgcacccaggcacttggcctgggcactgccccttgcccagggatcagaacaagcagaagacactgggcaggtatggtggatggtcggaagccctccctgtgtattcattcatttgatccttgccacaccctatcagggaggttcctcatggttgccattttacagaggaagaaactaaggcagagagcataggtaacttgcccaaggtcactgatctagtaggtagcagagctgggatcccaacccaaccaatgtggcttcaggggctgtgtgcttagctgtcatgccccaggctccttccagctgtaccttgggctgccttggaggcctaggctggggaaggcccctttgggccttctgctagcaccagttctgccaggaacctgtcctatggggtgggagtttttcaccaaattcgtggacttagccaagctagttgttatcaagatgatacccatttgtgtaaattgaattatatatatgtaaatacaaatatacatatatttatgtgtgtgtgtgtgtatatatttggtgtgtgtgtgtgtgtgtgtgtgwatatatatatatatgtatttttttttttttagagggagtcttgctttgtcacccaggctggagtacagtgatgtgatcttggctcactgcaacctctgctcaccaggttcaaatgattctcctgcctcagcctcctgggtagctgggattacaggtgcccgccaccatgcccagctaatttttgtatttttagtagagacggggtttcaccatgttggtcgggctggtctttaactcctgacctcaggcaatccaagtgcctcggccccccaaagtgctgggattacaggcgtgagccacggtgcccagccctaaattgaatttttaaaaagtgttctatttacagggaaaaaccctgggggagtgtctgtgaattccctgggggaaggagagggctggggcagggcctgggccagactctcccttctctggggaagggaaggggtgtggctcctccttgggtgtgaacgtgggtgggtgcccaggcctgcccactcttgccatccgcctagagcctggcccggagctgggtgtggaagtggagggtagtggctgtggctagaagtgccccaggccccagcatggcacctctagctttacattctctgcgtgttgggcttctgagtcagcggctggggcggacatccctgctgatgcttccgcgagcatccctgcactgggattttcagagtcctcagattcccaagaaggagaatacgaagttctccctgttttatagatgaggaaacagaggcacacttaattacaagacacttgcacactgaattgcacacttaattaaaacagtggtgttccagaccgtttggagcagtgaagctctrccatcaggcaagggctgggtttggatcctgcccctaccacatgccgaccacacacaatctgctgccgggggaggctgacgtcagtggccagcacagtggccagtgctgccaccccaccctgggcagacactcgcagcctgtccgcctccggcacctgtaggcctcagccttgactatagccttccggtacagaagccccttcaggcctgcagagaacacccccaaccttgctcagagctcataaaatcagaaagtactctaaagttggcaaatgtttcctttttgtttttaaaaaacagcgacagggtctctctctgtcacccagactggagtggggtggcacgatctcagcttactgcagcctcaaaatcctaggcgcaatcgatcttcccacctcagcctcctgagtagcttggactacaggcatcaccatgcccggctaattttttaatttaaaaaatttttagagaagtgtcttgccatcttgcccaggctggtctcgaactcctgagctcaagtgatcctcctgccttggcctcccagagtgctgggattacaggtatgaaaggctggctggcaaatgtttgttcactttcttttcccttttcctaagttagctgaaaatgttttctataaagggggttcagtgggccacgtggtctctgtgacaaccactcacctttgtggccagagctgaaaggaaaccataatcaatgtgtaaatgaatacactgcaccttgctgtgttccactaacactttctttagggaccttgaaatttgaatttcatagaatgttcacgttacaaaatatagttctttggatttttgtccataacttaaaaatataggcccaatgtggtggctcatgcctgtaatcccarcactttgggaggccaaggcaaaaggactgcttgaggccaggagttcgagaccagcctgagcaacacagaaagacccttgtctctacaaaaattaaaataaaaaaattagccaggcatggtggcgtgcgcctgtagtcccagctacttaggaagctgaggtgggaggatggctggagcccagaaatttgaggctttataaatatataaagccaagaatgtacataaaggcaagaaaatcacttgaacctgggaggtagaggttgctgcgaggcgagattgcaccactgcactccagcctgggcgacagagtgaggctccatcttggaaaaaaaaattatatatatatatttatatataaatatatatatacataaataataacaatggcagttctaataataagagccgcaaacacttagcccctcctctgcgccaggcactgtttccaagcacttttcctatattaactcatcaggtcctcgccacagccctgcgaggtgggactagttctattcccrtttacagatgaggaaactcaggcagatggagttaattaacctgctcaagctcaacctgctaggaagggtagagccacgtttgaaccctgcagtctggcccaggggctagcactgggctgcttctttctgcctctccactgtccacacctgtttcagacactgggctgtgtgggctgtcacagcacaaggtggctgcagtccctgccctggggacacctcagccatccagcaggggggcctggtggcagggactatgaggagtgaccgaaccaagtgtgagttgctctgcgcaggtagagagggcagaggccccgtggctctggcggggcactggcacttgctgatcttttctgggaaaccacttgcttttggagacactgaaaactaaatcaaaaggttaagaaatccagctctgtcctcacctggcagctgtcttctcccgcagccctctttcctacgggtctgcagctggggctggggggaggtgtcgtccctggcctgtgcagaatgttactcctgtcctctgccactccaccagcaccctgtctcctttctgtaccttgctactccttctaccatgatcttgtcccactctcccctcagactcattcycagggacataacctaggccttgtcaccatcaaataactccatcccaagcttcccaccagctgacccaacctgtgtggatcatgcccccgggaccccaactccaacgatgctgcggcttcccagggcttgctcccttccctgaagctcagccagcttggaccccacatctaccattccttcctttgcacacacctgaagcccctacccctaactggactgagacaagcacawctctggttcagactccaagtccctgccagctcccactagcaccctgctaaaaatcccaccagatgcttaaaagccacctctagcggccagacgcggtggctcatgcctgtaatcccagcattttgggaggctgaggcgggtggatcacgaggtcaggaattcgagaccagcctggccaacatggtgaaacccccgtctccactaaaaacacaaaaattagctgggcatggtgcatgcctgtaatcccagctactggggaggctcaggcaggagaatggcgtgaacccaggaggtggaagttgcagtgagccgagatcgtgccactgcactccagcctgggtgacagagtaagactctatctcaaaaaaaaaaaaaaaaaaaaaatccccctctatcccaccctctagggtagcctccagatcctccctcacccttcagtgtttcttctccattaaaagcaacttcatcctaccgggtgctcaagccagattccttggtgttggctgggcactgtggctcatgcctgtaatcccagcactttgtgaggccaaggtgggaggatcacttggggccaggagctcaagaccagcctggccaacatagcaagaccttgtctctaaaattaataataatttggccaggcgcggtggctcacgcctgtaatcccagcactttgggaggccaaggcgggcggatcacaaggtcaggagatcgagaccatcctggctaacatggtgaaaccccatctctactaaaaacacacaaaaaaattagctgggcatggtggcgggaggctgtagtccgagctactctggaggctgaggcaggagaatggcgtgaacccgggaggcagagcttgcagtgagctgagatggtgccactgcactccagcctgggcgacagagcaagactccatgtcaaaaataaaataaaataataataataataataataataatttttttttttgagacggagtcttgctctgtcgcccaggctggagtgcagtggcaccatctcggctcactgcaagctctgcctcccgggttcatgccattctcctgcctcagcctcccgagtagctgggactataggcacccaccaccacgcccggctaattttttgtatttttagtagagacggggtttcaccatgttagccaggatggtcttgatctcctgacctcgtgatccgcccgcctcggcctcccaaagtgctgggattacaggcgtgagccaccgcgcctggcctaatttattttatttttatttattttttgttttttgagacggactcttgctctgtcacccaggctggagtgcagtggcaggatttcagctcactgcgacctccacctcctgggttcaagtgattctcctgcctcagcctctcaggtagctgggattacaggcgcccaccaccacatccagctaatttgtgtatttgtagtagagacaggatttcaccaagttggccaggctgttcttgaactcctgacctcaagtgatctgcctgcctcagcctcccgatgtgctgggattacaggtgtgagccaccacgcccggccaataataattttttttttgagacggaatcttgctctgtcacccaggctggagtgcagtggtgcaatctctgctcactgcaagctccgcctcccgggctcacgccattctcctgcctcagcctccagagtagctgggactacaggcgcccaccaccacgcccagagaattttttgtatttttagtggagacggggttcaccgtgttagccagaatggtctctatctcctgacctcatgatctgcccacctcgaactaccaaagtgctgggattataggcgtgagccaccgcgcccagcctaatagtttttttaaaattccttggcatcatcctgactcctctctttccctcgcaccccacatccagtccatcagcagatcctgccagttctgctttaaaaataaatccagggatcagctacttctcaccacctccctggtgactctctgaatgtctaaatctgaccatgctgcytctgctcaaatcctttccaggtttttactcaaaggcaatgccagagtccttagaatgaccttcaactttaggtctccaaataccctttcctaaaccccctcccctaggyccaccctagccaggagcaggtgttgccctcgaggccttaccatctgcccttctctctgcctggaactctcttcccatcatccctgtggccttggctccagtggtgcttctcaccaaggtgagtgctgaccacctctgctaccatcactccccccgcccctgtgactccggattctcttaactcttttttttgagatgagtctcactctgtcgccaggctggagtgcagtggcacgatcttggctcactgcaacctccgcctcccgggttcaagcgattctcctgcctcagcctcccgagtagctgggactataggtgcgcgccaccatgcccagctaatttttgtatttttggtagagatggggtttcaccatgttggccaggatggtctccatctcttcaccttgtgatacgcccacctaggcctcccaaagtgttggaattacaggcgtgagccaccgcgcccggcctctcttaactcttttacatgctgcccccatacaaatcttctcacgcatgataggatgcttttgtgcttgtttgctcatggccccaccagctcactagaaggtaagctccacaagggcaaggattcctgacgcttgggttcaccgaggccccctagcaactggaacagcctgtgtcacacggtgagcactcactgtgtggcgcgagtgaatgctgagtgtgtgtggggggcagagagcaggggaagtttgtgagcagaaaaatggccaagtgcaagctcaggaagttaaagaaagctgtggaggctgagcatggtggctcacgccagtaatctcaacagtctgggaggccaaggtgagaggattgcttgggcccaggaattcgagacaagactgggcaacaaagcaagaccccacctctacaaaaaataaaaaatgagctggtgtggtggcatgcacctgtggtcccagctgttctggaggctgaggcaggaggatcgtttgagcccaggagtttgaggcctgcctgggcaacaaaaggagaccccgcccctgccctcatctcatgaaaatgtgaaaaatgctgggcatggtggctcacgcctgtaatcccaacactgttgggaggctgaggcgggtggattacgaggtcaggaaatggagaccaccctggctaacacggtgaaaccccatctctaataaaaatacaagaaattagcccggcatggtgacacgcgcctgtagtcccagctactctggaggctgaggcaggagaactgcttgaacccaggaggcagaggttgcagtgagccgagattgcaccactgcaccccagcctgggcagcagagtgagactccgtctcaggaaaaaaaaaaaaaaaaaaagaaaaagtaaaaaataaattaactgggtgtggtccacacacctgtattcccagttacgtgggaggatcacttaagcccagaagttccgggctgcagtgagctgagatcgcacctctgtactccctcctgggtgatagagcgagaccctgtctcaaaacaaaacaaaacaaacagaaaaaaagaaagcaagctatggggtccaatctgagagaatcgagtgtgggtgtttatccgtaagagagcgaggggaaagaggcctcttaagccttcttaatcctgaaaatggggaggaggtcttttaagctgcagtgccagagtgacatgacctagttttctatttttagagatggggtctggctatgttgcccaggctggtcttgaattcctgggctcaagccagcctcctgagttgctgggactacagacatgtgccaccccacccagcttgacctggtttttgtgttcagaagatatctgttgttgttccaggtgccaaggccagtgctgggcacaggggtgctagagcctactgagaaatggacatagaaccccagtgtccatccttccatcttggagcctgtgcttctcaccccacacagccctgctgtctgggaggactgtctgccccttgaggtcatctgcccctggccactgtgccaggacagtcctgctgtgggtacgagccacagggcaagaaagaacacatctgggagctggaaggcctaatcccagggaaagcatgtagcctggggcagggcaccaaggaggcttccagcccccacattctaaggaaagaaacaccaggaaggtgtggccttaggcaggccccttttccttttcggatcactgcctgcctgtcactgatttctgtcctaaccccacactaatagctgctatatatatatatatgtattttaagagctggagtctccctaagtcactcaggctggccttgaacttctgggctcaagcgatcctcctgccttggcctcccaaagtgctgagattacaggtgtgagccaccacgcccggcagcaaccattttttagctttaatgtgcaccagctctgtaatcaagtgcatcctatatgttcctgctaattaactcaacagtcctacaatggtggttattaattgctgttttacgaaagaggaaactggggctctgagagtttggggaccgacccaaagcattcagtgcctgtggatgcaactgggatgcagggagccagtgggctgggggtgaggtgtcccggcaggtggaggtggtggggtacttacctccatgatggctgctgctggttggctgctcctgctggtgactggcgtcccacaggaggcctggggcctggcgatgatgcttgccggagcctgagggcccgtcccctgcggggctggggcccaggcccctctctgcagagctggagtcttcctgctcactcggctcaaaytctgggatctggaacatgctctgggctgtraggacaagatgttacgtagtcaaggcacagctggggccaacggtggccctggaaggcagaggcaggtacccctggcttcctctcccaccgtagcgcccccaggcccgccaggcctcctgggccctcatctgtctgccgggtctggcctggcagggagctgaggctgtcggctcaggacctcagtctcccctcagaaccccggtggacccaggccccgccccgcccgtggtgacggcgcacaggtctcaccccaagcccgatctcgaggcccctgacccgggcctgccgcctccctccagcaccccgggctccgggccctagttgcttgggcaacgggaactgtcagcgacctggcccaatcacctctcggaacgtcactcgggtaggtccagaggcggggtcaacccggcccggccccgcccccccgccggatccaaggctcctcgtccgcakcctttttcctccctccttcggccccggggctcacatcctcgctgcctcacaccttgggcgtgtgtgggagcaggagagggattctctggggtccccatttggaacctggagacccacttctgccaacaagtccttcagccyctctgggccttagtttccccccagtgaagtggggatagtgacagctcccccgggagccagtgaaaactttgtgaagggagtgattactgcgggcgaaggcgcttggcacagccacaactgaagctcagccgtcggatgtgattattgttgctattgttaccgctccgcctggactgggtgcccggtcggaaagtcccgctccccgctcctcctcccaggcgcggaagcttcgcgccgcccgcctcgggggacacctcccgcgccatctcgggggcactggagataaggaaaggaacctcctccctggctgggatggctgcccgggcgcgggaggagggccggggacccggtgagggaggaccgtagggcccgtgggggcttcacgcctggcaggcggccggccaggtgagcagggccgcgggcgcgccggggcgaggggcgggcccgcgcgggggattcggggctccgcgggttcaggcccgggggcggggcccgggggccatcttggctatgggcggaagttttcttcagagaccgagggacgggaatccgttgccgcccccggccgggcggcacgaccccgatttgggtataggagagacgagcgtgggaactggcggacccccatacaagtaaaggcgggcggcacggggcacggcccacccggggaccccctggatgcggcacggcccccgcaactcggccgccckcctgccgcctcccgtaaccccgggcgcccgccagcggcgcagctcgcgccaattctcgtacggtttcacgccgggtgcggcgctggactgcggagccagccgggccgctgcgcaatttgcgtagcgaacggcgcccgcgcaggcgcggagggggaggggggcggagcagcgggagccggggagccggagccccgggtccccacgacctgagccggctctcccatcagcggcctgaggacctggcgtccgcctcctccctccccttgaggctggagcgtggacgcggtgggggagggtggggcgggggcagctttcgagaattacgaggacaggaggcagaggccctccccatccgcattattggaggagagagagcctcccccagcttggggagggggagagcggggcattgggcgcccctcgcagcggccgctgccctgacccgacgggtatcagccggctctccccctccacccaggacgacatgaacgaccgaggccagggagtcctctccttgggcctctgcatccccccatccttggctctggggtaggcccagggaggagacacccccaacccctatccggtctgtcctggagaaaagagactgcccttccatgcccctgagtgaggggcctggggcccaggctgcctgtgttccccaagggcaagggtctctctgttgaggaggaggggcctgtcagccacaacttctttcctcctgagcgccccatctccctctctgcaccctgcaattcccacccctccgtatttatttccctggtcccgccgacagtccctccttgtctgtctccgggattcaggcctccctccctgacatggagagtaacctgtctggcctggtgcctgctgccgggctggtgcctgcgctgccacctgctgtgaccctggggctgacagctgcctacaccaccctgtatgccctgctcttcttctccgtctatgcccagctctggctggtgcttctgtatgggcacaagcgtctcagctatcagacggtgttcctggccctctgtctgctctgggccgccttgcgtaccaccctcttctccttctacttccgagatactccccgcgccaaccgcctggggcccttgcccttctggcttctctactgctgccccgtctgcctgcagttcttcaccttgacgcttatgaacctctactttgcccaggtaaccaactgtggtcccgggtggggggcgggaggtggcaagcctcaaggacccacaggagtgaagggcatctctgctcctaggtggtgttcaaggccaaggtgaagcgtcggccggagatgagccgaggcttgtaagtactcgggacactggtgggctcagcctccaggtcaggggcaggtgacagtcccatgtagatcccttcccacctctcagggctgagacaaaggcaacccagggaatgtctgtggaagatcttggaaaagttaaagcacctggcgcagatggctcagcagaggccttgcagatctgcaaggcacaggaataggaatgcttgtggtagtgtgagggagagggccccagtgtcatccaccatggagggcgagctggaggctccagcccatggaagcaccaaagccatatgcactcctgggtgacctggggccgcaatgccctcrtcatttgtacagtgtcttacggtttataaagagctttcccagccatcttttatttgtacaatttccctgagaggctactatcctcccttgagagatgaagaaactgaggcccagccaggtaagacagcaggatcaaggtcgcagagctggggctcagacagagacttctgactccagttggtgcaccttccgaagtaccatggctgtcagtcaccttctgacctttttgggcctcagtttctccatctgtaagagtggaggaacagggctcagactggatgccctgagttttgtcgacattggggtttcctgcaggaggtggggcaggtggtgagtgctgagggctgttgagggcccgcgctgactgtgctgtggctgcaggctcgctgtccgaggggcctttgtgggggcctcgctgctctttctgctggtgaacgtgctgtgtgctgtgctctcccatcggcgccgggcacagccctgggccctgctgcttgtccgcgtcctggtgagcgactccctgttcgtcatctgcgcgctgtctcttgctgcctgcctctgcctcgtcgccaggcgggcgccctccactagcatctacctggaggccaaggtagggctgcagcactgatgcccaggtgtcttttgggtctctcggcagcggttctcagggtgtagaggaagctgggagccttctctccctgagggtcctctgttgttacctgtgccaggggaccagtgtgtgccaggcggccgcgatgggtggcgccatggtcctgctctatgccagccgggcctgctacaacctgacagcactggccttggccccccagagccggctggacaccttcgattacgactggtacaatgtgtctgaccaggtgggcatacgcatgtctgccacctccttagtagccgtggcaccttggccccagctggcctgggccctgtcccactacccctttggcgtgactgcagactggcaccagcccctgccttcccacaggcggacctggtgaatgacctggggaacaaaggctacctggtatttggcctcatcctcttcgtgtgggagctactgcccaccaccctgctggtgkgcttcttccgggtgcaccggcccccacaggacctggtaagggtctgctccctcttctgtggggccagtggagggggcggatgttgcaaatcctgggttggagtctggggttgggcctgggaggccagtgcaggacaggagtaagtatcgatgatggcttcctcccccagagcaccagccacatcctcaatgggcaggtctttgcctctcggtcctacttctttgaccgggctgggcactgtgaagatgagggctgctcctgggagcacagccggggtgagagcaccaggtaggagccgtggcactgcctcagtacccctgccctacccgcccaccccgctggctccatcaagctatgggggaccgagatagccgggtcttgccttccacccctgccatggcctttgcttccccatctgtactaggtgaggtcccctgggttcctattgctaaagcctccacctcttgcctagagatgtactttgtcctgggccccgaaggtctaggtcacaggggttctgttctaagcctgtcttcctcctgcagctcttgtgactgtggccctggtcactgtcctgagactgaccctgtttctctgctgcagtatgtcgggcagtctaggctctgggagctggtatggtgccatcgggcgtgagccgggctggtatgggggcagccagacgaagaccactcctctgctcttctcccaggtgccaggaccaggcggccaccaccacagtctctactccaccccacagacgtgatccccctccctcccccacagaatacccaggccccagtccccctcaccctaggcccctgtgccaagtttgtctgccgcttcttgcccaggatcctgggggtcgtggctaccccctcctctggccggctccttgctgctcctgtcatagtgagcttgtgccgtccccctaggatggggggcatggccctggctgccagatgcccacagcaccctggcatgacctgccacctctgcttccacaccggagccagctacctctcctgtgcctgccactcaataaacagtgtctgcgccccacagttgtgcacctgtctgtcatctgccttgtgttcctatcacttttgcctgtttggcctaaggctgaacagacactagcccttgaagtgggctgctaggctgggcaggggtgacttaccccatcaaggctggtgggctgggagaggtggggcctgcagtttgcaagggaaggagaccacacaggcctttgttctcaaagctctcctggcccagaattgccccactacctccagatccctctccacttgaacagttgctactctttcctcaagacctgcgtcaactgttacctcctttaggaagccttctgtctcctggtcaagggacatggcccctctgctgggccccacagctccacattactgattatgtggccattgaggttctttgttttgttttgttttttgaagcagggtctcactctgtcactcagactggagtgcagtggcacgatcatggcccactgcagcctcaacctaccaggctcaagcaatcctcctgcctcagcctcccgagtagctgggaatacaggcacatgccaccattcctgactaattttttaatttttaattttagaggtggggtttcaccatgttgcccaggctggtgtcgaacccccgggctcaagcaatccacccacctcagcttcccaaagtgctgggattacaggcatgaggtaccatgcctggcagcttctgagtcttaaccccaatggattagactttctggaggccctgtttccctatcaccaccccaacctggtctttaggagtcaggagttagtccagggcttgctggggagttggcgcagtgactgagcagcccccatcttcctaccagggcgtgggtttgcccagatgtacaggtggtcccctagctatgccctcccgttagccctcttctccactgtccttagtagcatagtcactgccctctgcttccatggccctggcaggtctgtctgatggctaggagtcctttgctggagggtctgtcccctgcccacataggtggttgtcccagcttttcagagttcccttggcttatcactgggcctgcttcaaaaccctttacttgggaccatcctgggcaccaggccctcagggcctccagagagggcatctgagactcatagagaatcagcttgaagctggacaatcactttttgttgaaataaaaactgctaacgtttgtggggcactttattgtgtgtgccaggctctgttttgaggatttctaaacactggcctccttaatgcccagaacagcaccccgaagtgatgattaatcatcccttttctgtaagtgggaacagggagactccagagtttggtaacctgttcaggttccctaccagtagcgggtggtcagcctcaaagcccaggctgaaagccatccagcatgagggctgaggaccccagcaggcaccagagggtctttggagaggtcacaggttgtcaagtgggtgagaacagggcggggcaagttcaggaccagccagggcctgggtgttcaggcagtgggagagtggatgctggcaccagtgccatgctgggatctgcaggcagcttcagccacagccttccggggctgatttctgggcatggaagtgagaaccaaaagctggggcagggagcaccctggagggatagccggggagcaggtagagggccaaaacctggagtgggggcaggaggtgctccagcagcaactcccccagaggtgggtcccaacctccacgtcggccaattccaggtggccccaccgggtttcccccacccctttgtcccgcggagcccctccctcatgagtgctgagcccaagggccaggctgtccccaggggcggagagttgcggacccttcccgatccggtaatgggcctgggagatgccagattagcgtggtgcctgtccggagagacgggccagctgatgcccaggtcggggccctgccgctggccacactgggctccggtccaaggctagaaggctggcccctgctgcaacccctctccggctcctctgccacccacctcccggggctggccggctgtggggagccaggcggccgcaggtaaacggcttggggcggcgccggcggcgagggcgctgcacggagggaagcgcggcgccggaggggttaaccgcgggaggaggggggcttctgccggcgggaggggggtcccagccccggcggccgcccgctccgcccctgccgcctccgcggcccagtcggcaccggcgaggccgtgctggaacccgggcctcagccgcagccgcagcggggccgacagtaagtgcggtgcgggctccggtgcgcgggcaggactcaggggcagggacgccccaggggcgactggccgggcggggtgcccacctctcgcgcgtgggcgcctccgggagtggtgtggccgccggtcccgccgcccgccacgctccgaggcgtcgctgtgcggacgcgggggaggcggtgggagcgagctgcgggcgctgcgcggtggccctgctgtctggcgtgtgcacgctagtgtccacacacgtgtgcgtgggctctgggtgccctggcgcggccggcacgcccatgggggccggggatgccggggcgtctgcggagagtgcaggtggggtgcgtgcgtgcagcggggcggcgcggcgctgcagcctcgggatggagcgtgggcgcgcgggtctttgtgcccgcgcttggcggcgcgtgccggggcgtgtgtgcgcgtgggcgccgccgcccgctgtctcggactgacagctgtctcgggggctgccgccccggtgtggcctttgcggacccccgccccgctttttccgggaactgggcgtccccagcacccctcctcgcctgggtgcggcggccgggacccgcccctgggttcctcgaaagcccggcggggcgcgggggcaccctggagggccagccaggaagcagggcgaggcgagaggggacggagaagccgcggagatgctgtcacagccgcagcgggcgagcagggacccaccattcccctgtccccgccttgcgctgtccggcctctcctccgggtttcccttcggacgcctccgagccccctcagcctcctcctcgagggccagctccccgcacccccaccaagctccacacatttcctcgctcgccccgcttccccctaggcaggcttaggctctctttcggcctcccactcgccttcctttcccttctcggtgccctcctctctttcctcacccggtagtcccagacaggggctgagggccgggcagcggaggtaaggggaaggctggagataggagggggactgggtgtgtccagccagagggatgtctgtggacagtgcagctgggggctttatggatctttgggtgtgtaggggatagaggaggagggtgtgggtgtcaggccagctcagtgaccccagcatccctggttttgcccgcagtgacgacagctccccaggagccccccgcccggcccctccaggcgggcagtggagctggcccggcgcctgggcgcgccatgcgcagcaccacgctcctggccctgctggcgctggtcttgctttacttggtgtctggtgccctggtgttccgggccctggagcagccccacgagcagcaggcccagagggagctgggggaggtccgagagaagttcctgagggcccatccgtgtgtgagcgaccaggagctgggcctcctcatcaaggtgcgtgggtgggccgcagccccttcagctgtcacccatcacccctggcgctagctgtgtgccagtgaggccctgtgccagtgctgctttcagatcagtatccctgaggacgggtgcagtgggaggctgtgggacagaggctggggaccaggtctctgtgttttcaatagggcaactgtggggtcatttgttttcctggagagcctggcacaggactgtgcacctataatgtctccttcagggtgtgatggtggtgggatgagggggaaatgaatgaatgaatgaatgaatggccatagcgcatgggctatgttacatttgcacaggtctcactcaccggtctagattgccacacaaaatccaagactctcatttaaacatgaattacagttaaactgcaaatgcctttttttttgagacggagtctccctgtgtcacccaggctggagtgcagtggtgtgatctcagctcacagcaacctccgcctcccagactcaagtgattctcctgcctcagcctcccaagcagctggtattacagggattcatcaccacacccggctaaattttgtgtttttagtagagatggggtttcaccatgttggccaggctggtctcaaactcctgacctcaagtgatccacccgcctcggcctcccaaagtgctgggattgcagacatgagccaccacacctggcccacaaatgcctttttaatacaagtccatcccaagcaatatttttgtttgctaaatctggcaaccctacctacaccggttcccatacttttcttggagtcatgtgccttagaaaagcccaagaacatggtgaacacaccccctccccctggaaaagtgtgcatatgaacatgtgcaggtgatttgggagggttccaggatccatgccaccaggaatgccaggtcaggtgccccttcccccagcatgcatgcttaccatgtggggagaagggggggtgcgtcagggttccctgaggcacttctggtcagactccaaccatagactcaagaaagtgttggccgggcacggtggcttatgcctgtaatcctagcactttggaaggctgaggtgggtggatcacctgaggtcaggagttcaagaccagcctggccaatgtggcaaaaccccatctctactaaaaatacaaaaattagccgggtgtggtggtgcatgcctgtggtcccagctactcgggaggctgaggcaggagaatcgcttgaacccaggaggcagagattgcagtgagccaagatcacaccactgcactcactccagcccagcctggatgatcggtctcaaaaaaaaaaaaaaaaaaaaaagaaagtgttgggctgcagccttctgggatacagtcaggcaggcacgtctgttactttttctgatttcggagtcactgtcatacaaaaaaattaagatttagctttaataaattaatgtctattatttgaaattgaagagtaccctttgttccctgcctgttctttgtggagagaggggccattggcacggaggcctcagtgttccagcagattctcaaggcagcaggactcagggcagagatgagtgtggggtggggttgggacacagaccacccgacagcatctctgacacttacagaatgccagtggaggctcagagaggcgtgggaagaatgtatctggccagaccacagggcagagagagggagggagggagggagggaatctgacctagtttgtcttcacaatggaattgcttttttcctggataagaaaaaggaagaaaaggagaggcaggacctagaagggtgggtgacagccgctttatttctcttccacagtaggattcactccctgaattagttgtgcagcaactgtgcacctactgtgtgctaggtgctgtagtgttatatgccaaggggatattggagtggatcagacacagggtctgccttggagggtgtcacatctaggcaaggggagagatccatggtcagacagatcactgtaggattcagtggaaaggaagtttccctctttctgttaagcaccaattgtgctagaccttgagctaggggctggggacaaggatggagatgtcaggggcctgagggatgacctggtgattgaaatacaccaggcgagaggggtagagagtagagacgaggggcaagagatgcccatgtggagagacagcatgggcaaaggcgtggaagctggaaagttccggagcattttgcagaacctggagttagcagatgcctagtcatttgaagcaaaaattagaacacacaggat

SEQ ID NO: 97758 - DNA, 13671 bp, Homo sapiens
acaaatgaagattcaatagcttttaccttggaactctagccatgagacagcaatacaaacttgccggttctacttttgtttgccccagtagttaatccaatgaaggcagtgaaccaaaatttcaggtaaagcagtttccatggcagtttaatttgtaaaggtcaaacctccccagactccaaagaacactggggccaaacagcaccaaaggagaacatcacatataaccaggcctgaccctgcttggaacagcagcatcaaagcctggatacatgcaactccatctcactttcccattcaacaacacacttgattccaaacaatactggggccaaacagtattgcaactgtgagataaaattctaaggagggcttagtactaggccttaggacctctgccaagggtgttcccttcagagaggttgaggtccaaaggatcccctggggcatccctctttggggtccagtcttaagagtatcagacgtctctgacgttacgtgggcaccagtgccgctttgcatgttttccctccagaggcaatggcctactactatgagcttccctttggttcctaggtataatccctgactttcagaatccttaaaatttgataaggccatcttttcccatgcttcctggtccactacagtgatggagcaaaggaggagcatttggtcccactctagtggaacagcatgcttcctgttccactagagtgatggagcaaagtggactttgctccattccgtgaactgtagtgataggaactggaggctaggtgggtttcttttgtccttagccagtcgagtagagtaagggaaaaatttagtgtaagaaaagaagatttaagttgcctgaaacacatgtgagttcgccctgagctgctccacatgtagggatcaggaaccacaagcagaaaagacagaagagagtccttcagagtgatcccagccagaaatctgcagttgcctctgtgtttaggcgctgcccaccaagggtcccgagtgaagaagagattccactgcgtggagcagaaaggaaaaggaaaaaaataaatcccaaacttattttacatcctggctggcttgccaaaatatgttaccggtggagggcgtctaggttcttggtgtcttgaacaaagaattggacaaaatgcacaaacaaagcaagaaaagaatgaagcaacaaaggtggagatttattgaaaatgaaagtacactccacagagtgggagtgggcccacacataggggctcaagagcctaaaaaatgtcaattctacccaaattgattctactaatttaatgtgattataatggaaatcccagccaaatttttcatagatataaacaagctgattctaaaatgtttctgcaaaggtcaaacaatattgaaaaaaaaaagataagaagattcacactacacaattttctagtaatcaagacagtgtggtattggcagagggaatgacacattgatcaatgtgacagaatcaataacccggaaataaatctgcataaatatagcaaattaattcttgacaaaggtgccaaagccattcgataaacaaaggagagtacacaacaaatgatgttagaattggaaattctgtatgtaggagaaaataaacctaaacttaacactttatacaaaaatcaactcaaaatgcatcacaggtcttaaggtaaaacataaagctactaaatttttataagatttataagaaaacataagaaaaaatatacatgtcctgtggttaaaaagttcttaaatattacatcaaaagaacttataaaacaaaaaattgaaaaactgaacttcattacaattaaaatcttcggttctctgaaagacattgttcatagaatgaagaaacaagctacaaactggaagaaaatatttgcaaatcacaaatccaacaaaagacttatatccacttaaccaaagatgatatataatgtaaataaacccataaaaaacagatgctcaaaatcattacccattaacgaaatgcaaatttaaatcatgatgcaataccactacacacctagaatgacaaaaattaaaaatactaacaataccaagtgctggtcaggatgtggaactactagaattttcatacactgccagtaaaactgcaaaatggcataaacactctggaaaacagtggcaatttcttataaagttaaacatacacttaacaaatgacccagcaatcccactctcaggtattacactagaggaataaaaactaatgttcacacaaaaacttgtacgtgaatgtttacagcagttctattcctaatcaacacaactagaaaaaaaaaacctaaatattcttcaaagaatgaatggataggccaggtgcagtggctcatgcctataatcccagcagtccgggaggctaagacaagtgaataacttgaggccagttcaaaaccagcctagccaacatggcaaagccccatctctactaaaaatacaaaaatcagccaggcgtggtggtgcatgcctgtaatcccagctactccggaggctgtggcatgagaatcacttgaacctgggaggcggaggttgcagtgagccgagatcgtgtcaccgcactcactcaagcctgggcaacagaccaaaactctgtccccccaaataaaaaggatgaatgaatggataaacaggtacatccaatcaatggactactacttaacaataaaatataaactggttcatgcaacaactcggatgaatctcaaaggcattatgctaaataaaagtagccagtctcaaaaggttacatgctgtgtgatttcacttatgacatcaagaagataaaactacagtgaaggaaaagagactagtagttaccagggattagggatagaaggaagatataactacaaagggatagaaagcacaagggaacttctggaagtaatgggacaactctatgtcctgaatgttgtagtggatatacaaaatctatactcatggtaaaattcatagaaccatacaccaaaaaacatctattttactctgttaattttttattttaaattaaaaaaaataaaaggtaaatacttaagattcgagggaaatattgagaatatgtttacaattcagtgctttgaacaacatctaaaacatagaaagatatcattacatatacgcaagttatttttatgaagtaatctagaaagttaaagataacaggctacctaaccttatgccatgagccccatatcaaaccctggattacttcctcaatcctcagagagtgatttggcttgagaataaaagaaataagcttcatttcctttattctgaggaacacaaaatgtattctgaaaatgacaccaccagaaaactctaaaatacaacaagataagtgccatcttacccattataggttctatccctggttttcattttttttagaatttaaatcagaaaaaaaattaaaaactaaggctagcttcctatatgtaagccaacaaatatactaccaatttattttagacaagggtgtcaagtcttttcaacaaaacagtgctggaacaactggttatctacatggaaaaagcaaactttgaccccctaccttacctcatacccaaaaaattacttcaagttagatcatacaccataaaacttctagaagaaaacagagtaccttagagatgcttaagcaaaaatttcttaaggtataaaaaaagcactaaatgtaaaggaaaaaaattagtgcattagacttaaacaaaattaaaatgtctgcttatccaaagacatttggaaaatgaagaggtaagcaacagattgagagaaaatattcataacacatacatatggcaaaggactcacatccataatatagtgacatgccacataatgaactttcagttgcagctgtcatgacattgtgacgcggttacttttttataaagtaattggaaaactaaaaagcctaagtgttcagtgtttataaagtccataatagtgtacagtaatgtcctagaccttccattcactcacctctcactcactgacttaccaaatgcaatttccagtcctgcaagctccattcatggtaagtgccctatacaggtgtacatatttttaccgtactttttctatgtttaaatatgcttagatatacaaatacttagcattgtgttacaactgcctacagcattcagtacagtaacatgctgtacaggtttgtatcttagaagcaataggctataacatatagcctaggtgtggagtaggctgtaacatctaggtttgtgtaagtactctgtgatgtttgcacaatgacgaaatcacctaacacatttctcagaacatatcctcactgttaagcaacgcatgactgtctaaaacaactacaaaccagtaattttttgaaaatgaacaatccaattttaaaattagcaaaagacttgaacatttcacaaaagaagatacataaatggtcaataagaacataaaaaggcattcaacatcacaggtactatatggctaaaataaaagaatggcaacatcaaatgttagtgaggatgtagggcaactggaactctcatatattgctggtaggagtgtaaatggtacaaccactttgaaaaagtgtatgtcagtttcttttaatgttaaatacacatctactctgacttaatttcactcttaggtatttacccaacagaaatgaatacatgtctccacaaaaaagacttgcacaagaatgctcagagcagcctaattcataaggcaaaaactggaaacctaaatattcatcaacataagaatgtataaacaaattgtgacagaataataaataaattgtgatgtattcataaaatatattcattcagggaacatattcattgaatatattcacgactgatatacaaaacaatatgaatgcattacaggacagtatatgaagtgaaagatgctcaacacaaaagaatgcatactgtataattttatttaaagaggttaaaaaacagttaaaacaaatacatggcaatagaaatcagtaagtggctgtctctgaggagctggatggaacagaccggaaagaagttcaaggaaagattctgtatcttgttttggttcatgattacataagtgtatataaccatcaaaacttcaactcaacatttaggcccatgcattttattatatgtaaattatctgaattttttttaaataagcaaaaaataaaatgaataacaatattgataagaaagaaaaaatactgaatcaagattataaaggaacgaccccaaagattatgtctgctcttaagaaatagagaaataggtgataatttaccatccaacagaaaaaaaagttacctctctttaggagacagtcctgaaaacagaaacactgacttaaggcctaaaaggttctaaagcagcttttcatcctcaactccaactctgagaacttcagttctacctgatgaagaattatatcaacctaatatgtgataacaaggaagatatacattaaaagcaataagtaatcccttatcccaaactgccttaatagaaatattatacatccgtatcctttatacctgccatgagggcaaccagcccaccatttctacaagccctttggtgagcaagagttgtttctttataaaaataataaaaaaattagtagtcctgccttacctaaagtaacaattttcaagactcatacatactctctttcatttgaacataacttcatttttaataaaaatacaaataaaaacttttcttagaatagtaataaaatcagttttccatcccagttgcaatcaggatcaagatgtctctccctaagtgtaagtgctacatagaagttcaatatttttcctatgagggtaagaagcagaaattaattagttgttaccctcatattcactttaagtagttcaaataacagcaactttagaagattgttagctgaaaatcaaagttagtaaagttttagttgggggtggtaggagaaggaggagacagcaaatcacttataaatggcttcaaaacaggacccaaagcctaaattccaggaggttgagtgagtgctgtgctttcatgggcctcttcttcatgaaacaaagtgtgtaaaggttgccattaaggacaaacaagtgaaatactttatacattacagtggttggaataaaaattgggatgagtgggttccagagagcagagtactcaaatacaaggacactaatttgcagaaagaataagaacttcaaaaagccaatcaggagcagtatgcagaggggaagacgataggggctgccccaggaaagaagacatctggtctccaacagaaaaatgttgaagtgaaaacaaaaaagaacaaacagaaaacccctggaaatggagatggtggcagtaccagtgagactccttggcctcctcggaagaaaaggacccgggtagatcctactgttgaaaatgaggaaacattcatgaacagagttgaagttaaagtaaagcttcctgaagagctaaaactgtggcttgttgatgactgggacttaattaccagacgaaaacagctcttttaacttcctgccaagaagaaatgtggattccattcttgaggattacgcaaattacaagaaatctggtggaaacacagataataaggagtatgcggttaatgaagttgtggcagggataaaagaatacttcaacgtaatgttgggcacccaactactctacaaatttgagagaccacagtatgccgaaattcttgcagatcaccccaaggcacccatgtcccaggtgtatggagtgccacatctcctgagattacttgtacgaattggagcaatgttggcctatacacctctggatgagaagagccttgcttaattactgaattatcttcatgatttcctgaagtacctggcaaagaattctacaactttgtttagtgccagagattatgaagtggctcctcctgagaaccgtcctgagagccatgtgagaggcgctctcactcacttatgtttggatctctgtaaacacatttttgttcttagtctatctcttgtacaaacgatgtgctytgaagatgttagtgtgtaacaactgatgtttttttctgttttgttttaaacaaagaaaataaaaggggtaatagatcctttttctttttttttttaatttcaaagtcactaccagtgtattcaatgatggacaacagaggatatgctgtagagtgttttactgcctagttgacaaagctgcttttgaatgttggtggttctattcctttgacactacgcacttttataatacatgttaatgctatatgacaaaatactctgattcctagtgccaaaggttcaattcagtgtatataactgaacacactcatccatttgtgctttttttttttatggtgcttaaagtaaagagcccatcctttgcaagtcatccatgttgttacttaggcattttatctttgctcaaattgttgaagaatggtggcttgtttcatggtttttgtatttgtgtctaatgcatgttttaacatgatagacacaatacattgtgtagctagtgttttctggaaaagtctatcttttaggaattgtttttcagatcttcaatagattttttctttaaatttcaaaaaaaaaaaaaagtaaagtttttgctatgactccccagctaaaaactacatttctccatctctctagtagctgagtaagaccatatgactaagtaccagtggaatatgagcaagatgatacatgcaactttcacctcacttgtttaaaataaaattatttatctggactctgtggactctctctttccccttccccactgactggaagataagtgtgacaatgtcctagcttgaccgtgcagattaagacaagaccctaagaggtggcagagcaacataaaggaaggagcccgtgaaagacccagcagcctgaatgtgtgacctgttgttatatgataaataaacttctttcttacttgagccactatatttgtctcttgttaacattagtttagcctttatcataacaaatagaccaacaaaactagttcttggttttatttccctaagcctttctgatttgtgtttcacccctaataaaacattgtgattttcccttcttagtaggttttcctaaactgtatacaaactacattctgtgtgtaaagtatgggaaagtatttttttaattccatctcaaatctagcttaccttattgcacttacgtatttaactgtgccatttgtaatagctataaaaagccctgtgttcagatagaagtttcatgaattcacttaatagcaatgcattaagtgcaaaattaataacagtgctataatgctacctaaaataataagaaaagggataagacattgtccttgtgcttaagaaactcagaatctaatgagaaagccaattgtatacctaattaaaatataatataaagatactttaacactagtatctggtaaacactataaaatatatatatacatatatatatgtatatatatatatatattttttttttttcaagacaaggtctcactctgtcacccaggctggagtacagtaccacaatcacagctcactgcagcctcaaattcctagcctcccacctcagccccctaagtagctaggaacacaggcacacactaccatgcctggctaattttttaattatttgtaaaaacagagtcttgctatgttgcccaaactggtctcaaactcctggcctcatgcaatcctcccatctcggcctcccaaagagctaggattacagggatgagccaccatgcctggcctataaaatattttttaaaggacattctatccagggataaatgggggagaaagtcatctgagatagtccaagtcactattatgtctcacttggataactccaacagcctcctatcttcctgcttccactctagctattccgtcaatagcccataaacaagcaagaataatcttttttaaacataaattataccataaaattgtctcatgacttgccattagaatgcaattggagtgaaatgtaaatgttaacaaggtgtataaggccttatgtgatccacactgttcttaccactcccaccactctctagccacccagtttgctttctaacaagcatgtcaagatctttcccaccacagggcctttgctggttcttctgcctagagtgtgcttccctcagcacaaccagctccttctcaacatttatatgctggttaaaatgtcacctcttcagagaggctttcccttcctaccatacctaaagcaccatcttcacctccaccatccaaagccctagtatccctttatactattattctgttttattttcttcatgcatcacagtacttaaaactacctgaaatttatttcactgtgtttttactttctatttccctctgctaaaatttcttaaagctccattagggcaggagactgatgtgtcttgttcactgtactaatcacagtatccagcgcaatacctggcacatttgtatgtgctcaataaatattgttaaatatgctgggcatggtggtgtgcacttgtagtaccaactgctcaggagactgatgcaagagtattacctacccaggagtttgcgcccagtctggggaacatggtgagactctgtctcttgaaaaaaaaaaaaattatacgtatcattaaacaaagatagatgacatgtaagctggattgttggaaggtagttaggaacagaaattgtcaacaggaacagacagagatgtggaaaaggaaatcaaacacatttcctcttacgtaaaatttgattttcacaaattttttaggataaagtaatagactattatggttggaagatatcctaaagcttttatctaattttctcattttgagacattaatactttaaaacatccccttgatgttttcctgaaaacttcccttggtatgtaaatcattatctcatgagctaacctattctaattcaagcaactctataactattaaaagattttctcgtattaatcccaaatctgtttgcctgttacttatacacattactcctgattctgatactggaggttctcatgaagacaagtttaatccctatttcatggggcagcctttcaaatattcaaagatacctataataccctcctaaactaaaaaacaaaaaataggtaacatttattaacagtatctgctaggctctgggctaaatatgtgaattactcaatcctcacaactactctaaaataaaactattatgactgtacctattttgaaaatgagaaaactgagccggtattagataacttgcctaaggtcatcaagctggaaagtgctggagtcagaaattaaacacagatggtgcaaatccagagcctatattcttaactgaaagccccactctctaaatgacttctgatctttgtactatttgcactaagccgctatgtgtaaatcacccagataactatgctaaggcacaaaactcgaccaactatctcccacctaatgatgaaggcactattgattctcaggtatttataaaaacatttataatacaagacttagtaataaataagaggatatgcaatataaagattaacatttgtctacaaatactaacctatgctttcatttttatgcctattcttcttaagcacacactccaaactatctgaaatattttccattttctcaacatactctttatttcaatactcctctaccctttgtttacatgattcttcctaaaaggaccttcctccgatactgcagatactgtgtccttaaaaaaatggtagtgctatcgcaaggacagaaaaccaaacaccgcatattctcactcataggtgggaattggatagtgagaacacttggacacagggtggggaacatcacacaatggggcctgtcgtggggtgaggggaggggggagggatagcatgaggaatacttaatgtaaatgacgagttaatgcgtgcagcacaccaacatggcacatgtatacatatgtaacaaacctgcacgttgtgcacttgtaccctagaacttaaaagtataatttaaaaaaaggtagtgttacgaatatttcatttgcccctccagatccattcttcattcttctccaccctgttcagtgccccaggagactcttgtttatatccaaagccccccttgccctctgtctttggggtggagtcaaccaatggaatacaagagcagaagacagaaagacaggaagtgagcctggggtagttattctcccccactctcccacccacctccacccctgctctcatgtaaaatcacctctggttagtgatgctcctctactaccagagccacggcttctttcaaatgaatctctatacagctactctctgagtcttaacagctccctattctgcccttgtatgtctaaaggtgataacggctatctgctgttgctcatcagatactcataccatgttctcttaacacttcccactcttttataaatcattccttcataaactctccctactttagccatttgagtgtgccatctattttcattaggacgctcactcttacagagggtccccaggagcagggaggcttgtgcaagaatggaaggcaacagccaaggcttaatgtgtgatctcagtccgagacaaacaggcttccaaaacaattctactggttggatcgctggcttttcatcctttttgacatagtagtgtttacttttgtgttatcttttgccaagaccagtgtgctgatatctaaacgaataagctggtttctggaatgaattctgaaaatgactacaaattcttgaataaagcagacagacaggattgtgctgcagaaaaacttcaaatgtctaagggaccttcctttcattgtataccttctgttcatttggagaactctattaaatgggtaggatatcatccattcacagctaagttcttaaaactagactctttgcttcatgcttaaaattttttttcaaacatctgatggctttgcagaggctgatgacaaatatatttgtacttaaaagtttagtgtattcattaaaaaatatagtaatgtctttcctttaacattttaagggttgaccagggtttaacataatgcaaataatatgatgaataataaggtgaggtatttataaattcaaaagtaaattactcaaaagtgaggaaaggattttgagagaaagaaccaagtgtccttagattgtatagaggctataacacaaaatacatgcaaaaaaatgtaggcccacatgtatttcttggctctaagtaccaattaaatattgagcttaagtaggactctgttacaaaaagatgtgtcatgctcaaagcgtcgatactgtctcagaaaaagtagataatgtccaatattggaaagacagcatacgtgtcctcttacctggatgtctccccctttcttccttttaaactcttgagccccctgaaataggattgtatgcttcaaaccttttttttttttactcttgcattaattaagcttttggccaaaatgtatttctttttataatgtctgaaaattatttaaatacttcagcaaagtcagtgtgatatttacccattcaatagctatttgagctcttaccaggcattattttggacatggcagtgaacaaaacagacaaaaattcttttattattattattattattattatactttaagttttagggtacatgtgcacaacgtgcaagtttgttacatatgtatatatgtgccatgttgctgtgctgcacccattaacttgtcatttagcattaggtatatctcctaatgctatccctccaccctcccccaaccccacaacagtccccgttgtgtcatgttccccttcctgtgtccatgtgttctcattgttcaattcccacctatcagtgagaacatgcagtgtttggttttttgtccttgcgacagtttgctgagaatgatggtttccagcttcatccatgtccctacgaaggccatgaactcatccttttttatggctgcatagtattccatggtgtatgtgtgccacattttcttttttttaatttaatttaattttattattattattatactttaagttttagggtacatgtgcacaatgtgcaggttagttacatgtgtatacatgtgccatgctggtgtgctgcactcattaactcgtcatttagcattaggtgtatctcctaatgctatccctccccactccccccaccccacaacagtccccagagtgtgatgttccccttcctgtgtccatgtgttctcattgttcaattcccacctatgagtgagaatatgcggtgtttggttttttgtccttgcgatagtttactgggaatgatgatttccaatttcatccatgtccctacaaaggacatgaactcctcattttttacggctgcatagtattccatggtgtatatgtgccatattttcttcatccagtctatcattgttggacatttgggttggttccaagtctttgctattgtgaataatgccgcaataaacatacgtgtgcatgtgtctttatagcagcatgatttatagtcctttgggtatatacccagtaatgggatggctgggtcaaa

SEQ ID NO: 97759 - DNA, 151031 bp, Homo sapiens
cctcttaactgactctctctcacttcttgcctacctcctttaaccagagacactgccttttttcacataattggagatacctggcaaaattaagtacagccttggaaggctatgatgggaagtatatatgctccttgtggaaagtaaaagtggactaggagtaaagacctaggttctagtccccgttttccaaatatctcacagaataaccctcagccagtatttttatctctctggagttcaatttattttccttgtacaatatataatgagcagatttcaattagattagataaactctgaacctgtcctatattttatatatctataccaacatttatactgaaataggctttttcggcaagaataaatttttgctttgaatggggtacagaaggcttagaagagtgtgctagggaaataagctgacttggtaattgaaagggaaaagagaaagaatgagagaagggcctgccactgaggaggacagagtctgatgacaatgaaaaacaaactttatgcttttacttatggttaccttctactaagtgtataaaaacaaattatggagatgtgactatctaatgcactataatggaaatactcatcagcactgtttcatatggtttgtcaacttttatttttaaatatggcccattctgctataatttgttctcagcttatacataaatttgagtatcagtgcactgcctaaagtcttcctaatcttatttgttccttaaaggagatttcaacaagtggagatgttaaaatcaaaagagaaaaacccacaacaatgtcaataacaagaagcagccctcaaatagctagaatgcatgtggagagggagtgtcccattagtaataaaatgctttttaaaaaaataaaacaaaaaatggcagagtgcagattatgaaggactttgcaagcaagggtcaagggcatgaacagtatcctgtggacaatgaaaagccataagagatttttaaaacagagtgactctatcaaatctgtgtttttgaaaaataatactcatggcagagtacatactatatttacaaaataaagtataaaattattatgtaggctgatattttaccacaaaatagtaacatgaaattggaataaaacactcactcactgaagccataaaataaatttcacaaatactacagtattcttaaagaaattaacagggaattatgccttgcaaattccttaggtgagtaaataaccacactttaaaaaaaactctcttttttaggctctcacactacatatgtatacctttttcaaataaaattaaaactttaagtaatatttatgggcattagggccacggaatttttaaatatttacctaaccatttagaaagcacttagcactaaagttatagaaaaatatctcacacactaacttatgcctttcaaaaccttgtatttacctagtcaaacacaaagtgatctcattgaaaagctgaaaattgcactgtagaatatgcaattaaaatggcatagaaatgtagcttgtttaattctgattaaagcttctatgcagacgactgatttttttaaacttcctattagtttctgctgattcttggcagataagactacaaactcagtgcttctttccattaacccaccaaagcagaacaccattaacagcacctagatttgggcttcaaatctctaaaagctttgccaaaaaaaaaaaaaaaccttagttaagaactgaactgatacatatatagcatttaaatcaaatattataaatctaattataaaatcaaatgttttacaaacatgccattatttttcaacacagtaatataacatcccaaaagttaaaaactactttaaatctattattctacaattaaaaacatttctattgatagaagtttaagtggctttcaaagaggttaataaaaatgtttaaattcttaaggaaatgaacatgtaataattttgttaccatcctacaaatgaacccccatatacttttttaaagtcctatccaaaatatacaggatatttgctcatctttttcaattattataccttggaaagtataggttagcaaggtcaacattcaacatttaagtaaaacttcaagaactactagtttgtgacatcttattttattttaatttctaccttaccaaaagtgtaaactaaaagaatttaattttagaattagaaggtattatataatttaattttagaattagaagatattacagaattcatctactaggatcccttaatttgacaggatactaagattcagaaaggttcacagacttttccaaaattaaacagttaagccaagactcctcaatcctctgtctatgaatccaggacattttctcctatgtcaggtcccatctaaaatcttttcatcttccttcaccttctgaaacaagcaagtgtttttaccattgtcatatacaacactttgaaaatcagaaaatctcctgatcttttacttccataaaagtactgatttcctctcaatatatttaacataatatacatgcaaacaaaaagcacaaatccactgttagacttctggaacaagcataaataaacattcttgttatgatagtatctgctaagttaaaaatacccttttctagtaatgtcaaaatagaattattttgtagacagaatattaggtaggcatgtataaaccctgaactattcacatatactttaagtgtgcaaaaatgttcctattagaagtagaatgtgaataagggttttctgcactaagaaattacaccctctttagaagcacaaattgtattttcctctaatataaacaataattgaagctacctggtatagctatatacatatatagctatgctgtgatggaaagagcaccacactaggattaagaagcctagaaattttccacttacaagaggacagacagaattaccgcaccaacaaattacaattaaaatatgttaaactgtaactgttaagttcaggaaaattgcccacaaaagtgatgaaactgctaaaacaattttccagtgttaaaaaatgcaatttgttcacatttggtcaaaattcaattaattccattctatgaaaatagttgataccactttgttccataataaatcctctcaaaacaatttttctcccgacacacattttcctaaagtactatctattatcactggtagtaaactgagaaaacaaaaggcataacagaactttttcaagtggttgaccacagaagtggcctctgaagccaaatcaagaagcaaagtattgtgtcattggaacattacagatcagtgttcaacacgtcataaaaccaatgtagtagcttggagattatttcgaagagaagacagacaagaagtgaaggaagagaacagaaaagaagagagaagaatgcatcaaatgcattaaggacaagaaacttttgtctccaacatattggctcccagtgtaaagcatatcactaatccaaaaattcagaaaacctagggtgtacgctcttactctcctacttaaaaccactatacttaccagttagtcgtgcagaacacagcactgaaaactcaaaaatctaatcaaatcccagaactaccacttaactagacatgtgaagctgtgttacctctatatgcctagatttctcatctctagaggttaatggcaccagccaaacaccgttcttgtgaggatctgagacagtatgtgtaaaatgttttgcacttcataaatgctcaataatagtaactatacttattaagtttcttggtgatgtacaacaggtagcttttccaatactatataaagatgtaaactcatttgctaatgatttcaatcccttttaaaaaaaaaacaaaaatatgtaaacctatggtgaaaaaatggaaatgcttttggcatctttccaggaattaccaagtttaaagtttaaactgttaaaacagtctcctaattatgcaacaaatacaaagaacattgaattaatctgtaaaatattatattcacctatactgctgtcttttcatctaaattactctcatttgcaaagctcatgtcttgtaacgataaaatctcagatttttcctctcgattttcaataacgaaaccacactgattaaaactcatagatgtatcctctcattctaaaggctgtatgttatttttgggtaggcatcattataacagcaaacagataaatggcaccaaaaagacacatatcagaggatgccaaaagcgggagtagtcaatctattcaaccacaaatgattcacctcattcttctgcgaactcatctattgcatatacagtccttaaaaagtgccatgtgattagcgggctatttgatttctattcaatgacaaaagctacttgcttctgcatttttaaaaggcttcctgtattttaagaatcctttccagaataaaacattatttcctcccccccccccccgcaacacaccctttttccattctgaaagttaacatgctttgaaataagcgaattcaactcggaaactgcagcggtaaacccgaacccgctcgcgtcccagacctcgccttccagctaacatacctgttctctggaaatacaaggcaacgacggtctcctgaatattttgcaactgccatagtaactggctgcagtttctcctaacgacacgcagctggacctcctccggggtcggatcacaggcactttttcttcggcggcactggacagtcgaggatgaagaggcgcttccctgatttgaaagaagtgatccaaccccagggccagcaggcagccagcgccccccaccaggccggagagcagcggcctgagggcggagggcagcgacccgaggctggtgaaggagacccaccagacgaagctggccaggagcagcaccagaacgcagtgccggagccgcagcgggtgcgcgagcgtcagcagcagccctacgcagctcagcaccagcagcaacctgcccgctgccgcctccgggggcgtgtgcggggccgcggaccctgcgtcgccatccccccaaggccaagaccaccactgccacaccaagaagtcccccaggtaacagcaggcgggcagcgccagcagccaccaggagccgcagctccggcccgggccgggtccccgcttggtccgggtgaggaagcaggtgaggaagaagaaggcacaggcgatgctgaagagggggctcaagctgtgcgaacacacgctcagcagcgtccgcagccaggcggccccggcagcccagctctcgggttccgcgcccagcagcagggcgaggacaaaggcagccagggcgcccagcgagaggcgcgcccggcagaagggggagcagcgccgcggctgctggggagaggccggcggcggccgcagctccacgttgcagaagcggcagaggtggaagaagaagccgcgcggagggtcctgccgcaaggggctcacgcagctcttcacgtagccgttcctcagactctcggggggcgagccggccccatccggcggctgcagggaccgcatggctttggcgtctcgctcgtccctcctcatggctggggccgggggtggccacgggactcagcacaccccgctcgtaccgtagcggccgctcgcgctcccagaccccaacccccgcgttcggggcgccccctggttcgcaacccgtcagggctgcgccggccgccacggcccggggtccccaccgcgcggactgaggagcggcggagtccgggacatgctggctgaggagaggggcggaaggggcttctctccaggaccagtttagctgccgcctccttttccctcgggcacctctcgggactggagactcagtgtcgcctcccacctccgctggctgcaacagttacctcacggccccagcctggtccgttgggcgcgcgacgcgggcgggcgctcctcccccgcgactgccccggccggcgcgcgccagcgctcacgacttgtcccgccgccacccgcgccggccgcccaacagggacgcgagccgggaccacgccgacccagcgtgcccaggccgaggaaagcgcggcggcggcagtccgaagacccaccgggactgaaagagaaggacgaggtcatcttcggacgggaggggcaagccagccatcctgggaccccaggcgtgcaggttctctttgagggtaagtcacggacacccagccagaatcccacaggtcactactggggtcttcgggaaagagggcgtttgtggtccccaaggggtgtgcttagtggggatgctgagctaagggtgggaggggaggggcgctgtctctaaccttagtccctttcagggtgggtcttcagactgtgaccagtttagggccagccaccaccaaggccatggcgaagaaaccctaatcgctgtggctagatctagcctcagaagcaacgtggattcttgggccacgcagcaggcccaggatccttgcagtggctcttagggaggaacgtgcacgtggagtgcactctagtagcactccacgtgcacgttcttgagtgttgctcaagaaccatcttcacaggcgaagaactaacgtctcgccttccattttgtacccttgtcatacatatccgccggttcacaacttgtatccccttccacacagcacagatttgctgtcgcaattggtctttgcaaattgaaggctttttcactgtaacagcactttctagatgggggagcggagagaactaggaatcctctccaagaccactccccagtttggatcagcaggccttgaaggaagccgaataagatgctatctgtgaagtactggtgaaactagcaacattaggaaacacagacctgaaagcgagaagaaaagaactttactacaccaaagggactgctctggaatctaaccaatcataactgccttagagagtgaactgtgtttccctccctaagctctcgcttcaacctcatgaccggactgcatttctcaaagagctaattccacatttttccaggcagatgagaaaccttactgtgtggtaaatcccacaaacaggcccatttttcaccaattaatctctgcccacagtcatgacctaaaacagaccattttcgtatatggtcatagttcacatgcatagcaaaaggcactaagaaattagcacaagaatttaaccaaaatgaaaaagttccagaattccctttcctttgcttttccttttctaatgtattacccaaatgcttgtcctaaaagataaaaattcaaaaggtcattttatccccatgacaagaaaaaaaatgctcatttcagcaaaactcagcaaatgtattttttatatgatgtgcatagaactcattaccaccagttgaagattaaagtaaaaaatggatacattttgagtttgtacagaagggcgtgacaaaactagcaccagcattattgaaattcccgttataaattccataggaaataataaattgatttgaaaattagaacaaattcagattaacaggtgtgtgtgtgtgcatgtgcgtgtatgtgtgtgggcatttaatctgaagttatcatctaaagtaggattggcacgtgatcatggaaacrgtagggagtagaaatccagttttgtgagtttttgtctgggcctagccattcatactctgccattaagcaatcctataacttttactggccttgttcttctcaaatgtgaaatgaagcaattaatttagataacctttgaaatcctttctagtcttaaaaagctctgatttctgtatgccaaaaatacataggcatccttaagactcacctttcaggttgccaataatataataagagcaagagccaagagcaaccttttatattatttatactaccaaactaaaccaaagtctcagtgttgacaagtaaaaataaagggattgtgtcaaatgactgttttctgaaaaataaaatccaaagccctcttcacaaaatcgtcttcaagattctctagccgccttttagctgtcattcaggtttttataaggctacaagcccaactctttcaataacccatagtcggagtgcatccctctgaaggccaacctagcacctgagagaattctaaaataaagtgtaaggacgtgaccaaagaccatcagaagtttacttaactaaaaatatgcacaaaaagaatgagctagctatgtttatagtaactcccttctctgtttacagtctttgtcaaagattattactaggccacatttcttagaggtcagattatttaattattcccttgccaaacttaaacaaccaataaaattacttagttctttaggttcaagaatttatgaccattatctgtcatgaaaaaaactgaagtcacagtatacctttgacttttcccagcactttaccccatccttattttacctgactttgccttccctcacgtcttttttttttttaattattaytatactttaagttctgggatacatgtgcagaacgtacaggtttgttacataggtatacacgtgccgtggtggtttgctgcacccatcaaggcgtcatctacattaggtgccttccctcacgttttgacccatcatctctccactccttagtggatctctccactctcctggtttaccatgacatgggatcctggctgttaccaccctgctcccaagtcattttaggacaatgcaagcccctgggtatttctttttttctaatttctcaggataaagtggtctgacacattttaaatatcaaagaaactcagaaataggcagtaaattaaccagtatcattgagattccaaatttataaaactagagtcatccctgaagatacatgcaaaaccttataaggtttttcaaagaattaaataattaacatttacgaccttatatttaaaaacaaaaatggacaagcttttctctagcatagaaaggatcattgttttctgtgtgcagtagcgactctgttgcccaagtatgttaacaatacctatgttccttccagctaatactcatctcagaatctgagcctcattttgactcattcttttagttcttttcaacaagtagctatttagtgcccactatatgccgagatttgtactaaatgctatttagaacattttytaaaactataacaggtccttcagagttttctcagagctgcagctttatctgggagatagaatgtctgcacatagactattaaatagcacaaaagaataaatatgtgattaagaactgttgagaacaatgtgttaggactattaaaacagaagaaaatcattttcttctagggtgcccccactgtgtaattgtttcagcttgttctcagtttctcattcttctagttccatttctctctcttacagtcttccttctttctctccccagcatctgtccagatggctgtcttctgatctctctcctctttcccccgacctctctctttcaactctgtattatattccctaacttcttttacttctcctacgtaccatcccccctctaccagcatttaatctatctccattaatgaatgcattcattcattcagtatttattatgtgcccggtgtgctggacactgtgctagatgacaaagatataatggtgaagatgtggttccttagtctaatgaaagcaagacagtaagaagactattacagcccgttgtaacaggagctgtgatacagaggtaataatcctcagtgtactctgggatctcaggagcccagactacagtaggagtagcaggtaaggagtaatgctctggaggactcagagaaagtgatttctaggcttgatattaaaaggtgaatataagttacctaagtaaagtaagtagaaaagataatctgggcaaaggaagcaagcagtgcaaaaatctggaggaattcagctatagtgcatttggataactcaagtatcctatggcttaagtgtaaggtatgatgggactacagagatggtgtggccctactaatggaactggagtttgttattatttgttacataaaggtttatgttctgttatcatatttgcttatttacatggctagctctgcaatatattcttcaaacaagaattctctcttattcaatcttagctcaatcttcatgcctatagcaagtacttagcctacagcaagtcctcagaatttttcaagtgtgttgatatttctcaaaactattttaataaatcagactttaactgtatttcctttgatttttggctttattagtcaatgaattttaatagaaaactcttaaaatagaatataatagaaaaaacttttcatattgtgattttaaaatatttttcttaacattcatttgcaccaaatcrctaaaagaaccctttttcctagatttacaaaaacaaaattacacatatgtttatgtcgtatttcactttcaacataaaataaatgtttcagagatgtgtgggtcattttttattttaactcaagtgacagtacctgaattctttggctgtgaaagcatatattctagtacttttaagaattttcctctttccgtttcaagttttcagagcaacaattgtatctctgacacaaatttactattatacttttaaaatataacaattggtaaaagtattaaatctataacgcttacccagaaatttcctggattttttattataaatctaaaacctgaaacttgaacaataaacagcaatgcagactctttccaagttttcttgttccctccctagacaagcaggagtttcttcagctctggctatcccagcagatctgaaggatcacagccacgacggtggcagcctaccgttgacactgaacttgtggttaattgtggagttctgccacaaaaccacctcactaccacaaactggatacttgcccaggaaagtgacaaactgccaggccaagcaatctacaggaggcagcaaaagcaaactgccttttcccccagaaagcagtcatttctggattccaaatggagccaacaagcagagcgcaccacaaaaaaaaaaaaaaaaaaaaaaaaaaaaatatatatatatatatatatatatatatatatatatatatagagagagagagagagagagagagagagagagagagagaggtgtgtttctccactaagccaacttaaaatgtattcatgcagttttgcaagaggagctcaaaaggattcatctagttcattagcatcatcaaaaagtgtaagactattcttttcttaaaaaatttttattaagcatggaattagaaataaattgcagttatattactattaactgctaagtgaaacacctacatattatcattgcaaataggagtaaataatgtgacttcgtgtgtgttactaagctgcgcacagcagcacagcagctctgggaacttcatttgaaaggccaggtagcacgatgtgaaggaaggaaactttagcgtcattctgatctagttaccatttgtagctacatgaccttggaggttacttaaagtctcatgttacctacctcatctgtgaaatggggataacaatgtctacctcttaaagagttgctgtggattaaattaaattacacgtgtaaggtaactaacaatgagtagatgcttagtaaatgtaaattagtttatttttcttacatctatccttttccttaycctcccacatcccttcaggacttcacaggactctgttaattctgagtttttccaaggagacctccagattatattgtctgttcaactctttttaagccttactttcaatattattttattcaactaagtctgcctttttactatacaatcaagtaaatagctctctttcttcaaaaagcaaatgctacagggatgttaatgcctctgttctaattactataaatgcagaaatgttttatatattaaattttaaggaatgcatacataatattatcttaatttcatggccctacatatcttagatctcattctgcagaaaagatgttgatttagggcctatatgttgtaacatggagaaacagaaaaaaaaaattaagccgtaaccaatttcattcatattagcattaaacatagggaagacaaaaaaagatttatgtttgcaaatgtattcatttattcagcatgtacttgatgctactcagatactaaaggtacaaatatgaataagacacggtccctgtcctcagtttggtaaaggagaaaataagtaaacaaatgcagtacagtgcaaaatgctctaacagagttcttaccaggtacagtgataggacatggagtagttcacagatgaagagatactaacctaggtattgaagaataggagcttcccaggtggacaaggaggagggagagtattccatacaaagaacagtattgcaaagccatggaggcatgagacatcatgggcatttctggaactttaaacagattggtatgatttgtgggggagggaagatgggaatgggaaaatgagactggatagataggtggaagccaaatcatgggaatccctataggccattctgagaaacctggactttattctgtaggtggtaaggaactgttaagttttaaaggagggagaagccatgatcaatttttattgtatttaattgtttttcaaaacccaatgctggtattgaatgaaggttagtttgaaagaatgtaagaccaaagctaggaaaatcgtttaagaaaccattataattggccaaatgaaagataaagttctgtaaggcaatggcagtagtaccatttggaaaggaagaattaattgaattaataacagctataaaactttctgatcagttccatagaattggaatgtgcagaaaaggagactgtgaagagggttccccaggtctagcctaggtgactagaatatcttgaaaccattgaacaggataagaagtactagaggaataattgagagtaaagattatggatttccttttgaacagattgaatccaagtgggaatgtttcttggccattggatgtatgagtctgaagctcaagaaaacaatctgggctagaggtatagattggaagcctgtagtacatatggagaagtggaaccctgggagaaaaagagatatcccctatgagagtatatagtgtgagaagagaagaggatttgtttttgaactcaggaatacaaacatgtaagggacaaggaactaaagaattgctcaaaagaatgactgaaaaggaagtagcaaagctagaaagagaatcagacaggagtggtgtcacaaaccaaaatgaggaagtttccagaagggggacaaaaaagcataaaataccacattctaaaaagatgaggacaggaaagtaaccacgggtgtcaatgaaacctgacaatgacaagtttcattgtcaaccttatgtggaacagttgccacagttggggcagaaaccagattgcagtggattgaggaatgaattaacacttattttgacattaagaaaagagagtttcattctagaaagtttagccaggaaaaagctttacctttagtttcatcatttctttgttagttttagtgtaaaaagaaaatttgagtagtttattgatacaatataaagtacacatataccaacttttctcctgtgtaaaaaaaataagtttaaaataatggattccccttaatggtatactacctacagtcttccctacatttctagaaatagatatgataaaccaacacttattttgtattcatagtgctatcctacaaataagagagtaaaaaatatgacagtgaggctacagattctayataatacagaaacaaatataaatgtctagcatagctcttagaggttaaaataactaaacagttattatctggcttcaatgagtcatacaaccttattctgctttttttctcctacccctttgaagtcagtgagaaatctcccttttgaaaagattccgatggtaagatcattgaaatgatcttgttcaacattctttgtttaaaatcactatatttttaccagctccagaaataataaacaaacaactagatctactaatgaaaagcaaaataaagacttgtacatttacagaattttattaatgtctagtcagataattcaggcaaaagcaagagtattttatgtcattttcctgctaaataaccaggattaactgcagcgctccagttcttaacctaacatcaatcttcactagaattatgcttggactgttcccagtgacaactctctagcatggtctggtgctttggtaactatattaaatgtaagtgcaaactgtgaaaaataacaagaaaccttatataaattcaagattttaatgctgtattttgggatgtgtaatcatgtttgaaaggatcactaacatccactctaacatgaacaacactttaaacaaatcaaaactatggctctttaaccagtaaacttcatggctatggctgattttattccttagagaccctcctttttacaggtgaaacggtttacatcagatttcctctcattatagcttctcaaatgttgtccagaccagcaagccactctctttaaacaaataccagccaaccaggaaaccatgaggttttattgtgctataaaatagaccagacatttctaaaccttcataggaatgaacctgactaaatctttactaaaaatggtttcaaaataaactgtgggctccaagtttctctaacaatcaaaatttcttcatccttcatcaatctcactctcaagctctttactcttccagaggtacacagtgcagtaagtttctctggccacatgttcataataataactaaaggctccagttctgtttacttattgggatataagaatgaagggatatattagcttcattccctgcatacattcacatttgtcaaaattctgtttcaaattttcttgtatactaccagcccctaaaacatgagctactacttcttgtatcatgggcatagaaagcctgaattttggctatgcacggtggctcatgcctgtaatcccacacttcagaaggctgagttaggagaataacttgaggccaggagttcaagactagcctgggcaacatagtgaaaccctgtctctacaaaaatcacttaaaaaaaaaaaaagcytaaattttacgaagaattaagtggaatcttcgccttcaaaaaaacatatcccctttcattccattcagcaaatatttattaatttaagccctgtcctaggtaccctcgaaaagtgtgtgttgcatgcatttgtgtgttgcgtgtatgtgtacaagtgttgggatagaatcagttgtaaatggtcagtggggaacaagacatacacaaataactgtaatacaaaatggaatatccagaaacagcagtcccaacctttttggcaccaacgactggttttgtggaagacaattttccacagaccgggggggatgattttgggatgaaactattccatcagaggagccaagatggccgaataggaacagctccgggtctacagctctcagtgtgagcgacgcagaagacgggtgatttctgcatttccatctgaggtaccaggttcatctcactagggagtgccagacagtgggcgcaggtcagtgggtgtgcacaccgtgcacgagccgaagcagggcgaggcattgcctcacttgggaagcgcaaggggtcagggagttccctttctgagtcaaagaaaggggtgacagacggcacctggaaaatcgggtcactcccaccctaatactgtgcttttccgacgggcttaaaaaacggcgcatcacgagattatatcccgcacctggctcggagggtcctatgcccacagagtctcactgattgctagcacagcagtctgagatcaaactgcaaggcggcagttaggctgggggaggggtgcccgccattgcccaggcttgattaggtaaacaaagcagccaggaagctcgaactgggtggagcccaccacagctcaaggaggcctgcctgcctttgtaggctccacttctgggggcagggcacagacaaacaaaaagacagcaggaacctctgcagacttaaatgtccctgtctgacagctttgaagagagcagtggttctcccagcacgcagctggagatctgagaacgggcagactgcctcctcaagtgggtccctgacccctgacccccgagcagcctaactgggaggcaccccccagcaggggcacactgacacctcacacggcagggtactccaacagacctgcagctgagggtcctgtctgttagaaggaaagctaacaaacagaaaggacatccacaccaaaaacccatctgtacatcaccatcatcaaagaccaaaagtagataaaaaccacaaagatggggaaaaaacagaacagaaaaactggaaactctaaaaagcagagcgcctctcctcctccaaaggaacgcagttcctcaccagcaatggaacaaagctggatggagaatgactttgacgagctgagagaagaaggcttcagatgatcaaattactctgagctatgggaggacattcaaaccaaaggcaaagaagttgaaaactttgaaaaaaatttagaagaatgtataactagaataaccaatacagagaagtgcttaaaggagctgatggagctgaaaaccaaggctcgagaactacgtgaagaatgcagaagcctcaggagccgatgcgatcaactggaagaaagggtatcagcgatggaagatgaaatgaatgaaatgaagtgagaagggaagtctagagaaaaaagaattaaaagaaatatgaaaagaccaaatctacgtctgattggtgtacctgaaagtgatggggagaatggaaccaagttggaaaacactctgcaggatattatccaggagaacttccccaatctagcaaggcaggccaacgttcagattcaggaaatacagagaacgccacaaagatactcctcgagaagagcaactccaagacacataattgtcagattcaccaaagctgaaatgaaggaaaaaatgttaagggcagccaaagagaaaggtcgggttaccctcaaagggaagcccatcagactaacagcggatctctcggcagaaaccctacaagccagaagagagtggggccaatattcaacattcttaaagaaaagaattttcaacccagaatttcatatccagccaaactaagcttcataagtgaaggagaaataaaatactttacagacaagcaaatgctgagagattttgtcaccaccaggcctgccttacaagagctcctgaaggaagcactaaacatggaaaggaacaaccggtaccagccactgcaaaatcatgccaaaatgtaaagaccatcgagactaggaagaaactgcatcaactaacgagcaaattaaccagctaacataataatgacaggatcaaattcacacataacaatattaactttaaatgtaaatggactaaatgctccaattaaaagacacagactggcaaattggataaagagtcaagacccatcagtgtgctgtattcaggaaacccatctcatgtgcagagacacacataggctcaaaataaaaggatggaggaagatctaccaagccaatggaaaacaaaaaaaggcaggggttgcaatcctagtctctgataaaacagactttaaaccaacaaagatcaaaagagacaaagaaggccattacataatggtaaagggatcaattcaacaagaagagctaactatcctaaatatatatgcacccaatacaggagcaccaagattcataaagcaagtcctgagtgacctacaaagagacttagactcccacacattaataatgggagattttaacaccccaatgtcaacattagacacatcaatgagacagaaagtcaacaaggatacccaggaattgaactcatctctrcaccaagcggacctaatagacatctacagaagtctccaccccaaatcaacagaatatacatttttttcagcaccacaccacacctattccaaacttgaccacatactgggaagtaaagctctcctcagcaaatgtaaaagaacagaaattatagcaaactatctctcagaccacagtgcaatcaaactagaactcaggattaagaatctcactcaaaaccgctcaactacatggaaactgaacaacctgctcctgaatgactactgggtatataacaaaatgaaggcagaaataaagatgttctttgaaaccaacgagaacaaagacacaacataccagaatctctgggacacattcaaagcagtgtgtagagggaaatttattgcactaaatgcccacaagagaaagcaggaaatatcgaaaattgacacactaacatcacaattaaaagaactagaaaagcaagagcaaactcattcaaaagctagcagaaggcaagaaataactaaaatcagagcagaactgaaggaaatagagacacaaaaaacccttcaaaaaattaatgaatccaggagctggttttttgaaaggatcaacaaaattcatagaccgctagcaagactaataaagaaaaaaagagagaagaatcaaatagacgcaataaaaaatgataaaggggatatcaccaccaatcctacagaaatacaaactaccttcagggaatactacaaacacctctacgcaaataaactagaaaatctagaagaaatggataaattcctggacacatacactctcccaagactaaaccaggaagaagttgaatctctgaacagaccaataacaggagctgaaattgtggcaataatcaatagcttaccaaccaaaaagagtccaggaccagatggattcacagccgaattataccagaggtacaaggaggaactggtaccattccttctgaaactattccaatcaatagaaaaagagggaatcctccctaactcattttatgaggccagcatcattctgataccaaagccaggcagagacacaacaaaaaaagagaattttagaccaatatccttgatgaacattgatgcaaaaatcctcaataaaatactggcaaaccgaatccagcagcacatcaaaaagcttatccaccatgaccaagtgggcttcatccctgggatgcaaggctggttcaatatacgcaaatcaataaatgtaatccagcatataaacagagccaaagacaaaaaccagatgattatctcaatagatgcagaaaagtcctttgacaaaattcaacaacccttcatgctaaaaactctcaataaattaggtattgatgggacgtatctcaaaataataagagctatctatgagaaacccacagccaatatcatactgaatgggcaaaaactggaagcattccctttgaaaactggcataagacagggatgccctctctcaccactcctattcaacatagtgttggaagttctggccagggcaattaggcaggagaaggaaataaagggtattcaattaggaaaagaggaagtcaaattgtccctttttgcagacgacatgattgtatatctagaaaaccccattgtctcagcccaaaatctccttaagctgataagcaacttcagcaaagtctcaggatacaaaatcaatgtacaaaaatcacaagcattcttatacaccaacaacagacggagagccaaatcatgagtgaactcccattcacaattgcttcaaagagaataaaatacctagcaatccaacttacaagggatgtgaaggacctcttcaagaagaactacaaaccactgctcaaggaaataaaagaggatacaaacaaatggaagaacattccatgctcatgggtaggaagaatcaatatcgtgaaaatggccatactgcccaaggtaatttacagattcaatgccatccccatcaagctaccaatgactttcttcccagaattggaaaaaactactttaaagttcatacggaaccaaaaaagagcccgcatcaccaagtcaatcctaagccaaaagaacaaagctggaggcatcacactacctgacttcaaactatactacaaggctacactaaccaaaacagcatggtactggtaccaaaacagagatatagatcaatggaacagaacagagccctcagaaataacaccgcatatctacaactatctgatctttgacaaacctgagaaaaacaagcaatggggaaaggattccctatttaataaatggtgctggaaaaactggctagccatatgtagaaagctgaaactggatcccttccttacaccttatataaaaatcaattcaagatggattaaagacttaaacgttagacctaaaaccataaaaaccctagaagaaaacctaggcaataccattcaggacataggcatgggcaaggacttcatgtctaaaacaccaaaagcaatggcaacagaagccaaaattgacaaatgggatctaattaaactcaagagcttctgcacagcaaaagaaactaccatcagagtgaacagacaacctacaaaatgggagaaaattttcgcaacctactcatctgacaaagggctaatatccagaatctacaatgaactcaaacaaatttacaagaaaaaaacaaacaaccccatcaacaagtgggcgaaggacatgaacagacacttctcaaaagaagacatttatgcagccaaaaaacacatgaaaaaatgctcatcatcactggccatccgagaaatgcaaatcaaaaccacaatgagataccatctcacaccagttagaatggcagtcattaaaaagtcaggaaacaacaggtgctggagaggatgtggagaaataggaacacttttacactgttggtgggactgtaaactagttcaaccattgtggaagtcagtgtggcgattcctcagggatctagaactagaaataccatttgacccagccatcccattactgggtatatacccaaaggactataaatcatgctgctataaagacacatgcacacgtatgtttattgcggcattattcgcaatagcaaagacttggaaccaacccaaatgtccaacaatgatagactggatgaagaaaatgtggcacatatacaccatggaatactatgcagccataaaaaaggatgagttcatgtcctttgtagggacatggatgaaattggaaatcatcatcctcagtaaactatcgcaagaacaaaaaaccaaacaccgcatattctcactcataggtgggaattgaacaatgagatcacatggacacaggaaggggaatatcacactctggggactgttgtggggtggggggaggggggagcgatagcattgggagatatacctaatgctagatgacaagttagtgggtgcagcgcaccagcatggcacatgtatacatatgtaactaacctgcacaatgtgcacgtgtaccctaaaacttaaagtataataaaaaaaaaagaaaaactattccatctcagatcatcaggcattagatggagcatgcaacctagatcccttgcatgcgcagttcacaaaaggattcatgttcctatgagaatctaatgcctctgctgatctgacaggaggtggagctcaagcggtaaggctcactcatctgccactcacctcctgttgtgcagcctggttcctaacaggccatggaccagtaccagtgtgggggttgaggatccctgtcctaaaagatagccaaattgcaatgaggatcaggatgggtgacataaagtagatgagatttaaaatctgtcttaaaggatgggtaggatttagatataagagaggatggcattgcaaggaagaaaaaaggcataaaaatgaaagtgttcatgaaatcattgttttatcagaatataaagtatgagaatgataacaataaaaatattatgaagcaactacagcatgtgaggtcctctaagcctcttattctcatcctcacaacaatctgccagtagaaataataatcctcatttttacaacacatgggacaattgagattaagtaatttgtagggcagaaagattaagtaatttgtcaaagattacacatctagtagttggtggagccaggatttgaacccaggccatggaactccaaagctctatgtgctttccgttataacagtaattgttaaactttggtacacaagaaccatccagataacttttacccagatgataaaaatgcagttgctgaatgctaaccccagagattctgattcattaaacccgagatgggactgaggaatctgcatttctaccaagcacctcaagtaaccctgaggcaggaggtctaggaaccacattatcctgaggtagaccagcatagtttcgaatagaccctggaatggatttgaacatacttaatgatgagtgttatggatgaaactgtgttcattcaaaatttgaattttgaaaccctaaccccagtgtgtctgtattaggaaatggagcctttaaagaggtaattaaggttaaatgaagtcctaatggtggggcactaatccaatatgacttatgtccttataagaagaggaagagacaccagggatggagaaaaaaaacttatgaagacacagcaagaagggggctatctgaaagctaaggagagaagcctcagaagaaaccaaccgtgccagcaccttgatcttgaacttctagactttctagcctccagaactgtgatcaaataaagttctgttgtttaagctacccaatctatggtgttttgttatggaagccctagtagagtaatacagtgagttaaattaacttcctgcttatcctaagctatttacatctgtcatatatcaggagctgtcctaaaaaagatccctaattatcatcgctatcataaaaattcacatttatatggcattttataatttacaaagccttttcacgtgctctgttacacttgaactttgcaacagcctacagggtaaccaaaactcaataaggcaataggacttgcccaggtttcttacaagttgtagagctgagttcaggtctctttactccaaatcttatgctgattttttctacatcagacatcacacacttcatgatgtgcatgcacacacatcatgaagtatgattaatatataagagacccatctaaggatatgtctttctttagctctagagagtaaatacctttacttgattttctagttacataagatacggtttcaagaatttaagagatgtgccaaaacggtaatagcatagataagataagaataggtacaagattcctaatgttcagttctcttttcaaacaattgactaggcagtaacaaaatggtctcatttatatgaattaagattatgcttttgctccttcagggcacacttgagtgattttctagtagtgttttgctcaaatgccaagtgttataaatttgtagactgccagactgtacaaaagattatcacttaagtaataataaaaactgtaaatagggaaaaaaaaaaagtgaaagaacagttagagatagaggaagtgattcctttactttcattttattttccagcacttcctctttaagttagcaaaaataacgttttttgaattggcatttgcagaaaacagttcatagaacacagtcaacattgtatactacatttctgtagatccagtacaggaggtagattctaagtctgtcttcttcataccctaccattttatcgttagctaaggtcttattccctggtggcactgtgttagtttgtatcctctgagaaacaaatgccaaaacagaattagacgtgcaagtgacttattgtggaaagtgcctatgaaagataaatggaagatagccagaggaagtggagagagccttcagactgtgatgcaagtctcacaatagggaaagtggggaaaggaaggaggattaggtagaaagagccttatactacagcatcattctaagaaagtgtcaaccaggccaatgtgaggtcctcaagccaaagtctcctattaaaaggagtccctcatctcacaggaatgggcctacattatacccttgctgttactgactaggagaagcccaaaagaagtattgcctcagtactgaaacaggggtggatccagaagagtaatggtccagtagtcaattatgttccctatagcagaagatttgagtgacaaattttcttttttgagatggagtttcactctttttgcccaggctggagtgcagtggcacaatctcagctcactgcaamctttgcctcccgggttcaagtgattctcctacctcagcctcccaagtagctaggattacaagcacacaccaccaaacccagctaattttgtatttttggtagagatagggtttcaccatgttggccagactggtctcaaactcctgacttcaggtgatctgcctgccttggccttccaaaatgctgggattacaggcatgagttaccacacccaggctgaatgacaaattttcttgattgccacagtccacctctttctctggacagatctgcttctctatgcaaatttagggaacacatcctccatgtttcctatgggcttttcttcctgagggaaaacttagaaggaagttagtgagatgaactggagccccattgctgcagttgggcttgagactgcaacaaggtacttaacttctcccacctctattatccattccaagtcctmtcaaccctcagctatcaccttggcaagtaatggtagcttaccttgtggtgtgacccaaaccttcattcctgatgggtctgagctcttggcagtcatacccttttcaagtcagggtcgttgtacatgtcctttcacagctacagtgggccaaaggagtaccagcaggcttccaagtagatgacataggagttgcatacatattcctatccttattgtctataagcagcactaccttctcccaatgatcagggttgattacccctgccaagatgtgaccctattcttgcctgcaggtctctggacatgaggtgtccaaactgccctggcagtatctataacatatagttcaatgagacactcactgtcccctggcaagagtgcactccctctcgggacctccagccctgcagagcccagagttgcacatatggggagcccaaaatcccccattgagagttattgggagtgatggtagatagggctagtcctgattacacccatcgatggccattgtgttcctcctgctgatgacatggtaccatatagaggtctctgagttagctcagatccccatgtcatctaccacagttgcaacagcatccctttcccagttggtacctttggctaaaatggggctagaggaaagggttcccatacgaccagctaaaggaagaagaataatcctgagcttctctctgcaaaggatggcactgcctcctttgagagtgttgcttctgagctgacgtttcagctgtgcctttagatagctgttccagtgttctgtgaagttggctacttctaaatgattttgttgtagaagatatagctagagctcccatggtcatgagttcaatcctgcatctcctttactgtgaaatgggtcacctgttcaaatgttttttgtgtggtattctatacccatagatcagacattctttaagcccctggattatggtgctggctaaggtactacaatcaggaaagacaagcctgtacccagaataggtgaaaacaaccctctagcccttgtagttgacttaccaccaagtggccagttggtctcattaataaatagtgatataacagcattgatctctgttgctgacaggttggacattcagaagcagcagaagctaggtcagctttggtgatgggaggtccatgctcctgggcccatgcatagcctgtctctggcagcatggccacttttttcttatgccaaaatgtcagtttcagggtagccwacaacaaagactggcttatataaactggtctggttattatatctgcttcactgttcacaatctcttccatggtagatgctttctattgggccataatatgtcacactaaactcttcatgtttacctgcatacctctaccccagaactccttctctaaaatctttcaattattttctttccaggccccgaccagacagccaggacattggctatttcccaagtctatatatactgggccacttctcattccacaagaagtcaatgactaggtgcactttttacagatccacgcactgggaagattttccctctccactgtctttcaaggctatccttgaatgtggttgtaatgcagccatggtccattttgagcttgtactcacatacagaacagacccacccaaaaatcaagcttaagctttccttctacttcagttggtcttacggggcccccatatggccataggaacaagctagggaagggtgttatttcagctgttgtgaatgacatgctggtctgagctacctgcgcatgcaatttgccatgtcctttgtccttctcaggctcaatccttgatgtaattttccatattaaagtagactactgctggacctatacagccttgtgatttaacatatccagcagaaccaaacttgtaatgtgcagttctagacccatggtcactttgtgccccatggtgaagcactctgcctctaccagtcccagtaattcaccaagagctttttctcaaaagacatataattctatgctacaaatggcatagccttgccccagaattccagggccctacgttgttattctcccaatgatacttgccgtaagacactgcatgttttcccaccactgtcacctacaccatgagatgtgctggattgtatgccccaagtggcagctctgtttgcagtgcagcctggacctcttcactcaaagctggcaactttctatgtcactcaatctagcagtattcataggtttggaatacgcygcctccagaacccaaagaggcctaccagccacttcatttccttctttgtggtggcacacgcaagatgcagcaattttcttttactttgaaggggatatcttgtcatgtttatgaccattgcattcctaaaacacttcattgaagtttcaaatccctgaatcttcataggatttatttccaaccctctggaacactgtgtcttaccaaggcctttagcatactagtgccttcttgctcattctaaacaatcagcataatgtcatcaatgtaatgtatcagacgaatgttcaggcagtccagatttcttcagagtatattatgacagaaggcaggaacattaacatagctctaagtcaaaagtgtaattgaaaattattatctaacccacaggaatgtgaactgtttctgatcctctcttctaattggaatagaaaagaatgtatttatcatatcagttgccacataccatgtgcctgagacctcattaatctgttctattaatcacacagtgtccggcaaagcaactgcaattggggctactaattgcttgactccgaactcctgaaagtctgcataggtacccagtcttacatacttttctgtctagagcatctaggacctagcaggtattctatatgtattttatgaatggattaataaattcagtatgacattcaagaagatgcctactaacaggttgatttagctgatgaccctagctcatagggttatgaggattaaatgagttactaaatggaaagtgtttacaatagtgtctggcacataaaaagcattcagtaaatcttatcaattgtatttttccaggccgcagagaaccatcagatatgatagagagattgacattaagctaactccttgaccataagtttaaatgaaacatgagagacatgtgttggcctttaaagtgaaagagtctgcaatatttttctgagaatgtgaggtttccaaggaaaactcaaaagaaaactgattgtaaagctggaaagaaagaattacttatagaaacagacactttcatagctagtggagagaaaaaggtggttactatgtgccaattcattactagcattgctatatttaggataattttgagggccaaatgtggtggctcatgcctgtaatcccagctctttaggaggccaaggtgggaggacagcttaagcccagcagtttgagaccagcctgggcaacataatgggaccccatctctacaaaaaaaacaaaacaaaacattgaaaattagctgggggtggtggcgcatgcctgtagtcccagctactctggaggctgagcccaagaggttgaggctgcagtgagctatgatggtgctactgcactccagctgggtgacggaggggtctcaaattaaaaaaaaaaagaaaagaaaagaaagataatttcagaaaaatctcaaagttaaaatttttgacaaatgctttttactaataaagcaaaacatgatcttgaaataaaatgaatgagtgcaattatgcccactagccatttcacaaaaatggtgttttccattacctaaatgactatttccatataaaaattaattaaaagtacactcacagttttcatctctgacataggtcaatgtaacagctaatacaggaaaatgaaaaggtataataacaggacatacacacccctactcttcattagaagaaaaaagaatattttttcttgtataatactgtgatttgagaggccttaaagctgctattctctgacattagctttgtggtcaaatttaaaatgatcttgataactctcaggaaaccccaagtctcataaaactttcccaacaattttcacaatgagagctgtgaaataatttcagggtctctaggaaagaatccacacttgctacttttaagaaagctaggaagtgggttgttggacaagatctaaacatgaattctttcatctacaaaaaaagttgagccactatgaagaatttccagtggccactctgttatcaatatctcacaactaggtctagacgacctcaaaacttgggaaattgctttgctgctttattgccagtatctctgtctttacagagccttccagaatagaatcactagattgaatttattcctccagtaagtcagttgcttattagcacttttaacatccagatggtttgagacaaaggctaaaccagggataattcccaagtataaacagtggaaactctcttttgctgagggactctagtctactgggctatgggccagggcatgggtttcttttgcaacatcccaacactgctgtggccttttctataacccttgcaagtgaagtcacctgaaaagccaagagttaaactggctgtacagtctgaactgtgaagtttggaaataaattcaaatggaccaatagcctggatctgtttcatgaataaacagaggagttcaggcttaggaccctataaagttaagtcaatattagttatagaggaaatcctgtttgttcttcttctgttgtaattgtctttttaaaaagaactcaggtagagctttggggtatgttataatgctcaaaacatcctttaaacatacacatacacatacacacacacacacacgcacacacacacgagtgtttataaccaagaagaaagcaaatcactgttgtcyttactgttaggtacacgagaattaaaagtgtttgctcaatatccttaaaaaatacaacttaaaatgccctaacttatgaaatgggaaatacttatctaggttctgatgccatatagtcaccttatcatgattattacaataaagataagtaagtgattgctattaaagccctttagttatgctgatttggcacaaatttttcccagtactcatcacctagaaattacacataacaaggtctgagtaatccagtgtttaaactttgagggtactaagagagtgatttctaacctctttgaaattatgacaccctattttgcccgttagacatcacaactcttgctcctgttatactgtctccacacactcaaggaaaamaatctattatatgatataaaaaacacttaaatgaatttaaattaatcttaatttcttcaggcttttacttgtttttctttataattacctcttctttgaagctgagtcaccctaggtttaagccagaattaacctctcctcttcgtgtattcttttagctctttatgtggtataaatctatattacagattttttttttgagacaggatctctctctgtcacccaggttggagttcagtggcactatctcaactcactgaagtgtcgatctcctggctcccctacttcagtttaccaagtagctgggaccacaggtgtgcaccaccacactcagctaattttttttatttttgtagaggcaagttttcgccatgttgcccgggctggtcttgaactcctgagctcaagcaatctgcttgcctccgcctcccaaagtgctgggatcacaggcgtgagctgccatgcccagcctatattacagtatttttaaatcatatttttgttgattaattttaagtctttccccctggcttaaatgtaagggccatgtttattcatcttttttccagaatttctagcacagtgcttaatacaaagggagattcaatacatgctagatgaaggaataatgaatgaatgcacaatggctgtggaggcagaaatataccagcatgtcaaaaatatcaacccaagaattattattctagtagcttaaagatatgcctgtataagatcatctgttacagaacttaaatccagtgagaaaatggatgcaaaaatactttataaactgtaaaatcatacacaaatgtgagcaaatgtcactgttacttactgtttagtatccttcagggaatagtttctgaatttgtgaatcaaactttgaaaaacagwatgaacttaactcattggaatagtaggaccatgaaaggaataataaatggaagccagttaacaacaagttgtcatttgtctataatgtaatgcagtaggagttcagttttggaaaaccaggccttggtgacatctttaaaatactaatttttgtgtcctggtttataaatgacmattcctttagatgcttaggatttggataattccatatagtattcccagaaatatgtgttaccaggtacaaaacatacaggcttgattgttcaaggaaacatgtattacatttggataactctactgagaggctaaaataactgattcatttttgaagtgaccattgatagtaaacttcagcagttctagaagaggcaataaacatatcagggcaatttgacaggctactgtggttcaaacagatgttagtggtagccaaagttcacaaattatgtcaatgaagctggattccattaagtcaatcagtaactaaggaaatagttaattgagatacaatcacaagctagaaaagcaggataaattaaagaagtaagaggaataatcacatttctcgataattacatgctatcagacagcagaatctgatgtctggaagataaagcaggcatatttcaaaaatggaaaaggaggccataggctagagcatgagtaattccataaaagcggtcaaatgggaatctttctgaaaagcaaatgatgtcctcacagaaggaaattgcctaaaaactactagaacatagtttctatgctacaaacataatctggccaaagtcatcagctagtaagttgcaaaatagattttcaaaaccaggttgacaccaaagcccatgtcctccacactgtacttctctctcctaggcaaggaataatcaaggtatgtgccaagctcccaggctgtgttgttccttacacctctcctgattccagtttcagtaaagccatgagtcacagcagcggtaacagtaagaagctttcagcttgtccagctcacttgttaaccccatatacacacacacayacacacacacacatatatatatatacgtatatatatgtatatatatatttcaaaaaaaaaggacaataaagaggctgaagatgaactcaaaccaagtagctgattttctgaagcagctaacctatttctgagctaacagtcttagtgtgtattaaattcttacttctgtattctctcagaattagagagaaatgtctattcactctttcatttaacaagcaattattgagtgcttaccctgtgccagtcactggagaaacagagattaatagaaaaagatttctgctgttaagaatcacatggttgaggaaggaagggggaagtagaaacagacaagcaaatgattatagtacaatgtagcattgatattgagaactaaaaaaagaaattaacagtaataaatatagggatgctacattgggggaaatatcccttcccaatttttggtgtttccttccagatggagaagattccactagtgtggtattccctaaactttgtccacccctcaactctttccttcccagagaaggagaaattacttaatctgattgattagtatgaaaaaagaaagtgggcatgcaacacaagccccttattttctccctccacacccactctcagcaggcagcctgaaaagaagataacttctgttcttccatgccctgtgtttttcacagactggcttcatgtaaggaagcctagagaagtccagcactgtctgtgactaggggttcactattaggaatcccttttgttcatagatacaaacsacattctccaccatcagtttaatctgtactaaatgtgttatttctcaagaggcaatataatgtagtggttaggtgcatagactctggagccaaactggttcataccctgggtttgctacttaataatagccatgagactttgggtcagttgcttaacctccctggggcttcaatttctccacctacaaaatagggctaatagtatctactcacaggatgatgtgaggattaagtgatttaacatatctaaagcacatagaacagtgcctgttacaaaataacttctccagaagtttgagctatcattactattattattattttaacctttatctattgtaatcttatttctcaatttgttgaaaactcaagcaggaaaaagtgttattaatatttattgggatctgatcgggcacagtggttcacacctgtagtcttagcactttggaaggccgaggcaggcagatcatttgggtcaggagttcgagaccagcctagccaacatggtgagacctccatccctactaaaagtataaaaattagccgggcatggtagtgcttgcctgtaatcacagctactcagaggctgaggcacaagaatagtttgagcctggtaggtgaaggttgcagtgagccaagatggcaccatgcactccagcctgggtgacagagcaagactctgtctcaaaaaaaaaaaaaaaaaaaactattgggatcctccaactctcacctccaatagttagggaagtttaagaaatcttacacagttcttacagtcgttgcccttttgtttatagttcttggctctttactggatgaaatttggaagattgtatcagtaggtgccagatgccaggccaagcatctcagacttcagcccaaattggtttgaggttgatgcctctgatttccatgggtaaggcaggcaggcagctctttacttgattctcaaagattaatcccatgtccctcaggttatctgcacattctagagatcccctcttgctctggcctctgcgtgtcctactgcggtctttgcaaaaccctcctaggaagagaaggctctttcccacctagtcacaatgattctttccctggattcagatctgcctttcaggagttcaatgagggaaacaaacaggtaggctaaaacaattggaatacaaagtattaagtacagttaaaaagagatctaaatggtaccacagaagtggaccagtcaggacaggaaacagatggcatactgaaaaggagtgattaaagagagtttaataaggaatttatttacaaaggtataggcagttaaggacagtgaagcatcaacagtgaaaattgctcctacacctaggcctgaagaaacaaagggaaagagctattaccaaacttcagaaagcaagctataggagagagctacctcacaggaactctgtttcaggtaatgcagcccctgccaatccaaggcctggaagagagggatgtaggaaaatattacaattgtactcttctgtcctctgagtttctttcagcrtgtcccactgttcaaatctaccagaaagtcagaggacaaggaaacctgttactgtcatccaaagaggtcaacctctgaggacgcagggcaagtagagaatgctggagaggggatctcaagtggccagcaaagaacaacccagcacagaagcgaagggactaacactttcttaagatttcataaaagaccttttaaaggaggttatatttgagataggcactgaaggataagtaggggtttaccaaatagagaagtgaataagacattttaggcaaaaggatagcattgtcaatatctcatagatatacaaaagaacttgcatgggctatatattcagacaagcaatcccatttggcagaagcacatgatgcttttggagagatgggtctgaaaagaaaagttaggatcagattataaaggctcttaagtgccatgctaaaatgactggactcgatcctgtagttaatgaggatccgctcagaaactttcagagaaagagagtgacatgagcatagtttaagttagaaaaagatccctccaatggcagtgtaaaggatggactagagtactgaaagactaaaggcaggaagatcattttggggatctttgccatagtccaggcaagataaaggtgaatggcactaaagcagtggcagtgataaggaagcaaagattctaggcattttctgaagatttaatgaacagaactggatgacctagtaactatgaggaatgcagaaaaaggcaggctctagatgagaatcaaatttctagcttgagaaactagatcgatggtggtactattaattaggagagaaaattcaagcagagtagctttgtgtgagactgcatggatttcatctttctgcgtactgagtttattatgcctatggatcactaacagaaatatctagttggcaatgaacagtagaaggccaggctctgaagagagatctaggagccagatatacagtctgaagaagaacaattcattatttggggttttttttttcagcttatatgaaacatattcaccaaatttttctcaacctctgtaacaaaggaaaaaatgttactcatcatataatgaaataaaccacagagttagaaataaatccactgatgacacttcttaccaggggagagtttttcatctgtttgttaataatagaaactcctaactcagaattgcatggtagtttaggagtattttttaaaaaaacaaacaaccctcagtttttaaaactgagtactgtttgcttgttatatttaacacttggttattttgtaaataatatccaaattttccatgaaagcttcattttattatttaaacccatatcccagtgacatgcaattgttcttcaactgagacatttgataatactgtgacaagcagagttcttttctcatagtaagttcaatataaatatttactggatgaatggataggtagaaggataaatgaaagcagcagagtgtgataaagtaattttgattttgttataaatgtgatattcatatataaatgtatgaaaaactgtaatcaagagaattacaaatggtctacttttgtttcatttgtggaagatgccagaattatttagacaactgcctgtttctcctttgtgtccagaggcctcaaccaccttacttaaaaagaactgaaatactgttcttccagttctttgctgtataaaatgagcacaggtatagggtttcactactttacttcttttgtgtaatttcctacataattattttgaaatctcagaaatatagttctgattatctgaaaccaatggaagtctgtccttaataccacataatgaggcacagtagaaccagttgatttttggctgggcacagtgctcacgcctataatcccagcactttgggaggccgaggtgggcagatcacctgaggtcagaagtttgagatcagactggccaacatggtgaaaccccgtctctactaaaaatacaaaaaatttagctgggcatgttggtgcacacctgtaatcccagctacttgggaatctgagacatgagaatcacttgaacctgggaggcagaggttgcagtgagccgagatggtgccactgcagtccagcctgggcaccatctcggctcatgaactcctctgtggagcaagactccatctcaatttttwaaaaaaaattgatttttaactcctaactttatacatgaccaatatgtgacttaataaacctatttaaaattattgactttattactgtattttacattattaactttattacagactttatttgttaaaatcctctattcaaaataactttagaaaaaatgttctgctttggtggttgtccatccagtgaaatttggaatgagtcattaatacactgcataaccatgttccttccctatctccatcttaatgtagttccttgtcttcaatgggcaccattgacactgcatcttttatcactcatctgcccagcccgcccggcccacaaaataaatggaaagatttcttcctaactcctgccctttctaaggaaggaagtataggcacatggtctaaagaggactggacctcaagttaaattatgaccaggcccagtcacccacagatcatatgatctctgggtaaacatagcctactctaaatgactaagttaaaggtagcaggaagatacagaggatactaaaaatgcttgacaaattttaaatttctgttgaatatttaaaaaatattttatttatatctctttcctagagggtacagtctatgtcctagtcatctatgtatttttcttttcacctagcacaatatcagttgctagtagaatgaattaagaaactgctccatacattttttttctaattttctgctttatctaatgtttctttaatgcagataaactgcttatatgataattaaatgtctctttcctgttttaaatgtatatattttatatagatatattgtacacgataatacatatatgatcatactttcaattgaaggaaagtaaggaaatagtttaaaactgacttatgaatcaatacatactacaatttcaacatcttatgagaattgtgtgttacactacataatatttaaatacaaattatatttttctgctattctaaacaccatggttagcaaaaactgaaatgaatgttttgttttcctatgacacaactgggtgaaaagcagaactacacataagtttcataataaaacttcacaccacatcatacttgtctgttgtcaggttttgttacattcctcctagctcaaccaagactccctggggctggcaaacagggcagagtttgagtcaaaaccatgcacttcctttcagctttagagatgcacttacaattttgggggaaaccaaaaaacagctgttttttcctccagatgtggcaagtctgtcactttcagtgtttattccaactccaaactcagcacaaataaagacaattgcctgggaaaggaaggggatagaggctggagaatccaaaagttctattccactcaaaataaggtatcaatgttacaagactcccttgaaaagagacaaagttgggaagatggcagagcagaaagggagagaaggagagaagagagagagagcatggaagggagggtgggaaggaggaaaggaaggaacaatctagtgaggagtatgtgtcattaccaaagattaggattaacccaattctgtggtcctgggatccaacaaaaaaatgcacacctgacctaattgtattcatttgtcaagaggccggttccatatcggagacaggctgtattcatagatgattttaaggacagtttaaggcatagagttttactctaaaaactgagaaacaaaaaatccttcattgtagaatttgttttgttgccctagctctactatttatacttttccactttagctatgcacagaacatagctaattttcatctcaatttttcaattcttttgctatataattgttaacatttattgaccactaacctcattttaaggactgtgctaagtattttatatactttcctggggaggcacttattcctcacttttgatatttccctccacgtggggaacatccattagagtaactctcctggcctgtatctacttacccccaggagaggagaagagagtttggtgagtttgagatgaggaacaggatgtctgatgaagatctaatataactcatgttccttttaccttctccattgtctttcaggtattccaccctgcaaaaagcatgtattcatggtcagctctcagcaaggccagtagcagagtggtaaaggccttggccctccaaggctgggaaaagacaatgacaagtcaaatccagacctatgttgkatgttggtctactaggtgactgtctcctggaaatgttatgcagctcagcaaggtgaaggtgagaatatctttgctttttgataaaacacagaatgcatagatttcacatctcactatgtgagcccccacaaaacaaaacctagaggagcatgtgagaaaaacgcatctctaggctagaaaacaaaaagagaaaaaaagaaaaatgtctgtgtaagaaagcaaaggaaagaagatgctcaaatccagcaaatcataccagccttgtcataggcacaaaaagaaagggattaacctaagttacaaggtgaattatcataaaatcagatgaacctttctgaaaaatagtcatgggacaaaggagggatatataacactagaggcttaaccctttcctgcagagaaaaaaaatgtaactgaaagaaatgccactcaaggcttgtgacattcaaagtgaagacaagataaggtcttatgtagtacatgacataggtgtagacactcactagactgaaaggagtacatgtttccaaagcagctttaattcacgtctctgctgagggtgattacaatagtaggaagcaggaggcaggtcttargctatagcaagaggtacaggcaatagcctctgtggcacaggattgagatacctgttcataagacatctcggaggctgtgtcactagacacagccccactcttatcagcatggggtgccagaaacatgagactcaatgggaaaataaaattaagaggatttgaatatgttataaaggaaaggcactttgagtaaaacattaattggggctgccatcatgtgaagatttttaaacttttgtagaacccagaggtgttgcaaatgccgctctctgagaaagcagatagtatgcagaagtggctcttcctctgatattggaagtaaaagattaacttcttgatggctgacttctcccaactgagtttaagctcacaatttcctgactcctgaaaattggctgtgactgccaccaaactgtatccagaaacccaaccatttgtcacctcccctgctatcacattggtccaagccacaatcatgtcttctttagattattgcaacagtttcctaaatggtcttcctgctgctgcacttaccctttagagtctcttctcagcaaagcatccaggtgatcgtgttaattcaagtcagtaccttgttctgtaccctgcactggcttcctatctcatcagaatgaacactacatggtctgccctctgtatccccctgatctcatctcatcactcttcaccttgctcactgcactccagccacataggattccttgctgttttgtaaacactccaggaatactcctgcctcctgtttttgcatttgctatttcctccaccctaaaatgatcattcactacataggcacatggcttgctctttaacatcctctaggtttttattcaaaatagtctccctggctctcctagctaaaattctaatcccctctcaacatctcataactccattcttttatttttttctccttatcatgtcactaatatgttaaatatttaattatcttatttaaaaaaggtcttccccaaaagaatgcaattttgctccatgaaggcaagaatctttgtctgttttattagctgctagaatatctcctgatacatagtaggtattcagtaattatttgcagtatgaatgaatgaatgaatcctgatgagacaagcctggattatctccatccacctatygttatgcagataactttgatatggtctttggactcaccaagtgatgtgatctggaaccataattttcctatagtatcaacattacaatctagggattagcttgctttccaaattgcatagtgactgagctagaactcttataattcagtatgttctaggaattctttggactttattttattaagtggggatcatgaaaacaaattctgagttcttgaaggaactgcatccattctaggaactgcgctactgagggaaacgaacaccacatctgccttctcttgaccaggactgagtagagtaagaaatgaggaaagacaagttttgtactttaatttttttaaactttaactcataaagtcaaaagaatttgatttagggctttaatctctttgggttttaacttatttagacttaacttgcaagggaatctaatattttttactgtratttctccctggaatttgataatgggaagaagtctatattcagatgtgaagcatcttattattttatatattttatacataatatgtatacttttatattatatataattatatattttaacatatataatcatatatgttttatatgtataaaatacagacaggatcttgctttatattcatataattatatatttttaacatatataatcatattttatatatataaaatttttttttgccttttttaaattttattattattatactttaagttttagggtacatgtgcacaacgttcaggtttgttatatatgtatacatgtgccatgttggtgtgcttcacccattaactcgtcatttagcattaggtatatctcctaatgctaaccctccccgctccccctaccccacaacagtccctggtgtgtgatgttccccttcctgtgtccattttatatatatatatataatagagacagggtctcgctgtatgacccaggcttaagtgcacccaggctcatagctcactgcagcctccaacacctgagctgaagagatcctcctgcctcagtctcccaggcagctggaactacaggcacatgccagcaagcttggccaatttttaaattttttgtagagatgaagtctcaccatgttgcccaagttggtctcaaactcctggcctcggtgatccttccacctcagcctcccaaagtactaggattacaggcatgagccactgtgcctgccttgttatatacactattattggggtatttttatgctgtcattcagtgccattgtagaacttctgatgggctatatacatgttacatccatgaaaatccactgctcacacttcctgctgtgaggatcataatggactgatggcctctggacccatcatcatgttcacactgaggccacacttcctgctagctgcttctaccaatgactgaagatgactagggtactaaaacatgcccattccagtgaaatagaactcttccaacaaggaactttggctgaaggattttccatcagccaggtttaacctttctaagaactgctgcattgcagtctaagattcttcctacccagttgtccttccttccctctcttcttgcacagatgtcagacctacaccatgctttggaggcattccctgccttcacctgctccccctgccaataaatctcttccatttctcatcctttcttggcgtctgcttctcagtggacccaaagttacatactatrtaataggacaacttggctagacatcatctggggtgggaaattgattttcagccaggggtacaatgttgcctacaagttaatttatctaatgtattactctggcctatttcagagcattctggggtcagaagcaaccctggacagtaccaggaggacccacagagcatcacaattagtgttaggagaacagccttgtgaaagtaagaatagaattatcttgatagtctgctgatctcttctccacaagaggatagctacagcttgatggaatataggctaaatggtcaagcccaatgtattaaaagaattagagtctgggaaatgttcagagctaaaacttttcctctactccagtgtttctttccttgtggaaagagcttcactggcacaatactcctgtcggctctctgccaacctctctcactcctccccagggaaacactggtgactttccttattgataagtttggaagaagaattttacaatgctcatctcagctccttcctccttcattttaacataatatccacagagagtatgcactctattctgttcctctatatcatatattttacaggggcaggctcctgcacagggagaccagcaggtccagctggtctgtatgcctggggctatgtgtcagtaagcctattattcccacacatctaagccacatcctcaattctggcctttagcagcttatcaggtgatattgtgactgctatttattttttcctttttgccttataattgatacagaattccagtggagagaagatactatattccctttttacctagcagaaaacaggtgtatcaacttctacaagattatacagctaataaatgtcagaattaaaaatcaagaaaaagtccttagcctctctgctttttaatgttgccatttctttttatagctctgtttcatgataaaggcttttgatgcacatgaattagaaacatccaattactgaatacatcagtagttttgataaggtttggtcctgtaggcctgcatttatttatcctggatttttaaggtttttaaactattaaattgttacatttgaaatctctccctgagggtcttgacaaatatttcaaaacagattctttttttttttttctttttttctttttcattcagacagggtctcactctgtagcttagactggagtgcagcagtgtgaacacagctcactgcagccttgacctccctgggcccaggtgatcatcctgaaaagaggtgatttcatttcccaacttcagactatactataaagctacagtaaccaaaacagcatggtactggtacagaaacacatagaccaatggaacagaagagagaatccagaaataaagctgcacgcttatagccatctaatcttcaacaaagttgacaaaaataagcaatgaggaaaggactctctattcaataaattgtgctgagatagctggctagccatatgcagggcaatgaaactgagcccctacattttaccatatacagaaattaactcaagatggattaaaaatttaaatgtaagaccagaaactagaagaattctagaagaaaatcaaggaaatgccattctagacattggccttgggaaagaatttatgacgttctaaaaagcaattacagcaaaagcaaacattgacaagtgacacctaattaaactaaagagattctgcatagcaaaagaaactatcaacagagtaaacatacaacctacacgttgggagaaaacgtgaatattttcatatttgcaaagtatgcatccaatagaagtctgatatccagaatctatgtggaacttaaacaattgaacaagcaaaaaacaaataaccctaattaaaaataggcaaaagaagccaggcacagtagctcatgcctataatcccagcactttgggaggctgaggcaggagaattgcttgattccaggagtttgagaccagcctgggcaacatagtgagaccccgtctctataaaaaataaacaaagttagcgccaggcatggtgttgcatgcctgtagtcctagctacttgggaggctgagrtgggaggatcacttgagcctgggcgattgaggctgcagtgagccaagatcacgccgttgtattccaacctgggtgacagagtgagactctgtctcaaaaaaataaaaaaattaatggacaaaaaagacatgaacagaccacttcccaaaagaggacacagaagtggctgggaaacatgaaaagatgctccacatcgctatcctcagagaaatgcaaatcaaaactgcagtgatataccatctcacaccagtcataatggctattattaaaagtcaaaaaacaacagctgttggcaaggcttcagagaaaagggagcacttatacactgttgatgggaatgcgaattagttcagccactgtggaaagcagttggagatttttcaaagaacttaaaacaactattactcaacctagcaatcccattactaggtatatatccaaaagaaaataaattcttctaccaaaaatgcatatgtattctcatgttcatcacagcactattcacaatagcaaagacatggaatcaacctagatgctcatcagtggtggattggataaagaaaatgtggtacatataataacccatggaatactacacagccataaaaggatgaactcatgttctttgcagcaattagaggtcattatcctaagcaaattaacacaagaagagaaaaccaattaccacatgttctcacttataagtaggagctaaacattgggtacttatggacataaagacggcagcagtagactctgggaattaccagaggaaggagggagggaagggggcaagggttgaaaaactattaggtactatactccttacctggatgatgggattattcataccccaaacctcagcatcacataatatattcaggtacaaacctgtacatgtacctctaactcaaaaaagttgaaaataattaatttttaaaaagaggtgatttcaagaaaaatctaacttctaactacctttttttctcatgtgacctctagcatattacaaggaatggactaaaattgcatgtgccccaaatatttttatctttgcattggggccctagaaaggcctgaatatagagatgtcacatatattctacagaatataacagtcaagaaagtagaattaggctgggcacagtggctcacatctgtaatcccaacactttgggaggccgaggtgggtggatcatttgaggtcagtggttcaagaccagcctgggcaacatagtgaaaccctgtctctactaaaaatacaaaaaaattagccgggcgtggtggcatatgcctgtaatcccagctactcaggaggctgaggcaggataatcacttgaacccaggaggtggaggctgcagtgagctaagaatgaatatgaatatttacttcaaactctacctctctcagcttactggaaaggacatttagtagttagaagaaatgtattttaatggtgggaagagtttgctaagaatgattttcagagtattttgtagggatccaacagaagactatatgctaactttctcaaaagagagttaagcatcagtcttttttctcttgtaaaggaatcaagccacaagctgtatccctgtcaccagatctatggaattaaaacttctctttgtatttgaattcctggaatatttcttgatattgatttccaattcataattttatagatctgttttccctgtcactacatttctgcattttgtataaatacttaatttgtttcttgaatttgtaattaaacagtcaaccagcttaagtccaataagaatctactgaagctaaatatttgctgcttttagtaagcctaataatttccatctttgtcttacttgaataattagctaggaatatttgatgtttagtctgtgcatggaatattttgtaaggtattagaacccttgcaaataacaggaaaattcagcacaaaacactgtgacacacacctaagcactttgagtcagtggactcatcgggtgcaataaaaaacaacttttccatctctcctcattgcccattttgaggaggaagtggtcctttgcttgaaagaaatctagagcagatcactcctagataataaagtcatctgattacatctcgtcatatggatagtcctcttttgttaattaaaagttcagtaatttaagtgtgagagtcaaagttccaaatttcatttaaaatttctccccttaacaaagtgcttacagtggaagaggggtgcttagctggcttcatctctctttacctacctggtgaattacttctccttccttactcaccatcaggctgcctctggatcctccagggttaaaacagtgagaggaataagagggagcaggaaatgtcttacctgactggcaccaatgtaattttgcgttggttacctctagctgtggcaaatatttaaagccagctctttctggctgatgttccaagctgatgattcttctcacagttgctttcatgggtacattggaagcccccacatcaaacccccacatctatagtgtgggtgaaacattgaccttcaactggttacttatgtctccccgcacagccatggaaatcaggtgaacccatcctgtattggggtcacttgatctttctgagcggaactcacgtgaaatctgaaatggctccaggtctgctgagcccacacctaatccatgagaaacactcaccatctttgttcctgctttcagtgtaaattcagttagtactcaatgcaggctgggttctgcctttctctatatatttacctgcactttagaccagtatctgcagcctcttgtcttgcacatccaagtttatttatttaaactttatcaccgccaacagccatttttagtaccttccaaaaggctactccaagattatgagcatgactttctactcctcccatcaaaaaaaggtcaaatttcatacactttgtagactgtaaaattacaagaaaaataatatatatacatatacatatatagaaatcagtttctattactatgatttttttttcatacctctggaagtctaaaaggagctggaaagcctggcccagagctctccacccaatgaatgtaccaggtcaaggaagataatataaaacaaagtccactcttttctcccaaacaaatgtcccaaagaggtggtgataaatgagacagttttccttgctactcccaaaaagcttggtgatagctcagccttttcatggccaagacagttttgcccaggtgtctagttctgggaaacggtctctatcacataactgaaattccctctccaattgtaatttagtgttcatgagtttctccatcctgctggatcctcttgctctaatgggagggatctaaaaaatagatgtgccattatagatggttctactgagccggagctaggacccacttatgcatgtgtgctatgctgggtgtgaagtatgaagccatgaatctatagtgaggaaccaatgagggctctatgtaaagaatgagaggattgactaaatttagggtagacgttaaaggtggagaatggtgaagggtgcgggtaaacattgatatccttacctttttctgacagtaagcccttcacaagattttctcatgcatgaggttatttggcatggaccttgacagaattctcatttagcaaaattgttaygtacataggtattgagagttagacaacttggattttaatctcattctttcacttactagatatatggcctcggacaagttacctgagcaagttcatggagttgggagtaagggtgttcacttttgcttcttaaggcatctataaatcttttaaactctgattctgaagcccatgacatcctgattttccccaaagtgagcatgtagacaggattatgtgatcacgaagaaccccttgttctatttacattaagcctccattcacccagagttaccagctcaagagactgagtcggagagagtttacatcttctccaggccatatctagaggctttcaggcaataatgcaggtagctagatttgtgttttgaggtggaagaacggcagcctttggtgggtttcaagtgcaaatttcatcccagacccagggatagttatgtagctgggcatccaggaggctagaacttagtttaggaacaggaaagaatccctaaaatccttgtctgtagtagtttggggatttttactccagtattacaccattgatctgtcagctactcctctcatgtttgtttccaacacaagtcccactccccccagtttaggcagcacccttgagttagcactgacccatttgtgttgcaagaccccgtgcatgttgcttgtgtaaatgatgtttggctccttactcctgaaatagccaactggcagtcacctgaaatagggagtcaaagctgaatttctaaaatggaataatgcatgacataatgctatttactgggaatgagtgatttgtttccctgtctaaactttaatttctttaacagtgcttccaagatatttggttttaaaaaaaacacataagaatactaaacaaaaaattggaactacacaaaagtgggaaagaatgccaatgtgaaagccagaaataaagaaatgttggagcattccaagatggccaaataggaacagctcctgtctgcagctcccagcaggatcgacgcagaagatgggtgatttctgcatttccaactgaggtacctggtgcatctcactgggactggttgaacagtgggtgcagcccacagagggcgagcagaaacagggtggggcataacctcacctgggaagcacaaggggtcaggggatttccctttcctagccaagggaagccatgacagactacctgggaaaatgggacactcccgctcaaatacagtgctgttcccaaggtcttagcaaccagcagacaaggtgattctcttccgtgcctggctcggcggctcccacacccacagagccttgctcactgctagctcagcagtctgagattgatctgcgagacagcagcctggctcggggaggggcatccaccattgctgaggcttgagtaggtaaaaaagcggtgggaaactcgaactgagcggagcccacaacagcttaacaaggcctactgcctctagacttcacctctgtgggcagggcatagctgaacataaggcaacggacaacttctgcagacttaaacgtccctgtctcatagctctgaagagagcagtggttctcccagcatagcgtttgagctctgagaacggacagactgcctcctcaagtggatccctaacctccgtgtaacctaactgggagacacctcccagtagtggccaacagacacctcatataggtggctgcctctctgggacgaagcttccagaggaaggaccagacagcaatgtatgctgttctgcagcctctgctggtgacacccaggcaaatagggtctggagtggaactccagcaaactccaacagacctgcagctgagggacttgactgttaggaggaaaactaacaaacagaaaggaatagtatcaacatcaacaaaaaggtcatctacaccaaaaccccatctgtaggtcaccaacatcaaagaccaaaggtagataaaaccacaaagatggggagaaaccagagcagaaaagctgaaaattctaaaactcacagtgccttttctcctccaaaggaacacagctcctagccagcaacggaacaaagctgggcagagaatgactttgatgagtggacagaagtaggcttcagaaggtcggtaataacagacttctccgaggtaaaggaggatgttcaaacccatctcgaggaagctaaaaaccttgaaaaaagattagacaaatggctaactagaataaacagcagagagaagaccttaaatgacctgatggagctgaaaaccatggtacgagaacttcgtgatgcatgcacaagcttcaatagccaatgtgatcaagtggaagaaagggtatcagttactgaagatcaaattaatgaaataaagtgagaaaacaagattagagaaaaaagagtaaaaagaaatgaacaaagcctccaagaaatatgggactatgtgaaaagaccacatctatgtctgattggtgtacttgaaagtgacggggagaatggagccaagttggaaaacactcttcaggatattatccaggagaacttccccaacctagcaaggcaggccaacattcaaattcaggaaatacagaaaccactataaagatactcctcaagaagagcaactccaaggcacataattgtcagattcaccaaagttgaaatgaaggaaaaaatgttaagtgcagccagagagaaaggttgggttacccacaaagggaagcccatcagactaacagcggatctctcagcagaaactctaaaagccagaagagaatgggggccaatattcaacattcttaaagaaaagaattttcaacccagaatttcatatccagccaaactaagcttcataagtgaaggagaaataagatcctttacagaaaaatgctgagagattttgtcaccactgagcctgccttacaagagctcctgaaggaagcactaaacatggaaaggaacaaccggtaccagccactgcaaaaacatgccaaattgtgaagatcatcaatgctaggaataaactgcatcaaataatgagcaaaataaccagctaacatcataatgacaggatgaaattcacacataacatattaaccttaaatgtaaatgggctaaatgctccaattaaaagacacatactggcaaactagataaagagtcaagacccatcagtgtgctgtattcaggagacccatcttatgtgcagagacatacgtaggctcaaaataaagggaaggaggaagatctaccaagcaaatggaaaaaaaaaagcaggggttgcaatcctagtctctgataaaacagactttaaaccatcaaagatcaaaagagacaaagaaggccattaaataatggtaaagggattaattcaacaagaagagctaactgtcctaaatatatatgcaaccaatacaggagcacccaaattcataaagcaagtccttagagacctacaaagagacttagactcccacacaataataatgggagacaaacaccccactgtcaacattagacagatcaacaaaacagaaagttaacaagcatatccagaaattgaactcagctctgcaccaagcggaccttatagtcatctaccgaactctccaccccaaatcaacagaatatacattcttctcagcatcaatcacacttattccaaaattgaccacatatttggaagtaaagcactcctcagcaaatgtaaaagaacagaaattataacaaactgtctctcagaccacagtgcaatcaaattagaactcaggactaagaaaatgactaaaaaccacacaactacatggaaactgaacaacttgctcctgagtgactactgggtaaataacgaaatgaaggcaaaaataaagatgttttttgaaaccagtgagaacaaagacacaacataccagaatctctgggacacactcaaagcagtgtgtagagggaaatatatagcactaaatgcccacaagagacagcaggagatatctaaaaacaacaccctaacatcacaattaaaagaactagagaagcaagagcaaacacattcaaaagctagcagaaggcaagaaataactaagatcagagcagaactgaaagagatagagacacaaaaaaaccttcaaaaagtcaatgaatctaggggctggttttttgaaaaagatcaacaaaatagataggatagaccgctagcaagactaataaagaagaaaagagaagaatcaaatagatgcaataaaaaatgataaaggggatatcaccaccaatcccacagaaatacaaactaccatcagagaatgctataaacacctctacgcaaataaactagaaaatctagaagaattggataaattcctggacacatacaccctcccaagactaaaccaggaagaagttgaatctctgaatagaccaataacaggctctgaaattgaggcaataattaatagcctaccaaccaaaaaaagtccaggaccagatggattcacaaccgaattctaccagaggtacaaggaagagctggtaccattccttttgaaactattccaatcaatagaaaaagagggaatcctccctaattcattttatgaggccaacatcatcttgataccaaagcgtggcacagacacaacaaaaaaagtaattttagaccaatatccctgatgaacatcaatgcaaaaatcttcaataaaatactggcaaaccgaatccagcagcacatcaaaaggcttatccaccatgatcaagttggcttcatccctgggatgcaaggctggttcaatatacgcaaatcaataaacgtactccatcacataaacagaaccaaggagaaaaaccacgtgattatctcaatagatgcagaaaaggccttcgacaaaattcaacagcccttcatgctaaaaactttcaataaactaggtattgatggaacgtatttcaaaataataagagctatttatgacaaacccataaccaatatcatactgaatgggcaaaaactggaagcattccctttgaaaactggcacaagacagggatgccctctctcaccactcctattcaacatagcgttggaagttctggccagggcaatcagtcaagggaaagaaataaagggtattcaattaggaaatgaggaagtcaaattgtmcctgtttgcagatgacatgattgtatatttagaaaaccccatcgtctcagcccaaaatctccttaagctgataagcaacttcagcaaagtctcaggatacaaaatcaatgtgcaaacatcacaagcattcctatacaccattaaaagacaaacagagagccaaatcatgagtgaactcccattcacaattgctacaaagagaataaaatacctagcaatccaacttacaagggacgtgaaggacctcttcaaggagaactacaaaccactgctcaaggaaataaaagaggacacaagcaaatggaagaatattccatgttcatggataggaagactcaatatcatgaaaatggccataatgcccaaagtaatttatagattcaatgccatctccatcaagctaccaatgacgttcttcacagaattggaaaaaattactttaaagttcatatggaaccaaaaaagagctcttattgccaagacaatcctaagccaaaagaacaaagctggaggcatcacactacctgacttcaaactatactacaagccaacagtaaccaaaacagcatggtactggtaccaaaacagagacatagaccaatggaacagaacagaggcttcagaaataataccacacatctacaaccatctgatctttgacaaacctgacaaaaacaagcaatagggaaaggatttctctatttcataaatggtgctgggaaaactggctagccatatatagaaagctgaaactggatccctcccttacaccttatacaaaaattaattcaagatggattaaagacttaactgttagacctaaaaccataaaaaccctagaagaaaacctaggcaataccattcaggacataggcatgggcaaggacttcatgactaaaacaccaaaagcaatggcagcaaaagccaaaattgacaaatgagatctaattaaactcaagagcttctgcacagcaaaagaaactaccatcagagtaacagtcaacctacagaatgggagaaaatttttacaatctacctatctgacaaagggctaatatccagaatctacaaagaactcaaacaaatttacaagaaaaaaacatcaaaaagtgggtaaaggatatgaacagacacttctgcaaagaagacatctatgcagccaacagacacatgaaaaaatgctcatcatcactggtcatcagagaaatgcaaatcaaaaccacaatgagataccatctcatgctagttagtatggcagtcattaaaaagtcaggaaacagcagatgctggagaggatgtggagaaataatgcttttacaccgttggtgggagtgtaaattagttcaaccattgtagaagacagtgtggtgattcctcaaggatctagaactagaattaccatttgacccagcaatcccattactgggtatatacctcaaggattgtaaataatgctactgtaaagacacatgcacasgtatgtttattgtggcactattcacaatagcaaagacttggaaccaacccaaatgtccatcaatgatagactggattaagaaaatgtggcacatatacaccatggaatactatgcagccataaaaaaggatgagttcatgtcctttgcagggacgtgaatgaagctggaaaccattctcagcaaactgtcataaggatagaaaatcaaacagtgcgtgttctcacccataggtgggaattgaacaatgagatcacttggacacagggtggggaacatcacacattggggcctgttgggggttgggggctgggggagggatagcattaggagaattacctaatgtaaatgatgagttgatgagtgcagcaaaccaacatggcacatgtatacctatgtatcaaacctgcacgttgtgaacatgtaccctagaaattaaagtataataaaaaaaagaaacgttatgcattttttcaacccataagtagacccatataagttacctttaactgtaatatgaatgataactagaagctaacattgtgctatggaaaaataattccaagtaagttaaaatgttgtattatggtcaatatatgtggtaaatctcttatttaaaacacaaggaaagacatctacaattttgattaacagaaaatcagatattctcatccccattaaatcaatattgaacacttatttactgaatattgggttaaaggagtacgaaatgtttttttgcatgggaacctacatgtcttggtctagacatgatggaaatgtaaagctgaaccccccccttccctgtgccaacaatttatcaagcttattagtatcttttactgcagagatgtagatctctctatttggacttcccactgttgtagtgctccttccaaatgctcacactctgacctgtgtgaacatatggaggggatatgaggggttctatttcctaactatatcagttgagatgctttggtcaccagtaacagaaaaacttaagaaaattgctttaataataagaaacatttattacttcacataagaagaagtccagatgagaatgtaggttggccaaggaatgtcatcatgaatcaggttctttccattcttcagctctgccattctcattattaacattagctttgtccaacatctcttcctatgtgcctcttttccatgaagaggtaaacctttcctagaagtccccaggcagacttgcctttatgtctcactgaccacaactgcgtaaggcaacctattcattcctacagcatttactggtgaggggagcaattggcttagggaagcacaggctaagggcctgagggtgaattacaaggcaagatacagtgttctgttagaaaagagraagaaagagaatgaattttgagtaaacaacaccaatgtctactcacccactggagatttacatgccaaaattaactttctgctgccttacccaggaccacatactgaatagtcacagattttgctgaaagaaagccgatctttgtgcctttctcttattaggaccacacattagggctggcgctctctctctctctctctctctctctctctctctctctctctcatttttcctcctctattactttctttgacagtaaccccggaatgtctttgcttttccattcagcagacctctcttccttcttcccaccatggctcttaggcatgttaggtgacatgccttgaattacaatgaagttatgttagacctgtaaagaaagctctaacaacttccaagtcaaaagggctagaaccttatggaagcattttcaaaagtatatccataaaattctaggaacttcccacaaagaagaagcttctgtggtcaggtaaatttgggcagcgttgtagatgctttccttctcttgcagattgtagatatacaaggctctcagaagtcttcagttacgtaaactaactcagaatgagtcctggaatcaaaatgcctgtgttcaaatctgggctctgccactttctagctatgtaagctctttaaagctctgttttctcatttgagataagggaattctatggtactatttaattggggttgctatgagaagtgggtgagataattcatctgaggctttcaacacagtgttttgtacattcactcatttaacaattattgtgtcaagggcccaggtctcaaggagcctacattctaatggaggagggaggaggaagacaataagcaagtaaataaatagaataatttcagataatgacaagtaatatgagaaaagtaaaacataatgatattataaagcacaactaggatgagaagggctgttttagataggaggatyaggaaaggcatttctgaggaaggcattttatctgagacctgagatatgaggagactggaattatttatccatttattcagtcattcattcaaaaaatgtttattgagtacttactgtataccacaaattgttttaggcaccagggataaagcaagaaacaaaattctacaagaatatctgccctggccgggcacagtgactcatgcctgtaatcccagcactttgggaggcccaggcgggcggatcacaaggtcaggaggttgagaccatcctggctaacacggtgaaacccygtctctactaaaaatacaaaaaattagcagggtgtggtggcgggcgcctgtagtcccagctacttgggacgctgaggcaggagaatggcgtgaaaccaggaggtggagcttgcagtgagcagagattgcaccactgcactccagcctggggagcaaagcgagactccatctaaaaaaaaaatatatatatatatatatatakagagagagagagagagagagagactgtgtcagagttgagacggggtcgatgaggctgaccccagcgggtagaagggacgaggaggagcgagcagcggaaggtcctggtgtgtccggaattggtgggttcttggtctcactgacttcaagaatgaagccgcggaccctcgcggtgagtgttacagctgttaaggtggcgcgtctggagtttgttccttctgatgttcagatgatgtgttcagagtttcttccttgtggcgggttcgtggtctcactggctcaggagtgaagctgcagaccttcgcagtgagtgttacagctcttaaggcagcatgtctggagttgttccttcctcccggtgggctcatggtctcgctgggctcaggagtgaagctgcagatcttcgcagtgagtgttacagctcataaaagcagcgtggacctaaagagtgagcagtagcaagatttattgcaaagaccaaaagaacaaaccttccacagtgtggaaggggacccgagcgggttgccactgctggctggggcagcctgcttttattctcttatctggccccacccacatcctgctgattggtagagccaagtggcctgttttaacagggcgctgattggtgcctttacaatccctgagctagatacaaaggttctccacctccccatcagattagttagatacagagtatggacacacaggttctccgaggccccagagcagctagatacagagtgtcgattggtgcactcacaaaccctgagctagacacagggtgctgattggtatgtttacaatccctgagctagatataaagactctccaaggccccgccagactcaggaacccagctggcttcacccagtgaatcccacactggggctgcaggtggaactgcctgccagtcccagtgccgtgcgcccacactcctcagcccttgggtggtcaatgggactgggcgccctggagcagggggcggcactcatcggggaggctccagctgcccaggaacccacggagtgggtgggaggctcaggcatggcgggctgcaggtcctgagccctgcccctcgggaagccagctaaggttgggtgagaaattgagcgtagcgccggtgggctggcactgctgggggacccagagtacaccctctgcagccactggcctgggtgccaagtccctcactgcccagggccggcagggccggccggctgctccgagtgcaggcccaccaagcccatgcccacctggaactccagctggcccgcaagcgctgcacgcagccccggttcccgctcgcgcctctccctccactgcaagctgagggagccggctctggccttgcccagcccagaaaggggctcccacagtgcagtggtgggctgaagggctcctcaagtgccgctaaagtgggagcccaggcagaggaggcgcctagagcgagcgagaactgtgaggactgccagcacactgtcacctctcactggggtgtccgccatataaagtcgtttgaggtaaccattgcctaattgtgagtctgtgagagaagatgtgaagtatggcctcgtcccggtcatctgggcgtgcgggtctcgggttttgatcttgcgtttgtgtagttttaacttctagccatggcaaacgatcccaggggagcacagactggaccccgctacgatctctcttggagtggatcagactgatgatcaccaacaaccaactcattcccagataaggaagaagagagtgttacccatttcaatgtggtttcaaccccacttctacatcttaaagacattgtattttttcagcagtgatgcccctgttcattagtcccactgatgttttcattcctcatctcatctttttcttagcagcattcaatgaatccttcattctagaaacactctgtttttttggttttcatgagaccattctcaccttgttttgtcctgtgactcttttgaaaactaacaaacaaacaaaaaaaaccctgtttttctttttaagttctggtaaaaaacacaaaatgaaaatttgctatcttaaccgtgttgaatgtgcagttagtaaagtacattcacattgtggtgcaagccatcaccaccatccatcactagaactcttttcatcttgcagatctgaaactctacccattaaataacttcccatcttcccatccccacaactcctagcaaccaacattctactttctctatcagtttgactactctaggtacctcatatgagtagaatcatacagcatgtatccttctctgcctggcttatttcatttgtatgatgtcctcaaggttcatccatgttgtagcatgcatcagaacttcctccccttttaaagctggataatatttcatagtatgtttagaccacattctgtttatccattcatccatcagtgaacacttgtgctccttccaactttgggctgttgggtgtcctgctactgttgctcccagtgctcaatcttgtttactccctcctaatcgagtgtacagcgttggacactgtgcaggatgatgccacttcatcttggatgctaatctgccatgttgacttctgattaaccccaggcccaggaatgcctcaagatttctactttatgtactgttgcttgtgtaagccaagacaaccttgatgttatcataaacatgtacttacctaagtgctgtcctttggcaaattatgggctatgagacacagcattcttacctttccctgaggggtcaatttcagtgatcctacacattccttctgaagcacgtatgctctttctatacggtgtgtaagctctgggtctggggagtaacagtacagagatctacctgtcttgttgccacatgtttctaaattttccagtaagtcaccttctactgacaaagaaaaaaawatatatatatataatacacacacacatatatatacacacatatatatacacatatatatatacacacacatatatatacmcacacacacacacacacatatatatatatatacacacacacatatatatatatatcttccctaatgcacctcaaattctaccatggaaaaacaaaaaggaaaaggaaaatacatagtatcccaagtggttaagtgctatggggaaaaagaaagtagaaaaggagaaagaatatttaacttcacatttttaaatagggatgcagggattcctcacagaaaagttgacacataagcaaagaaagacctgaaggaggtgaggaaataagccatgcagaaatctaggagaagagaattctaggcagaaacagcaagtgcaatggccctggggcaagagcatgcttgatttattcaagaaagagtaagaagggtgaatgcctaaaggagggtaagtaaaaggaagggtagtaagaagtgaagtgccagaagatgtaaggataagcaaaggtctggaataaaattcctccaggcagatagaacagcagctgcaaaggccttgagtcagaaccagggcgtggttggcctattcaagcaacagaaaaatggcttatagagctggagtagactgagcaaggggaagcatacagatgaagtctgagaactttctgggtcagatcacataaagccttattataggccagtataaagaatgtatattttttctaaatacattaaaaaataattggctataattgcgattattgtgattcatgagacactcgtatgctaaacagatggagaaatgctgtttcaaagccaattttaatgaacactcttgtccatccttcctatcaatctatccccatgtgttgtggattatgtcacagtaggactatagtaagaacttgataatgggtctccaaactctgttttttctttcttaagttacagttggatttctgaggtcactcagaaatcactccccttctcaaaaatttgcattgtttttttacttgtaggatcaagtccatacccagcagctatcaaggatttcaaggtctctccctacatctccctccacctactcctgttagaggtgttgaaattgtgctgtaaatgtacgtgcatggttatagctccaccatttagttcatgccattccctcagcccaaattcttctttccctcattctttgcctgttgaaagttttcttttcattcaaaaccagcagagcgcctattcctttctgaagtttttcctgatattcccaggcagagtcactcactcattccttcaaccatgtacctgttggtgtcacttgtacctcagtttggtgtgtttgtcagattgcatttctgcagacttagttgttgtcacatctcttactttcattagattgtaagcacattaaaggcaagggctrtattttcatcatatcttctagaagtactacctaacacaattgccagtacagagtagatgctcaataagttgctgattaaattaaatttcagaggaagtaatgtgataaacacctttaggtaaagcactgagacacaaaaagaagaaaatggctatgctgtcagggagtatataaatcaataatggtagcttccatttattgagtcctaactatggtattggcactgttcatatagtatgccatttaacactcatagcaacccagtgaagtaggtgttataacccctagtttaagaatgaaattaagtaacttaaacaagttcatagaataaataataggattcaaacttaggtccctccagtttccaagcctgtgctctttcactatacatgatgtcagctgggatctagccaggaaaaaaaaagacaaaaaaaaaaaacaggtctttcagaggaagggaaattgtttcaacagaggattcattatgcagatgaatggagcagtgaagaagtcgaaaagggaatggtgaagtaattcacagattagcaaaattgggaagttattctccttgttgcaagggtgacactgggaggagcagttgtcaccagagcccagaagccttggctgtcagacagaaggagcaaaaaccaccaggagaactgcctgagtagatctgggagaaagaagggagaggctgtccagagggacaccgccagattccaaaggacacagggaacagagtgagaaatggcctggcttctctcttcccgtttccagtcctcctgtggtgcctctcattgctttaacctatcaagaatgaaagaacaagacagcctgtgagaggcagcaacagagaagagcagggaaagggtgggaatggatctgagactagtgtcagcaagctacctttctacctgaaatgaaaagaatataaattaaatagcatttaatttggggctatgatgaatggcaaagatattaagtaaattcaaaagaaagagattgagaggccgaggcaggcggatcacgaggtcaggagatcgagaccatcctggccaacatagtggaaccctgtctctactaaaaatacaaaaaatttgctcagaatggtggcatgcacctgtaatcccagctactaaggaggctgaggcaggagaatggcttgaatctggaaagcagaggtttcagtgagccgagatcgtgccactgcactccagcctggtgacagagcaagactccatctaaaaaaaaaagaaagaaagaaagaaagagagattgatgatggctgcagtagcaagggagagattcttcggtgggggaaagttataccaattcctaaaaaaaggtagactttctatgggtgaaaagaagagggtaggtaggtattccacacagaaaaaactacctaagtattttcccttgggcaaagaatactattcattctttttaaatgtctttttatttggggataaaatagaatacctatcatatatgtgtacagtataaagaataatgaaaaacaaacacccacatgcatactaccctggctcagggagtaacacatcatttatctgcatttcctttttttttttgagacagagtctcacttggtcgcccaggctggagtacaatggcacgatctcggctcactgcagcctctgcctcccgggttcaagtgattctcctgccttagcctcccaagtagctgggattacagacatgcgccaccatgcccagctaatttttgtatttttagtagagatggtgtttcaccatgttggccaggctgctctcgaattcctggcctcaagtagtcctccagcctcggcctcccaaagtgccaggattaccggtgtgagccaccacacctggtccaatttacttttaaatgtatcaaaaaataagtggattagtagacagagggatgttaacagatggatagatatgtggtaataaaatgttactaaatggataggcatgaataataaaatgctaatggtagaatccaggtggcaagattgtaaattttttcaactgtcttgtctgtttgaaaattttctcaataaaatactgagaagagaaatcccatgcctgaaagattctaatttaattggttgtatttgggtctggacaccagattttttttttctgaccactgcaatgaagtcttgcagtggagggaagagattgggctcagcaccccaaaactgttcaagagctctctggatagattccaatgtgcagccaggtttcagggctactgcactgcaatatgccatgggatcacagagctagcatgagcagaacagagaatgggataagtaggaggggcgaataaaagaggggcaaatttctgtctgcctatcagagatgaggcctccaggctagacttttatgtgctttctgtgtcggaatgggtggatcaactgcatgtgaaagaggcaagagaggtttagcaattcagcaggggttactgagaacataggcttagctagggttctctgaagttcttaaaaggggactcaaaagtttatatttaatgtaaacttttaatttggcaatgactcatccttcacaatgtttcctatagctttaaataaggtcatctattcattcagaataatacttttagcatgttatctcccttgagaagtataacatccactttcaacatatatatagagagagatgcatttctatgttttatttttttaattcatttttatggagatgaagaaagagacctgttcagaaagaagggaagcagaaagaaaatgttatacctttggcagccttggactcctgggtcagcagaaaaggaacaagagaaagctaggcctggatagtataggaacaagcaatcgagcctagtgtcaggcttggaaatttgacaattccaaagaagcatgtataacccaattaatcagtaaagagagtaattgatgcttcccagaaaatggatttctatactgcctaatctgcagtaacatgaatatcttctataacccttcccctatctccagttattttaaaatcttactctgagggttactgtagtgtataaggttgtttgtctctacagtaaatgattccagtccctttaaccatgtgaaaggagacaggaacactagcatctgatcctcgtcatgggaccccagcctgtcttactacaattgccagctggagacagaacagggcctaagggcaaaggcagaatggcatatgaggaagagaaccaaaggtcagtcacagaacagctgtgtcacaggtgagatctaaaggaaaactgcgggactaaaagcaggaagcaaacagaagttcaggagccagaggaatgcaagaacatatcaggaagggggatatgagacaggaatagaatcagggctttggccatgaatgaggccagggtacctcaagctcattcttgttgagagcttgccctgtggtgcttgggtaagcaggaaagagttaggcagtgcaggttgggacagtctttaaaaaaaaaaaaaaamaaaamaaaaaacaaaaaaaacactccaaaccatattatcacatagcctattaactgacacttattttgatgcctctgagccatccggaagaggctaaatgtggtatcttccacttaaaaagtaagggaaatatgtgaaatattttagaaaagcctgcgaatagcgtggtttaaaaacaaaaagagaggtccttttacctctgaagggataacttttagctgccaggaaaattcacatatgtataatcccacattgcctccataaatctaggtagytatggcagtgattcagaaaagtgaaggcatcgctttttgactttgaatgtctccatttctcccagctggtatgacagtgattttcctttctcccttattttggagttgtaaggtatattaacattcttacatagctttgatccaatatagaatttttttaaaaaactttcaaagaaggactttatggwctggcattagccacgtgcttatttgctgtgtccagggggctgtgacactgtaattggctctgctggggataatcactccctaggagacagatgargttagggtaggagggtatgagccctgaagcyatgtggagtagtaaaggagtcccccaagtgaaaagaggctgccgttttcagaagcaggggtgtgggaaaaatactgagcagatatctaccacaacctaacaggtgcacacaagtaatgagtgaaatagcagggactttaacttatgtttgcctatttttaaacgtctacttttctcctaatgttgtgtctcctttgctggggaaaacttttataattgctgcctaactcctgttgtttcactctgtctgccctctctcctaccctgcttttacccccagcctggagtccacttgggtggaaatgcagcatataatgagcccaaagttaatcatctgcaggtttgccctgataagtcacagtatgtttgctgcactccttccaagagtcaacagcagctttggggatgtgctgagagtggcttatggcattctgagcgctggcccagatgggaggcagtgtgttggggagtctatctgaacgccaccatctggaatgcctctgttgccctgaaggcactcgtctgcatctccagtgtacacggcttagagatgccaaaaattgagccaagttcactggatgtacaaayggcctgacgtcaatggaatttattcataatttaggcctcatgtgtgatgtactgtctgaactcaatgatctgtcaaaacaatcagggaagaagaggagaaggaagaagaaaaggtggaggaaaacaaagaggaagaagagaagtgaaaggtagaagaaacagcagagaagaagaagaggaaattaggacagggccaggagctgtagcagcacaggttcagcttttggctcctggggccaatggtccctgtaagtttgttgaaagcatcagtgccaaataaaacatggccttttaaagcaccgaattacgtgagcgcagagctgttaaaatcagtgtagcaaaaatccagctgggtttggccgtcgccacaaagtacaaaatgatgatcatttgtactgccaagacccagggttctccagatgtggtggactgagcagagttacttggatatacattcagttgcccattctttaaaataaggaatctgctattaagaagtgtatgaggctgggagcagtggctcacgcctgtaatcctaacactttgggaagccgagatgggtggatcacttgaggtcaggagtttgaaaccaacctggccaacatggtgaaaccccatctctactaaaaagtacaaaaaaaaaaaaaaaaattagctgggcctgttggcgtgtgcctgtaatcccagctacttgggaggctgaggcaggagaattgtttgaacctgggaggcagaggttgcagtgagccaagatggcgccactatactccagcgtggtgatagagtgagactccatctcaaaaaaaaagaaaaggaagaaatgtatgaagtggatatttgctaggggttttttggttgttgttgttgttgttttgtttttgcttgcyctgtgtccagaggtggattatattgtgaaactaacaaagcttaagcttcagaagccttcagttgcatgggaggtgctgggagttatggagtattctaggtggggagagaaagccaggttacaatcaacaagcatttatatattagcatttctggtaaattgtctaaatcgatctaagaagtaaagaacctaaatctccaagagttcaataatttgttgggatttattttctcattctaaataaaaccaacttttatacctgtttttaaatttgtattttttttaattaaagaagaccccaaaattataaggctttcagttccataaaatctgaatctatccctatctgcctcaattgcctttcttctgcagatcaaggtaaccaaaccttgatttgcctttgtggaaaggttttctgctcactcagcagtagacacatgatccrggttcaggaataagtacgtgatccaatttgggctaataagaatcaggggcaaagtttttgctggaccttctactggggttattaagttgaaagttactaagttgtgtggaaatgcaagtgtggcattgccaacaaccatcttgcttctataagaggaaactgcctgcgaataaaattcgtatagaagaaagcagagctaagggatataaagaagccaagtcttaataatgtgactttgcaaccctgaaacaatactgaagttactacagataatcctgggcttttcagacagacaaatcaataaaaacctctttttttcttaagctattttgagttgggttctggcagttgcaactgagtcttgactaatacaggtccttatatgctggaaaaataattattattatttcaactcagaaggtgatttttttagtgtatttgcctctgaatagttataacatagataacacttactgatcactcttattaagggttttactcatattagcccatctgaatctcaaaagcaacctcatgaagtatgtactggtattatcatatccattttactaaagaggaaatcgaaggcacatagaagttaattaacttgtctaattggtgtacactttggttttagaccttggattcctaactgttacactgtgctgcttgagccaactgattcagatgatactaacatccttttaagaaaagctctcataccaagacttcattagaggttgccagcctatgaattatatgcccttagaacaaatgcaagggtgggcaatgtagttcactttcgtcagaattggctgagaatgacagctaccaagaatatagtagactattcaccagccaatatatgtacaccagccaatgggacccaacatcaaatccctcttttcttatttgggaactttctaaaggttctctcatatgtgtttccctttgtcctctttccctcgattcatcccataactacatagctccctggtgtcagtatgacactttctatctgtagttcatctgtcattcctatcactcctgatgtgttgccactggtattaaggggaatcccaacacgattccacttcagkagtttccatgctgaagatgggagaatgaactgagggctcctaatcttcttaaacaacccccattatgcctccaaactggataatctctcagtttcctacaattccctcttcttgtgcctcttccagacttactcccttgtgttcttctctgcctatggctccagtctgacaggcttaagatctaaagcctggatcccactatcaccaaaccaagtatgtatttcagacttgaagccataatgatctgatcctttcatttttcagcaaatgtttattaagcacttactaggcactggagatttagggatgagtatgacacagttttatctttctagaagctctcaaagtactggactcaggggaagttaagatgggacacaaggccaacagttcctatgaatggagtgacttagaatcacagcagaggcagatgccaacttattgaagagaataaggaggctttttaatgcaggacagaagatggagtggcaggaaaagtggtcttgaggtgtagcaggaattatccagcagagaatagcattccaagcagatggaacagcatgttcaaggctaggaaggcaataaaggataagaygtgtttgagaaatagcaagaattttagtatggcaggagcagacagtctttgagggagagtggtgagagatgattctaaaatagtaggtagaagccagcttgtgaaatccttgtgtgttgtgttctggaatctgaaaatcatccattattcatagacagccaatgagatctcaagcgagagtgacatgattacatttgtattgcagacagatcacatgagcaacagtgtcgctctcttgtagtaatcagatctttctttccagccctgctctttggatttgaggttcttcagatcaacccaatttgtggcctccattatcactgcagacagatttttctctccctttcctcagcacacaatcagtgtaccttgaagttccctcttacccatccatcagcctgggaatggcatttcctcagagaagcaattctcaaacacatgtgggtgtgtagcttgtaggaaggatatatcatgttcacttggagggcattttcaaagtacatgtgcctttgcatcacatgcccctcttgctctgaaattctaataggccaaaggtttgaggggggtttctaggggaactagcattttgtaaaagtttattcttttaaagaatagagatctagacatggaaactctaatcaagacatactcctctcaattccttagttgttattaaaatactacaaaatctgcatttatattataatagtgacacctcttatagttggtcgaaagttggccccaaaaaggatgtgtccatgtcctaatacttggcccctgttaatgttaccttatttraaaaaaaaaaaaaaaaaaaaaagtctttgcagctgtaattaagttaaggatcttgaaatgagatcatccagatggattttaaatccaattccaagtatccttataacagacagaagagtaaaagacaaagacaaagaggaaaggccatatgaagatgaaggtagagatcgccgttacgtagctagaagccaaagaatgcctggagacatcagaagctggacaaggcaargaagcattctcttctagaaccttcagaaggatcatggccctgccaataccttgatttcagacttctgtcctctagaatagtaaaaggatagatttatgttgttttaagtcacgaggtttgtagcaatttgttatggcatctctagaatgtcaacataccttctttctaataggttatacctaatagttacttttaagagaggagacagtttccaaagtgttgtataatagcatgatgtaaatgaatttaggccaggtaacttaatccctttgagctggtttcttcacctaatcccatcctcacagaatgttgagatgattcaatgagataaaataaaactacccagcagacaactggcaaaaaccaggctctaaaggaagtatctatttgagaataggactcaacacatgttgcatagacactctggtgaaacaagctctcccaggagaaggccgggataattaacatgcaatgtctgggcctctatcagaatctcttttacatgtaaccacttacacccatctggtatcagctcttgtttgtcaccaactaaccactgccctctcctgcaaccttctctacttcctgtttacgtagatagctgcttcctgactgacgaaactgaatggtttcagccagactgcttttcccctggacccatgccaagaataccttctttactttgcatttctcattctgctttcttcttatagtagaagccatcatattaatgagttgcaaactgctgccctgagctattcccagctaatcagttagtcttcttcctagctattggattaaatcagatgaacacaagtaataacacgtcaggtatcatgtctgtatcaagaaatttgtccatcctttcttgctccagccctgccaagctactgacaatgatgcttttttcatttaactggacaagtcataatgctgacactctcaagcccagccctgtcctgtttatgtgaagcaattctaaccaaggccagcaggacaacaaacaatagggttaaacttgaccagaactccagattgggagactatttttttttaattatactttaagctctggggtacatgtgcagaacatgcaagtttgttacaaaggtatacacttgccatggtggcttgctgcacccatcaacccgtgatctacattaggtatttctcctaatgctatccctcccctagcccccaaccccccaacaggccccggtgtgtgatgttcacctccctgtgcccatgtgttctcattgttcaactcccacttatgagcgacaacatgtggctgtttaaatgatctaatttgtggttctcaatatgagtgaatatgcaaatcatgttagaggctctttcaaacaaacagataaacaaatatttggaacatgagttaggcatggatttttttgttaactcctaagtgggataataacttttccctcaactccaggcttatcatccttaacacaatagttaaggatgtgaacactggagcctgactgtctgggttcaaattctggctttgccacccataagctgtgtggccttgagcatgtcacctaacctcctttgcctcaatttcctcatctgtaaaacagttgtaataatacctacatttgccagggaattgtgaggaataaataagttaacttgtgaagagcacttaggctatataaatgctattattactattacttttattgttgttttataacttctctggagagacaggaagttggtcagagggtgagatgcctgaattagtgatttcaagatgaggcaggttgaggtgatgtgagggttcacagtatgacagtggaagtggatagcagaggtagaatggaggaaagatcatcattggaaggagaaaattagtagtagtattaaagcatgttctttatgagactggagtacctgagttcagatcctgccttcactacttaatggcagcgcaaccatgagcagattacttaattgttttctcatctgtaccactacagaaccatgagcagatttctcctctgtaaaatgaagataataatagtgacctatcttatagggctttcatggaatcaaataagttagtaaataacatactgatttcttagaacagtgactggcatttagcaagtgttagctcaggatacaaaagcaatgtgcaaaatcacaagcattcttatacaccaataacagacaaacagagagccaaatcatgagtgaactgccatttacagttgcttcaaagagaataaaatacctaggaatccaacttacaagggatgtgaaggacctcttcaaggagaactacaaaacactgctcaacgaaataaaagaggacacaaagaaatggaagaacattccatgctcacggataggaagaatcaatatcatgaaaatggccatactgcgcaaggtaatttatagattcaatgccatccccatcaagctaccaatgactttcttcacagaattggaaaaaactactttaaagttcacgtggaaccaaaacagagcctgcattgccaagacaatcctaagccaaaagaacaaagctggaggcatcatgctatctgacttcaaactatactacaaggctacagtaaacaaaacagcatgtcactggaaccaaaacagagatatagatcaatggaacagaacagagccctcagaaataataccacacatctacaaccatctgatctttgacaaacctgacaaaaacaagaaatggggaaaggattccctatttaatacatggtgctgggaaaactggctagccatatgtagaaagctaaaactgaatcccttacttacaccttatacaaaaattaattcaagatggattaaagacttaaatgttagacctaaaaccataaaaaccctagaagaaaacctaggcaataccattcaggacataggcatgtgcaaggacttcatgactaaaacatcaaaagcaatggcaacaaaagccaaaattgacaaatgggatctaattaaactaaagagcttctgcacagcaaaagaaactaccatcagagagaacaggcaacctacagaatgggagaaaatttttacaatctacccatctgacaaagggctaatatccagaatctacaaagaayttaaacaaatttacaagaaaaaaacaaatatacaagaaaaaatcaaacaaccccatcaaaaagtgggcaaaggatatgaacagacacttctcaaaagaagacatttatgcaggcaacagacacatgaaaaaatgctcatcatcactggccatcagagaaatacaaatcaaaaccacaatgagataccatctcacaccagttagaatggtgatcattaaaaagtcaggaaacaacaggtgctggagaggaggtggagaaataggagcacttttacattgctggtgggactgtaaactagttcaaccattgtggaagacagtgtggtgattcctcaaggatctagaactagaaataccatttgacccagcaatcccattactgggtatatacccaaaggattataaatcatgctgctataaagacacatgcacacgtatgtttattgcggcactattcacaatagcaaagacttggaaccaacccaaatgtccaacaatgatagactggatgaagaaaatgtggcacatatacaccatggaatactatgcagccataaaaaaggatgagttcatgtcctttgtagggacatggaggaagctggaaaccatcattctgagcaaattatcccaaggacagaaaaccaaacaccgcatgttctaactcgtaggtgggaattgaagaatgagaacacatggacacagggtggggaacatcacacactgtggcctgaggtggggtgggggtaggggggagggatagcattaggagatatacctaatgtaaatgacgagttaatggatgcagcacaccaacatggcacatgtatacatatgtaacaaacctgcacattgtgcatatgtaccctagaatttaaagtattataattaaactataataaatttttttaaaatttaaaaaaagaaatttattctgctggataccctaaatcatctcccccaggttcaaagttccacagatctctagggcaggggtaaaattccrccagtctctttgctaaagcaaagcaagagttcatctccagttcccaacaagtttctcatctcaatctgagatcaccgcagcctgggacttcattgtccatatcactatcagcattttggtcaaagcccttcaacaggtctctaggaagtgctaaagtttccaacattttcctttcttcttctgagccctccaaactgttccaacctctgcctgttacccagttccaaagtcacttctgcattttttagtatccttatagcagcaccccactatagtggtaccaatttactgtataagtccattctcacattgctgcaaagataatacccaagactcggtaatttataaaggaaagaagtttaattgactcacagttctgcatggctaaggaggcctcaggaaacttataattattgtggaaggggaagcaaacatgtctttcttgacatggtggcaggggaaagaagtgctgaccaaagcaggaaaagccccttataaaaccatcagatctcatgaaaactcacaatcaggagatgggggtaaccacccccatcattcaattacctcccactgggtctctcccacaacacatggggattatgggaactaccattcaagatgagatttgggtgagaacacagccaaaccatatcaccatacgtcttctgaaatctaggcaggggcatccaagcctcaactcttgcactatgtgcacctgcaggcttaacaccgtgtgaaagctaccaaggcttatggcttgcaccttctgaagcagcagcccaagtacctgggtaactttgagccacatctggagctggagtggctgggatgtagggagcagtgtgccctgggcctgacccacaaaatcatttttccctcctaggcctctggacctgtgataagagaggctgttgtgaaggtctgtaaaatatcttcagggtctttttcccattgtcttggctactagtacttccctctctttgagatatgcaaatttctgcagcctcctttaattccttccctgaaaatgggtgtttcttttctaccacatggccaggctgtgaattttccaaacttttatactctgcttctcttttaaatataagttccagtttcaggttatttctttgttcatgcatatgaacatagaattttagaggcagccagggcaattcttgaatgttttgctgcttagaaatttcttctgcccgatactctaaatcatatatctcaaattcaaagttccacagatgtctagagcaggggcacactaccgccaggctctttgctaatgcataacaaaagtgacctttgctccagttcccaataagttccagactttgctgaagttgcttatcagcttaaggagattttgggctgacacgatggggttttctggatatacaatcatgtcatctgcaaacaagtacaatttgacttcctcttttcctaattgaataccctttatttctttctcctgcctgattgccctggccagaacttccaatagtatattgaataggagtggtgagagaggccatccctgtcttgtgccagttttcaaagggaatgcttccagtttttgcccattcaatatgatattggctgtgggtttgtcataaatagctcttattattttgagatatgtcccatcaatacctaatttattgagagtttttagcatgaaggcctgttgaattttgtcaaaggccttttctgcatctattgagataatcatgtggtttttgtctttggttctgtttatatgctggattatgtttattgatttgcatacattgagccagccttacatcccagggacgaagcccccttgatcatggtggataagctttttgatgtgctgctggattcggtttgccagtattttattgaggatatttgcatcgatgtccatcagggatattgatctaaaattctctttttttgttgtgtctctgccaggcttggtatcaggatgatgctggcctcataaaatgagttagggaggattctctttttctgttgattggaatagtttcagaaggaatggtaccagctcctccttgtacctctggtagaattcggctgtgaatccatctggtcctggactttttttggttggtaggctattaattattgcctcagtttcggctcctgttattggtctattcagagattcaacttcttcctggtttagtcttcagagggtgtatgtgtccaggattttatccatttcttctagattttctagtttatttgcgtagaggtgtttatagtattctctgatggtagtttgtatttccatgggattggtggtaatatcccctttatcattttttattgtgtctgtttgattcttctctyttttcttctttattagtcttgctatcagtctatcagttttgttgatcttttcaaaaaaccagctcctggattcattgattttttgaagggttttttgtgtctctatctccttcagttctgctctgatcttarttatttcttgccttctgctagcttttgaatgtgtttgctcttgcttctctagttcttttaattgtgatgttagggtgtcaattttagatctttcttgctttctcttgcaggcatttagtgctatatatttccctctacacactgctttaaatgtgtcccagagtttctggtatgttgtgtctctgttctcactgttttcaaagaacatctttatttctgccttcatttcgttatgtactcagtagtcgttcaggagcaggttgttcagtttccatgtagttgagcagttttcagtgaatttcttaatcctgagttcttgtttgattgcactgtggtctgagagacagtttcttaaaatttctgtttttttacatttgctgaggagtgctttacttccaaatatgtggtcaattttgaaataagtgcgatgtggtgccgagaagaatatatcttctgttaatttggtgtggagagttctgtagatgtctattaggtccacttgctgtggagctgagttcaattcctggatatccttgttaactttctgtttcgttgatctgtctaatattgacagtggggtgttaaattctcccattattattgtatgggagtctaagtctctttgtaggtctctaaggacttgctttctgaatctgggtgctcctgtattgggtgcatatatatttaggatagttagctcttcttgttgaattaatccctttaccattatgtaatggccttctttgtctcttttgatctttgttggcttaaagtctattttatcagagactagacttgcaaccctgctttttttttgttttccatttgcttggtagatcttcctccatccctttattttgagcctatgtgtgtctctgcatgtgagataggtctcctgaatacagcacastgatgggtcttgactctttatccaatttgccagtatgtgtcttttaattggagcatttaactcatttacatttaaggttaatattgttatgtgtgaatttgatcctgtcattatgatgttagctggttattttgctcgttagttgatgcagtttcttcctagcatcgatggtcttcacagtttggcatgtttttgcagtggctggtactgattgttcctttccatgtttaatgcttccttcaggaactcttataaggcaggcctggtgacgacaaaatctctctgcattgtctgtaaaggattttacttctccttcacttgtgaagcttagtttggctggatatgaaattctgggttgaaaattcttttgtttaagaatgttgaggcctggcacgatggctcatgcctgtaatcccagcactttgggaggccaaggcgggcagatcacggggtcaggagatcaagaccatcctggctaacatggtgaaacgccatctctactaaaaaatacaaaaaattagccgggcgtggtggtgggttcctgtagtcccagctacttggaaggctgaggcaggagaatggcgagaacctgggaggtggagcttgccatgatccgcgatctcgccagtacactcctgcctgggtgagagagcgagactccatctcaaaacaaaacaaaacaaaaaagaatgttgactattggcccccactctcttctggcttgtacagtttcttctgagagatctgctgttggagtatgatgggcttccctttgtgggtaacccgacctttctctcttgctgcccttaacattttttccttcatttcaactttggtgactctgataattatgtgtcttggagttgctcttctcaaggagtatctttgtggtggtctctgtatttcctgaatttgaatgttggcctgccttgctaggttggggaagttctcctggataatattcygaagagtgttttccaacttggttccattctccccgtcattttcaggtacaccaatcagatgtagatttggtcttttcacatagtcccatatttcttggaggctttgtttgtttctttttagtcttttttctataaacttgtcttcttgcttcatttcatttgatcttcaatcactcctttcctccacttgatcaaatcggctactgaagcttctgcatgcatcatgttctcctgccatagctttcagctccatcaggtcatttacggtcttctctatgctgtttattctagttggccatttgtctaatttttttcaaggtttttagcttctttgcaatgggtttgaacatcctcctttagcttggagaaggttgttattactgatcgtctgaagctttcttctctcaactcgtctaagtcattctccatccagctttgttccattgctggtgaggagctgtgttcctttggaggagaagaggtgctctgatttttagaattttcatcttttctgctctggtttctccccatctttgtggttttatctacctttggtctttaatgatggtgacatacagatggggttttggtacggatgtcctttctgtttgttagttttccttctaacagtcaggaccctcagctgcaggtctgttggagtttgctggaggtccactccaaatcctctttgtctgggtatcaccagtggaggcggcagaacagcaaatattgcagaacagcaaatgttgctgtctgatccttcctctggaagctttgtctcagagggctacctgcctgtatgaggtgtcagttggcccctactgggagttgtctccaagttaggctacttgggggtcagggacccacttgaggaggcagtctgtctgttctcagatctcaaactccatgctgggagaaccactactctcttcaaagctgtcagacagggatgtttaagtctgcagaagtttctgctgccttttgttcagctatgccccgcctccagagatggagtctacagaggctggcaggccttcttgagctgtggtgggctccacccagttcaagcttcctggctgctttgtttgcctactcaagcctcagcaatggcagacgcmcctcctccagccttgctgccgccttgccgtttgatctcagactgctgtgctagcagtgagtgaggctccgtgggtgtgggaccccctgagccaggcgtgggatataatctctggtgtgccatttgctaagactgatggaaaagtgcagtgttatggtgggagtgccccgattttccaggtaccgtctgtcatggcttcccttggctaggaaagggaattccccaatcccttgcacttcccaggtgaggtaatgccccaccctgcttcacctcatgctctgtgggctgcactcactgtccgacaagccccagtggatgaacctggtacctcagttggaaatacggaaatcacccgtcttctgcgtcgctcatgctgggagctgcagactggagctgttcctatttggccatctttgaacctccccccagcagaagaaatttctaagcagcaaagcattcaataggaagcagagcataaaatttcagaaaatttgcagcctgatgacaatgtggtagaaaagaaaaaccaattttctgggaagaaactcaatctggctgcagaaatttgcacaagtaacaagaagccaaatgttaatcgcccagataatggggaaaatrtctccagggcatgtcagagacctttgcagcagcccctctcatcacaggcctggagtcctaggagggaaaaatggtgtcatgggccaggcctagggcccccctactctgtgcagcctcacaacatggtgccctgtgtctcagctgcttcagctccagttgtggcacacaggtgagattcagagatgaacaagaaagatgtccccgctacagtgaatcttgcagaagcaaagtcttatacaaaggactccagaaagcctttccaaagcagagtcagccaagacactaagagctatcactagccaagacactaagagctccctaagaggatataggctttgaaacagacaaataaatttgcttaaactctaaagttctttaagcctggcaactcagatcctccaggagtatgcttgattttgtaaggacacttttgcaaggaagataaagatttcatcttagatgccaactctgagtgactggtagttgtggtttagagtcctgagttaaggactgtgaaattccatctgagttcagcaggaaaagaagctatgatagattagcaatgtcagccacatgtatttaagggatgaatgagggcaaatgtggcacacattactatcccagccctaatgtagcctatcttatatttttcacagttgtttcacatacctgttgattttccaactgggcaacaagctccagggaaggcagcattatgcagtggaaggagcagtggaagctgagcaaaggagcttttctttctcttctgaaaggtagcatggtgggatggaatgagcacaaggtgcccagagttagaaaggtatggctttggagttgggcacttcactcttccacagattgcctgatcctagacatgttacagtcaattctcattctcttttatggtagttaatattctataaaatctgaagcattgacctagcatttgctatgagctgttgcaggggaaatacaaggttaggttcctgcaagcctctggtcacattttcatcaaccaatcaatacataacctagttttatgtgtgtttctgtttaaagacaccttatttaatatatattgttgatttattaacactgaactcacagcctacagggctataattcctacccgaaggaagcttatctaacacacgtttgttttctgtataaggcacatcacagccttcttrctctcaggaacaccagacagcactgcaacgctattattaggaatcattgtaaagagcaaaatcaccaaaaaacacaaaaatgagaaaaacgtggcactaaatagactgcaaaaagattcttgtttacagtataagagatgaaacaagaaggcaaggcattgctttgttcaatctcagctgggaatattcatgttagacaactcacatttgtcacggatctgcgcatatctgtaaatgaccacaaaagttccatgagcactgatttgggctacaaataaattttggcaagtaggcaaatccattcatgaataatgaggatgaactgtactaagtttctgtgagccttagtaatgatacctccctcacactacagagtaaatgaaagaaggcatgtaaaatgccttgcatggttacagttagttcttctttataccagatatttacattttcacttcctgtaccttatctgccatgctcaaatctgagagataagtagatatcaagaaacttccagccaaatgtctcatctttatcctgggagcatagaccaaaaactactcacactagctaaaatagaaaagaaggtgttttgaacagacacaagaggcaatctcttgaggcaccaaagtgcagggttcagcatagctaggccaccctgcgttgggactgaaacaggaagatcagaagaagtcccaactctcaggtggatgcatcctctgccatctgtgcctctctgagcatctgctagctacacttttctgattctctcagcagacaggtttcctctgctttctctggctttcttgcaccctcataattttgactctcatgtggttctgacttccatggcactgattccagcctgactctacatgtctggtgcacacctgtcgtttttgcctgtctagcaccattctcccagttctggtaacagaggaactgactggctccaggattggcctgtgagcgagacccagccattgactctctcctgagggtttgatttgtcttggttatcttctatcatttatgttgttattctttgtatcttttcactgccttgtggcttctgtttgctcagcgctcctgtttattcatggtttctgcttactcatgaagtctgatactggcttcactctgcacctttgagctttcattcactgaagaatttttccctgtgtctctccagttctgattattgaaataaaatatcttattgacatagttaattgccatgtgtttgggcagaattttcctgccaggacacccaacaggccaatgtccagcctattgatcagctgcccctaggtaagggcctatcatagcctaacaagcagtaagcagagttgtaggggttggaggtgtgcatatggtatcacatgtggccacttatgttgaaggatttacatcaagctagttatccagacccttctctttttctaatacctcatgtccaactgtgaagaaatcctattagctctaccctcagaatatatttagaatataatcacttctcattgctcccactgctacccctctgctccaagccactctgcctttcacttgcattactccagtagcttaagaagtcacctgcttctacccatagtctattcccaatatagcagctagagtgattattttaaagccttagtcatatcatgtcattcctttgtttcacatatactcctggctccccatttcactcaaagtaaaagccaaagccctagccccattacctccaactccatctttaccactttcccttgctcacttcactccggccacactggccttgctttttgtcagatatccaggtatgctcccaccatggggcctttgttccagctgccctatctgtctgaaaaaaatcttctttcagataatggcttgagtaactcccctaattcctttagatccttattcaaatttcaacttctccagaaggcttgcctgactaatttattttattctacaactgtggtggataaatgccgtacagtaaatactgtggaaataaacactatagttccccacagatccatgccttcttgccgctgctttaccttttgttcttgcacttaccattttctaacatattatatacattttgcttactacttattgcttatctctccctgctagaatataagctccacaaagatagagatctttgtctgctttgctccatgatataccaaggatttagaacagtgcctggcccaagtgctccataaatatttgttgaattgaattccttggtaggtagctataaacatagcagatacactaaggctttctctatgcaatataaaatgtctctcagagaaattcatggcactaaaagcatatataagaaaagaagaaaattatcggatcaataatctaagctcacattcaagaacctagaaaaagcgaataaaataaacacaaagcaaatgaaggaaatataacaaagggcagaaatcaatgaaagtgaaaaacaaagaatagagaaaattaacaaaactaagagctggttctttgaaaagatcggtaaaactgataaacctctagcaggactgagaaagaaaaaagataaaagacacaactttctaatatcaggaatgaaataggagataccattacagaccctgcagacatctaaaggataataaaggcatactaaaaacaactctatacacataaatttgacaacttagtttaaatagagcaattccttgaaaaatgcaaccacaagtcacccaatatgaaatagatcatttgaagagccctataggctgggtgctgtggctcatgcctgtaatctcagcactttgggaggctgaggcaggaggattacttgagcccaggagttcacggccagcctggacaaaaagtaagaccccatctctacaaaaaaatttttttaattagccaagcgtggtgatgtgtacctgtagtcccagctacttggtaggctgaggtgggaggaaggcctgagcctaggaggttgaactgcagtgagctgtgattgcaccaccacattccagcctgggcaacagagtgggacccttctcaaaaaaaaaaaaagaaagaaagaaagaaaagaaaagtactataactattaaagaaattcacttacttgtaagaacrgctgaaataaaaaatagcccccaaatgctgctaaggatgaagaaaagacaaatcactcatacattgctggtggaaagtaaaatgggacagccactctgacagtttggcaatttctttaaaagctaaacatgtgactaccatacaacccagcaattgcacccctgggcatttatctcagacaaatgaagacttacattcacacaaaaatctgtacatgaatatttatagcagctttatttgtaataccaaaaactggaagcaatccagatatacttcaatgagtgaatagtttaaaaattgagtacatctatattgtggaatattactcaacaataaaaaagaacacattatcaatgcatgcaaaacctggatgaatcgccagagaattatgctgaatgaaaaaaaaggccaaaaatttacacattgtgtgattccatttttgaaacgttcttcagatgacaaaattatagaaacaaagaacatatgtggctaccagggtaacagagtaggtggggtgggggggtaggaggatggtgggtatgattataaaagggcagcatgggatatcctatgatgttagaaatgttctgtatcaatatcagtatgctggttgtggttctgtattataagtttgtaagatgtttaccattaggggtaattgggtaaaggatataaggtatctttttgtattacttcttacaactatgtataaatttaaaattatctaaaaattaaaagtttaattaaaaatctttctcccaacagactttatttaattatggttgtttcatgggagaagagaaacactttattaaatttaatcattgattataaaattgcacctaaatttcaaaaatgtgaaaaatgagaaagtacaacttagaaactaggaaatatattaagtatgcatatttatttgtataattatttgcatcagaaatagggaaccatttaggagaggaaaagacaacaaagtcttcctaacagtgattatctctaaatggtagaattatgggcatttttttttagcttatctgcattttcttattttctacagtaaacacatattactgacataattttaaagaaacwtgatattttaaagatgttatttagaccaacccttaatccattgcttgaaaacctgcaatgaatcctcaaataattagtcacttcagtctttaataccatagaaaccaatagctcccaaagcagcccaggcagctctaattatttgaaatgagagctgttgaaagcaaaggtctgcactgcctgtgccattagggggtttaaggatatgggtttgatcccagcacaggtcaattaactctgcttattcgtagaggaaaatggtaaaggtacactgcctgcatggctcacaagggacagtcactactcaaacactgtccacaagagacacaaacacgtgaaagtaaacaggcatctcaaatccatttctgctaagcacctcttctcatactggacaatttctcatttcctcaagtggtcagcaggaaacaaacagattgtaaaatagttgttacaatcaatagccaggaataaaagcgtaaaaagcaatcccatctccaaatgaaattctaaatccccattaaatactttaatgtcaacctaacaagaactaaaaagaaaactctaaaaccataatgacacaataaaggtaatcagactggatgcatagccatctttgcttgtaactggaaagattacataaatgacataataacactttccatattaattcatagatttaatgcaatgataattaatggggcattaagagttttataaaccagaacttgacataataattgtaaaatgctcatgaatacagccaggcccggtggctcacacctgtaatcccagcactttgggaggccagtatgtgggcagatacttgagtccaggagtttgagaccagtctctaaaactacaaaaattagccgggctactcgggaggctgggatgggaggatcgcttgagcccaggaggcagaggcttcagtgagccctgatcatgcccctgcactccagcctgggtggcagagtgagaccctgtctcaaaaaaaaaaaaaatgctcatgaatagaagcatatttattcacgaaggaaaaaagataatgttgtagaactctttcatggatttaaaaatattgtactgttataaagcagcaataatcaaaactctttggcagttccattgaaattgaaggagctgttctgagccagtatggtaaaggaaaatgttaggaaagatgtctgggctaaagaccattgaggtctgggctaaagaccattgaggcaccattgggtgccttggaaaggttttttggtttgcaagacacagagacctccttcaaagtagctcatgtacaagggggaaaaaaagctataacaagctttctcaattcatctaatgacagtaacagagaacagctggacctcactgctctgaaactatgaaccatggcaactctcttcatatctcaagaattcttcatggtcctgctccctgagatctaagcactagctgggggacacctcatcccacctcccacagtctcaggccctgaagcagtggtagctctggaggatgttcatagcattggctcacttttgttctcccagtcttaaaggtagaagcggcttcctgaaatatgaatctttggttttcctagcttcctctttttgcttttccagctttccaacacctgtgtaagaaatyccatgaattaaatcccttctgtttaaggtatctagagtgatttctaatttcctgattagaccctgattgatacattgttagcttcaacactgccctttatttcgtttagtttwkagtttagtttagtttagtttagtttagtttagtttagtttagtttartttagtttagtttagtttaggactagagtgcacaaatcataagctgttgtccttttgtgcaggtatccacctctgtgcccccaaaaacagcgcagggcatggctacattgagcagatagtctatcatcccacactttctgatgcagctgagactaggacagtccaggtggagttgggaatgggtgggtaggtaacatgagagtgaggagggttgacaattgaggaaggactacaaagagatttgagaagaattatacaaacacacaaaggagaaaatctgttaccagaaatccagaaagaaatcagtgacactagtcactgtggtaaccagctgactgcaaaagccaaaggcagatgcagttgtagttacaggaaatagattccaggaacaggaccaatacagactgggataggagagttaggcatttcaggcacattagcaggcaactatgtggagatgtatagatagtggactggacagtctcaggtaatgttataaagcagcaatgatcaaagctcagttcaacggatattgaaggagctgttttgagtcagcatggtgaaggaaaatgccacataaagagagcaaatgcaatctatctgagttttcccataatgtgacatattcccaaccttcctcttctttttattttctaaataattgtgatttatttagcagttaatatttttatgttcattttatttagtttctccttttctaagcaacgaagtgatatgtgttcattgtgatacatattaaaatattcatatacatgaaaagaaaaatattatgttcatctgtaatccaatcatccaaggttaactgctgttaaaattttcctttcatatattttatgcttgcatatcgtatgtatgtacctatgattatatgcctatattttaaaaccaaaattattccactgttcctgtttcataccatacagcttctgtgtacagaagctgtcagcttgacagagtaatgaaatcgccttctgcaggtgcaactgaggtgctactttataggtgataccctgcaaagatagagtgatatcttccaggatgcagcatacactctaaatctaccatcattatatgggcatgtgttctcaataggtacaacacataagtctgggaaccaaaagtaagaagtaggagtggccctgggccctgcttaccatcgctcacagtgatccacttgtgttatttgtgcttcttatccctgcaaccctgggatttgtgggtttggaggtcctggtgattgactggtacatctcttggtatcactttgcccaattttgatggtaaatggaggcaggagcagcagccatggcccaagaaggacatagtaaccagaaacccaccaggtaaaccacctggatggcagagctgagggtgagtgaagctaaaatgggttgtagaacaggaacacaatgagtatcagtggcaactttcagaccagaggtcagtaacaaggttctagtttaccccactaactttctgcttgtaagtttacccagaaaaaagagtctaaccaggatactggaggaactgttcctggaacttgtgcaaaattagtagatccaacacaaagcrttggctgtaatgaatgctgtggtttgccactcagatcccctggttggattaaggcagtcattcccacaactactaggaatattggccactgatagctctcatataatttatctcctgataattgttttcagctaaagagagtcaccttgcccaagttcataggtagcccatatctaataactagtccatgcccaggtattaaggcccagccttctttgcttcaaagcaggacaactccagagctccctgtaggattggccaagagacctttgttgtgaccctactgcagtttaacttcttctagccaatcctacttccttcactctttccctgatattgaatccctaggcactctccaataaactccctgcctgcaaatatccatctcagagtctatttctagggaactcaggatacaacagttatattcattttttgtgtttatattttaacagaagacactaacacttaaagctctaagcatttgactgtataaagatattaagaatccctgggtcatctttgtctgtaaagttcatttacctcaccagcagcatggacaccttgtttccttgcaacccagccctccttgcatgtgmtaaataccaaaagcagccagcctttcagttctgcttccgtctagtggtcattttctatccccttctgctctctggttgtgttaagtcctgagcttttccatcccatccttccagaaagccactagtcccactagctgtcacttatctgcccgcacccattgtgaactaagttccggatgctgagggttgtgggaatctctccagtgttgccaggaggaagggaactaaaattcctctggctagcagtcaccatcttgtttctctatttctttcctttgcccttttctctcatgattagaaagttccttccttaacccactacatcttcaacttctgcttcccattgggatttcaacaccttttcacagcaaatccttgtattcgtgatttacaccttccaatttctgaattataaagctgtaaatggaaagtaagttctttgcttcctttcttttttgtttccttctctccttccttcagcaaatttcttgctcactaactctgagtcatctcttaagtaaaggtaggctatacctatgcttatttaaggttattaaatgtgatattaaggacacaactattccctctcaaaacttccccaggggccaaggttggcagcaaattggtggtctggctgagtcttgcagcacatcccacttgaccaacaacccagagctcatgcccttggatggagagtttattaacagcattctctttgtgtaggaacgcctccaagttttgtaaaggcccactatatttcgtgtagtaatgtggaatgttcctaaccagtagatttctatcaaccagccagtcttcaaagaccaactggacagggaggatggaaaccacaacctagccccctcccagtggctcctttaagacaccaggccctcctgtgcacttctaaatcaaaaaccacataaaattggatcttctctgtcctcacattgttgttgaccttagtcctaaagcctggacacacatctcaacttttccccaacctccaggtttctgatcttgcaattcgttctcccatttatagccttgcttctccctcagggaatagcttgggtcagtagagggaactacagctcctctttagcacattatctcaaagcagagtcttttcaaacagggaaatgtagagagaaggtagacaaagattgtgacttttatttattattgttttttaatttttttagagacaggagcttactctgttgcccagactggattgcagtggcacaatcatagctcactgcagccttgatctcctaggctcaagtgatcctgtctcagcctttctagcagctgggactacagatgtgtgccaccatgcacagtatttttttttttttttttttttttgtgcagatgggctctcactaccttgctcaggccagtctsgagctcctgtccttaagcagtccccccaccgtggcctccctgagtgctgggattacagccgtgagccaccatgccaaggtagattgtgacttttaatatgattatccttccacttgcagaaactttcttgtttttgctcatcgtttgtatttgactatcggcaccatttctctggctttgacttcaaacttttgttttgctcctgaatcaggattcagattcactcatactgggacaaatcagagaaagctgaaagaaggacgataaatagcaccatggaaccctggacaattctgcaattggaggcaccagatgtctctgaagatggaattgtggggtgtaggtagaaagaaaagattatttgaaagctttataatgacygtttagatccccagatcttcttcccaacatactattgtcaaatgactgctcttctgttacccaggaaaaagcctgaaggtttattctcatgaaaggctgggtcaaacgctctgggcagtatatgctagacacaactgaaaacaagggatttaaatggaagtctacagactgaatgatgaattccctcacccctctaggagtgaggggaaaacagagaactagaaatagcttttagaaataaaaatgtgatagcagaaattttaaaattgagtagaaaaattaaaagatggccaggcacgttggctcacgcctgtaatcccagcactttggggggccgaggtgggcggatcacgaagtcaagagatcgagaccatcctggccaacatggtgaaaccccgtttctactaaaaatacaaaaattagctgggtgtggtggtgcgcttgtgcacctgtagtcccagctactctggaggctaaggcaggagaatcacttgaacctgggaggcggaggttgcagtgagccgagatcacactactgcactccagcctggtgacagagtgagactccgtctcaaaaaaaagaaaaattaaaagataaagttaaaaaaatctcccagaagaaaaaggaaagataagaaacctagaaagtcagttcaggtgatccaacaactgaatcaggagttctagaaagaatgagcagggtgcagtcgcttatgcctggattcccagaactttgggaggccaaggcaagaggatcacttgaggccaggagtttgagactggtctgggcaacacagtgatacccccatctctacaaaaaatagaaataaaaaaagtagctgggtatgcacctgtagttcccactgcttggaaggctgatgtggaaggattgcttgagcccaggagttggaggcgacagtgagccatgattgctccactgtaccctagcctgggcaacagagcaagtcccccagttctatagatttaaaagtaaaatgtcaaaaacattctatggagaaaagatagtcttccaacaaatagtgctagagcaactggatgtctataggcaaaataatgaacttcaacctaaacttcacaccctatagaaaaactaactcaaaatggataacagatttaaaagtaaaatgtcaaaaaaattttttctcaagagtaagcagagaaagtggaggggagggaattactaaaataagatgcctgaagctgatatggccttttaaaaaagaatacacatggtagtttctcaaagctgaaggaaatgtgttttcagatttaaaaggcctattgtgttgacgttcattcctcatacagaatgaaaaaggacactattctaaggtgtatcatcatgaaacattaaaaaaagaagattccaaaactttccagagaggaggggaaaaaaccctttcatgtcccgtaggaaatattattaatgtaaaacatatcaacagcaacatggaaagttagaagacaaagaagtaatgcctttagaattctgagagaaaatttttccaacctagaagtctatactcagactttcactcaagtgcaatgctaaatttaaaacattttcagtcatgctaggtctcaaagaaatacacattccataaactttttctcaggaagctattgcaggataagctccaccaaacccagtgagtaaaccaaaaggaatataggagatctaaggaaacaggagatccaacaaaagggggatgtggaggaattcccaaaatgatgaaaagggggcatctcaaacagctggagagctgccctggacagcaacaacccagaccagagccggacaaggaaggtccccagggtgacatccagaagagaagtcagtgagaaaacaaaactgatagaaggagagatttataattctgttagagggctagggagaaattagtgattaattcatgaacattgatgttttaaaaagacaattattaactaaagggaaaacaaaatgattgtatcagatatgaagtgaacatcaagcagttcatctgtgaacaatattttcttaggcctaataatttaaacactgaaattgtgatgtaatgggaggatggggataggtgaagggtttatgttggagagggtggtagaagaaaactagatcctaaccaccatagtaggaaatcaagagatgatatctaaaactgaaaagtcaagagagaaaaagtacaagcaccagaagaaatggctaaagatgtgactacagttagctgtgtggagcaaaacacagaggtggggaagagtgagcaaaatactgtttctttttgttgttaaaagccttggatttgactttttatgctatgtgcttatatattttttcttttatttttattcctctagatatgatgcctgaagaattcttgtatgtttctattttttaaaagactaaagcaaaaaaaattttaaagaggaaataagagagaagggaaaattagggtagaaaaaaataagatgaagtcagaagtaatgcacatcatccagtacacatcattgctaaagataggctgaaaatttggttctgagctttttagcagcaagcataaagtgggaaatgtaattgtttacatggtttcacaatgtccaagagataaaaacaaaccacttactcaggagaaatatagctattcctggtactgcgatctgagagacagttctcccatctgttctcctaaagaggacacatgtgacgtagtgaaccacatcctccttaacttgccaacagtaaatgcaacaataagtttcatagagctgtttcttgtcatgtctctcaacataggtgaatggcaaaatgccaatgcagtgctcagtaaaagcaactctatgaagaaataaaaatctgtttagagaggcaataaagcatagtagtaagagtgttggcctgggttccaaatctatctgtcaaacaagttacttaactactttgtactcagtcttctcatcgataaaactggtctaataataccatctcatagaattttgtgagttatgcatgtgaagtacttagaacaatgcctggcatatataagcactaaaaaaatccgtttaaaaaatccacttttaaaaaaagtgaatcttacatgttaaggctactgtaaagaaaacagtgtgatattgatggagagatagacacatagatcagtgaaatataatagagaaatatatcacacaagtatagccaaccgattttcaacaatgttgcaaaaaaaaattcaatggagaaaagatagtcttccaataaatagtgctagagcaactggatgtcaataggcaaaataatgaacttcaacctaaacttcacaccctatagaaaaactaactcaaaatggataacagatttaaaagtaaaatgtcacactataaaatgttttcacaaaaacaaaggagaaaaccttcaggacttagggcaatgtgaagagttcctcaacatgatacccagaaatgatccttaagagaaaaattgataaattagacttcatcaaacttaaaacttttgctctgtaaaatatcacattaagagaatgaagacagacacaggctgaaagaaggtgtctgcaaaccaaaaaccactgcagaaaatatagtaaaccaaacatctgacaaaggaccataaagaacactcaaaaatcaacatcaaggaaacaatctaattagaaaataggtaaaagacatgaaaatatatttctgcaaagaggatatacaaatggcaaataagcaaataaaatatgttcaatgtcattagccattaggaagatgcaaattaaaaccatgatgagatatcattatatacctattaggatggctaaaataatgacaatactaaatgcctgtggagaaaactgactctctcatatatcgctggtggtagtgtaaaatggtatagccactctgcaaaatagtttggcaatttcttaaaaatctaaacttatacttaccacatgatctagcaatcacattcctaggcatttacccagagwaatgaaaatttatgttcacacaaaaacctatacaagaatacccattgtaagtttatttgtagtagcctaaattggaaacaacccaaatgtccttcaatgggtgaatggctaaacaaactgtggtgcatctatatcatggaatactactcagtaataaaaagaaacaatctattagtacatgcaacaatttgtatgagtctcaagaaaattatgctgagtgaaaaaaaaaagccaatctcaaaggttggatattgtatgatttcatttatctaacattcctaaaatgataaaattacagagatgaagaacagattagtggcactagggatgggttgggggcagtacaggtgtgaccatagagaggtagcatttgggatatttgtagtaataaaacagttctgtatcttgacttttactgttgttacatcaatttactacatgtgatgaaattgcatagaactacacacacacacgagtataggtaaaaactggtgaaatttgaataaattcaatggattgtaccaatataaatttcctgaatttaatattgtactatagttatgtaagatgttaccattgggggaaacaggataaagggtacacagaacgtccctgtactatgaatttcctatgaatctataataattttaaaataaaaagtttccaaaaaaatgtatcttataaaaaatgttataggctgggtgtaatggctcacacctgtaatcccagcactttgggaagccaaggcaggaagatcgcttgagcccaggaattcgagatcagcctgggcaacattggaagaactcatctctacaaaaagtaaaaagttagctgggtgtcgtgatgcatgccttagtcccagctaatagggaggctgaggtgtagggattgctcgagcccaggaaattgtggctgcagtgagctatgataatagcactactacactccagcctgggtgataaagccagaccctgtctcaaaaaaaaaaaaaaaaaaaaagttatataagctctataataaaacttcattaattagggattaaagtttacctttatttaacaaactgtgtattgtataaaattagaattaaacatttgggatgttggtagaaattatagaaattcatcaagttttgctcttgcaaaacttggtgaaggcaaaggggcccagggggactctaatgcagatgctcactgcttcaagaaggcaagtagcatattttcaagagttgttaaagaatagcacttattaccatagagtaattgtcttgcccttatcttttcaggttcaaaattttgatttcctagcatgaattcatattaactgagctcacaggactgatgtactatgtgtgacaatctcagccgcaatttcagatgtgcaagaaaaaaacaagtttctctctcttctttaaatcaacttattttgaactccacatccccatcatatgagctggagagaaattcagcctaagtaattccttgccaaggcactgttggtctggttactgtccagacacccactgttgtagtctgaagggcactctcaggagtagagactgtggcttttgtgatgcttcggactcgggaacttttcgtgctgaggatccagcctccatgggcactccaattgctctctgaggtcttgctatctttctgtgctctgacatctcaccctctccagcctcagggaaactcctagagaagcctctttcctctctaagatcatttctgtctcaaccctccaagaaatccagcaacatctagtcaatcagcttagcttttccagagctgaggaaaaccactaacttgaagctgcttctaatttttgtcctgccaacattcttattwtaagaaattataaagcctcactaccttgtgaaatgcagagaagaggaaaatatagagaggataaaataaaattaatattttaacaaattaccctaccaaactacaaaagccactttattaatttgcaataaatgtcacagcaatgggttacatccatatggctagcccactgtcccctctttaaagtagactttcatgatcctccttagactgttgcttggtgaacatgaagcagagccagaggctttagaatagttcaacatttaaagggatcaggttatcagagtctgatgtattaatcccacaatagggacattcacatcatggtaggggagctgggaacactggaagttcattggctatgatctcccaaatccatgtttactttgaaaatgtccttgtctgtggagctgcaatcgtcagaggcatttggctggctgggactctcttccccctgacagcacttggatgaacactgtcaacatttgtcctggaggccgtcttttttctatgcctcaacagctcaccaccccttccatcaaataacaggccaattctgctgaccaaatatccatgtctcttcaggatgattttgcatagatctgttccagtaaattacgtagggactctaaatttgaactctgaaagccatataatttctttgcttttgggttagccttcctgtacccatcacatcctgataatggcatatataaaacaaattatattagatcttcaatctaggattcaaaacaccagaagcatccaagcaaagaaactgtcttaagaaacttaaaaataattatacatcaaaaattacatcattatagtatttgaagactagttaattgcggcatgtatgataatagtgaaatctgctagatgcaaatgacacaacagtaatgtcactgaagtcagatttttaagtgttgagttcatgcactgtgctgtgtgctatatttagatacctaaactttagatatatcaataacctagttaggtcaagcaagtccatgacatttccccactctttgcatagaaataatggacgttctaatgaaagtatgatactccaaatttgcaaaaggcttaaatgcaatcttgatggtaattcctcacatatatatgtgtatatatacacacatgaagaattatcctattttcttccttacaggagaataagaaaatataattaataataataaattataaggttattttcccgtaaaaaaattaagaagtttcatcactcacgtcagcaaaaataacactccaactgatcccccaccctcaaactctaattagttatctggtattctctagaatccttttgcttgccttacctctcttttcaatgttttttttcttctctagttttcttaaaatgacaccttcacggtacccatcattactaataaggtcttcccaaactttgtcaattgattatgtccagtaaagccaagaaaaaataccaggcaactggctttatgagtgattttgtaataactttatctatcaagataaatagatttgctgtaacatgttagggcttctgaagtaattccactacaattttaggattccaaaggcagtatatgataaactgaagttttttaaagatcacttcaactgggttggggataaaacttagcataatatttctatcaagctgtgttttattttgatttgatttccttcagtatttttgaaacgtattaatgtttatgaaatacatgaatatatttactttgagctttgcttgcctctaactcatgcacaaggacgctttttcacgtaaacttgaaataataataataagctagttgtgttcagctctgtcctttgagatgaagagatgcagtcataaccccagagggcagtcatatggtctccattgcatctcagcatgattacaaataatgactgtgcccagaatttgttcagatgattgttttacccatgatatgttttgttaaatacagaataccagacattaggagaagatgaggctgagaagagttaacatctttcgttttgctgagataacaaagatcccatccaacatattacctactgaccccatcctcttgccattggagcagcagggcaaaatctgttcacattctcatggccccagacagagtgctggccttgagcacactgtgtgacactcatttgaccaagagaatccagtaggcacagggagagctgcctactattgccacgttgtatgaggtgacaagaatgtctcttttttttttttttttttgagatggagtctcactctgtcactcaggctggagtgcagtggcacgatctcggctcactgcaaactctgcctcccaggttcgcaccattctcctgcctcagcctcctaagtagctgggactacaggggcccgccaccatgcccggctaattttttgtatttttagtagagacagggtttcaacgtgttagccaggatggtctcgatctcctgaccttgtgatcctcctgccttggcctcccaaagtgctgggattacaggcatgagccaccacgcccggccaagaatgtctctttaggtttgatttccatttcaggaaatcacaaaatcagattgcatataatggggctcactccaagagagtagagtgagatttagaagcctttcaacctacttacaaaatgtgtacagttcccatttcactgcagatgaaacaataacaaatattgagcaaaggaggttaatccatatccagaagattttattaagttaaacaaaaaagtcatgcaggtcccaggcaataagttttatttaaaattaacagcaacctataagcacatttcatcaaaaaccataaatagatattgtaatgtatctttttcactactgactctatcatgagtctacctgaaaagaaaaaaaaaacagtaatagcaaccatcagggctttttaaaaaaatcagtatttttcataaaacaacatagcagatttcagactgatagagacctgtcataaggtgttgtctacagagcagtagcaaggcattattttctatactgaaatttagtttaacatttataacaagtatcttataaggaaatctctttattggatcttttaatcagtatagactgggtgtgagggaaagtaggtcaaaataaaatatttattacacagtcaagaaaagacaatatatttttaatttgtggcttaagatgcgaattaatttatttatgttcttggttacctatgttacatatgtctatccacatgatgtatgtgtctgtgtgatatgtatatccagtggggtgctgataaatcaactcttaaaaaaattaaatcctgatctattgcctttgctcatttccatactgtaaatatttccactatggccagtttcaagctgccaatatgatgtccctgaatatggagttgggaagagatatgcacacttgatacttgtacaccagtatctatacatatagacactactgtatctatacatgtgtatatatacatacatatgtatgtaaaagtatgtgtatacatgcacacacacacacacctgtgtgtacaggtgtgtatacaccacatacatataccaagaagtctgaagtagtgacagagactgaagccagtgtctaccttgaaatccacctctaccacctaccagtcatatgagcttgggcaaatcacttaacatttttgtgaacataataatagtacataataatagaacataataatagtaccacttactgcaatagtcctgtcccagttaaaaaataaataaatagaaaaaaagtagcacttagtaggtatgttataaatattaaattaatatctataaagtgctaacaacagtaacacataagagctatataaacatcagctattatttttgctatcattattattatctgtatatacaactctgtgtggtgtgtgtgtgtgtgtgtgtgttgtatatagtgatctctcaggatcttgcccaccagaagcagctgatgctcatctccatctcctcctctactctgggacctctgctccatctccctcctcctcccatttgcaggttcaagttagccaagtagggattaagttctgttccaatcagaatcacagtaaatctttagacctgaggcaggagctgtttttaagcaagcatcgtgtctgctctcttgcctgttttgcctccctccatcgatccctggagagctccagttaaggagtatggccctggatgtttggctacctatcctggtcccccacagagcctctgagctcctctggttgtctcttgtctattggtttctgactgatgatccctgttcagagtgtgtgtccaaatctctggaccttgaccccatgaccttgctttggcttggaatcctgaatgatgattttgctctggaccctccccagttcctatccattttttactgcactcccagttcccttcatctgtgatactttccctgaaatctataactataatgaccatttaacctggattttccagagagagtcaactttaaatattttgtccttttgactctaatgttttggcatgcaaagtatactgcccagaaaattgttaatgacgaaaagaaatacaaaattccctgaatttttaaattcacaaaatacagtcatttaaaaagatttctctaaccttctaatttccagtactgaagtgatgaccaattctaaaccagtgcccaggccctactactctaacaagctgcaccatattacatgatagaggtgatttggaaagaaggcaaagttcagaggaggacccagaaatctccttgccccagttttcaaattaatggcagatttctgccacacatccacacattccattcttatttttaaatattattttactgtatttgtgtatgcatattgtaatcatctgatatttgttgtcatttcattatgatggaaactaacaacttgagccactgttttccttcattccatctcttagtcaccatgtgtatattagcacctgtctatttaaagctttatcataaggcatgttctggtaagcacccctctaaattgaagagtgactaaatttttgcaaaatccaaaatgagtggtttgagctaggttactcccactctatatccaactgactcaatctctgctggcagcttttctgcttctccaggcattcaaaagcaaattctagaaagtagtccctctgaaaaaactttaaaatccccatttcctgggctggatgtggtggctgacacctctaattccagctctttgggaggtcaaggtgggcagattgtgaggtcaggagttcgagaccagcctggccaacatggtgaaaccctgtctctactaaaaatacgaaaattagccgggcatggtgacacacgcctgtaatcctagctacttgggaggctgaggcaggagaattgcttgaacccgagaggcagaggttgcagtgagccgagatcgtgccattgtactccagcctgggcaacagagcgagactctgtctggggggaaaaaaagccacatttccatgagagctctaaacaacaattatttctctaaagtaatgtcttctgctgaaagggaaaagcattctaacatcatttgctgtatatggttgtatgggtgctggtgttgttggggggcagggtggagaaaaaaggggagggtcacaatcaaaatcctcttttctttggaaactcctacataagcaaccctcttgcccctctctttttagaactgactcagtctagcggtttaaataaaaactctatctcttccacctaatcccctttactaaaaaaaaaaaaaagagagagagagagagagaaaggtagaattaggtaacaagagacttagagacaggaggcctgaattttaaaccagctcattcactaactctctttacaaaggtttttaacttgagcttgatggacccccccaaaggagtctagagacagaattcagggtrtgcatgaacttggaaggaaagtaaaattacattattttcactgacctctaatttaaatttagcatttccttcaggatctcccccaatctctgccctatctttcacctcttcctatgtgtaggcttagattggcacatggttcttcaattattaatgtagacaagaaatcataaagtattagcagtccttatgactttcaccagtggaaatcacagacttttttttattgctttcacatttgttgcagatatctaaaacatcacatatactaattacacttcaaaattatggtagttaatagatctactgctataccttataatttaatgtgttaattaaaaaaggaacaacatcatgtcctttgcagggacatagatggagctggaagccattatcctcagcaaactaacacaggaaaagaaaaccaaacaccgcatgttctcacttctaagtgggaactgaacaatgagaacacatggacacaggaaggggaacaacacatgctggggcctgtacgaggggaaaggaagggagagcatcaggataaatagctaatgcaagcaaggcttagtacctaggtgatgggttgataggtgcagccaaccaccatggcacacatttacctatgtaacaaacttgcacgtcctgcacgtgtatcctggtacttaaattaaattaaattttaaaaataaaataattaaacaatcacatgtatcactatatcccaaatttgtttttaatattttgataactgcatttcaatagaattggtttgctttggattcttatgtgttttattttttaaaacatctttattgagatacaagtcataaaattctccacttaaagtatacaatccactggctctaatcacagaattatgcaatcttcactataatctaagtttacagcattttttatcaccacagaaagaaacccattagctgttactctctactccactccatcttctggacttcaggacttcagttctttttaatgccaaataatattccattgtttggatttaccatattttgtttatcaatgttgatgcacgtttaggttgtttccccttcttagctattatgaataatgctgctatgaacattcatgtacaagtttttgggtggatatatgttttcaattctcttgggttattacctagaaatagaattgctgagtcatatggtaactctacattcaaacttttgaagaactgcgtgactgttttcctaagtgattacaccattttatgttactactggcagtggtttgagggtttcaatttctcaatatcctctccaacccctgtgattacgtatcttttttattgtagccatcttagtaagtataaagtggtatttcattgtagttttggtttatatttccctaatgattaatgatgttgaacatcttctatgggcttattggccatttgtatatctccttttagagaaatatctatttaataaataaaaccttagcccattctttaattgggttgtctttttattattgaactgtgagagttcttaatatattctggatataattccttaacagatgtatgatttgcaatttttttttccattctgtgggctgcctttccactttcctgatgatattatttgcaacacaaaagttattaatttaccggccgggcacggtagctcacgcctgtaatcccagcactttgagaggccaaggcgggcgggttgcttgagctcaggggtttgtgaccagcctgggcagcaaacatggcaaaaccttgtctcygcaaaaaatacgaaaattagccgggcttggtgttgtgcgcctgtggtcccagctactcaggagactgagttgggaggatcgcttgagcccaggaggtcgaggcagtgattgtgccactgcactccagcttggatgacagagcaagatcgtgtctcaaaaaagaaaaagttttattttgaggtagtacaagttattatattttcttttgttgcttgagcttttgatgtcatatttaagaagttactgcctatgtgagggttgtacaactctgtgaatatgccgaaaacttttggcataagaacactttaaatgagtgaactgtatagtacaataagtcctcaatgttgtcagtaggttcttggaaactatgactttaagcaaaaggacatataacagaaccaatatttttttctcatcattataataaaatgaagttgaactaaacagtcttattcaaggacctgatgtacattgtttcacttaaagttgcagtttccaaatacctggtaaggactttaagtgaggacttactgtatgtaaattaatttcaataaagctgttttttataaaagccaaaatggcagaaggacagagaaaaatgcagaccttggtgttattatattatttgactttctctgtacacaagccaataaatcctccttattgtttaaaaaaaaaaaagaaaccaaatcaagttttaaaattagatcatggtgatagttgcacaattctgtaaatatactaaaaccaccgaatcatgtatgctttacatgaatgaattttatggttatatgagttatatttcaataaagctatctttcaaaagacaaaagaagccactgccaaatccacagtcttaagatttactcctgttttcttaagaaactgtgtcttgctatgtagtccagactggatttgaactcctgggctcaaaggatcttctcccttcagcctccagagtagctggaactacaggcacataccactgcacctggctccattttgagttaatttttgaaatttggtgcaaggaaaggtccagcctcatgtactttattttatgctcttaaaaaccttattctggcagggcacagtggctcacgcttgtaatcccagcactttgggaggccaaggtgggtggattgcctaaactcaggagttcaaaaccagcctgggtaacagggtgaaaattagctgggtgtggtggcgggcacctataatcccagctactcgggaggctgaagcaggagaatcactcgaacctgggaggcggaggttacagtgagccgagatcttgccgcggcactccagcctgggagacagagctagactccgtctcaagaaagaaagaaaaaaatcattctgagaaggaatccattagcttcgccaacctgcaaagatggtttctggcacagaaaaagtgaagaactcttgctctagaattggaactatatatccttacttctctggaactcaggttcctgccctgtaaaatttaataggtaggattgaattgggaagtcccttccagccctgtggtgccatttattgtgcagacattgtaggtggagggcaatgactctttaataaaacacctcaggtttatgacaccagctgcttctgttatttttcttccaaaggaagccattgtctggcaatcatgggagggctcagccagagctttgtgaaatgttttagggggtagaggtgacacaataggggaaggaaacattttctattgaaaagcagtcaattgccttcaacaagttgccaacaaactggaaagttgttgggtttttttttccctgcttacagctgaatgccagcctttgaaaggtaaatagagtggtttagatgaatgggttacagatgcccccaaatgagggagaagattgtttgtacaaaattagcaggaggaaggatgccaagcatgtaactgagccatcatcattaacatcatgaaaggggaacaaaaatcaggaaaatacaatcaaatctttgcttttacaattgtaaaggtacttccacaattttataatttttattctgtaatatttacttttttaaaagttttaaccatggtatagagaatttttaatatagaattgttgggtctttttcaaaattaagtaattatagtttgcattttaaaaagctttagctattagctgtaatagctaaagctatatacaatagctgtagctataaactatttgatcattgtatgcgttataattttgcctggaatctaatcttacacagtggaaatactgataatgctcattataaaaaagcggcaatatatttgcaaaagctccattaaatatggactttcaaaaagactataggatatctgcagaaaggctagcatattcttccaaggtttataaactatccgccctgatgcatagaccatgctaaattctccatgtgtttgcaaattttccatgccatgtgttggtatcctttgaaattaacagtcctactcccttatcaagaaggaggggaactcctaagaggctcagacttgcacttttctctccctagtgcctctttctccagcttttctgccttccaaaaggtatcaagaatgtgggggaaaagagtgtgggcagtggggaagcagagtcaaggctccagagccctgccaattagttaaaggtcagcacggaagggactgtctgtgagaggacaagaaagctgaacttctcttgagccaactcaactggatggcagccaatctctatctctttcctgggccagagcagagctcccccagttctgtgtgcgcctgcacaaagacgaatatgttctgtacaaatagggtctagttttaccttaggtgaatagactgagcctgggggtcaagggacagaggacagagaggaccaaactggtgtttgctgcgtcagaagcatacaggcttatttggaaagactgaaactaaataaagacttcttattagcataggactagagttgtgaaatctggtcaaagggttttatgcaaggatgccttttatatattctcatgttaatgtggaaaagtagaaaaatacaacattttaattaggggagaaaactattgttatatataactttagaacatttttctttttttaaaaattatgctttaagttctagggtacatgttcacaacgtgcaggtttgttacatatgtatacatgtgctatgttggtgtactgcacccattaactcgtcatttacattagatatatctccgaatgctatccctccctcctccccccaccccacaacaggccctggtgtgtgatgttccccttcctgtgtccaagtgttaactttataacatttttcataccaggaacttttttttcttttacactagaacatgggagtgatactcccaagtttttgtcccccatcccaaaatgacaggggaagtaaaattmttttcacaaaaagtgtaccttttttaaaaagaacagtaagccagcattagatgacttattctaaaacaatcttcttctttaactgggcttttctgcagattttctaagaggaaaagttgatgtttaactccacatgttccttttttacgttcacaattttttttcacatttcctttctgataggagtagtattttattgttgtgtgaaaacccaattgcaatccatcaggtatcagcttttagtaaggtagtatgtgtagaactgaaaaacagacatttacctccagaaatgaagggcttttttgatctttctgcatttaggcgatctcagtttattttctggaagtgtgcgctgaaccataagcaatatcgtatctctcctgaggacgtaatgtttcctaaaagcctgtctagttcactgtgtttttcagagggaaaaatcctgaggactggatccaactgggaggagtgtcacccagggtggcctgagacaacgtagctggatggagagttccagttttcatcatcttagttgcaaaaagacaaggtcacccacagaaggcaactttgtgcatttgtgggccaggcaaatgcagagagcaagtagggaagctgaaaacaagggagtgaagatctgaacagagctgggtgggtagagagggtcaagggaaacatttcagttctgaagccacaaatggaaaccctgtgccagagtgccccttttatgttagtggtggagagaggttcctgctgcttagagtagtcacgcagcactacaggctaaatgctgcaaatctatagtgatatcaggtctatttttattctctcatttatatgtttcctttttatcttagccatataggatttttttatcctttatcttcctcctgtgggtcctgttgttgttttttttttctttgtttgtttgtttgagacggagtctcgctctgtcacccaggctggagtgcagtggcgcaatctcggctcactgcaagctccacctcccaggttcacgccattctcctgcctcagcctcctgagtagctgggactataggcgcctgccaccacgcccggctaattctgtttttgtatttttagtagagacggggtttcaccatgttagccaggatggtctccatctcctgacttcgtgatccgcccgtctcgccctcccaaagtgctgggattacaggcgtgagccaccgcacccggcccgtgggtcctgttcttaagctccactctttataactctagtttgttttggtttttaaaattatttttttcttcctttttttcctttaagagctttctaaaagctggcactttggtagatttcttttttttctttgttcacgtagtctgatctggaagccaggactttatgttggcctggatttgtcaggtctctaatcaactctgtgtaaagtggaatagcttggcaacaggcataataataataattaaaaataacagtgactgcagaactaagacatgagattcaaaaataagggggaaagtgacacagagtcataggctttcatctgaaaatatctcattccggccaactgagaagcacccttgcaaatcagttagaatatctctctgtgtagaaaaggaaagccagagagaaatgttgccttcaagtgtagtttgcctgtgtattaccttctgttgaaattcccacagacaaataagcctttgagaacccataagaaaacaatggctgccactagtaagatttccaaaggtacttttaaaacatggagtagatttgtttttctgtcccaacgacttcagagaagttcccacttaaatccatgcatggtcattttatatctgccattacatattcttgtttgctaaatgtaagtcttgtcaatgagttattttaaaaagtactttttgaaattacgcacaccccaaacaacagaactgctgtgtgtatacaaatgctctggaaaggcagaagtcaggtactgggtgtaggcacaggacagaccgcatggtctgccttggcagccctgtcctcacctgcaagctgcccacacacactcccttccaaacggtgctccctctgatgccacttggctgactgagctactgtgggaggaagcctgtgaaggggttggtggtagtgatgtgaataaatattttataaactaaacttcaagtataaaacttgatttaccctttcaaccaaattcacatgggaagtcccacttcttcttaaaaatcttggacattcaagagttaagggatatggaagctggcgtagcatggggctgtcatccaagaccagctgaaaaggcagcaggaagggtttggttctggctaggctacagacaggccatctggatgcagggaaggcctagaatgccagaagcagcttttctttttgattttagacttcatcgagtccagcctgggaaaagtctttagtttaagacccaaaccgagagtcttctttaaacagggattcaatatttgaattttatataaaacaaacatccactacacgtattctttttggcaaagaaggttggagacagcaatgtacacacaattaaacatacttagaaaaaaatgtagaccagattcactagacttataaatacataggaactatgtgtagtttttaagtaattttgctaggaataaatattgaaagattgcctgaaaaaaaatttttttatattataccccctcagttacttttatgaataattatttcgttgtttttcccatagttcacattaaaaagcaattttaggccaggcgcggtggctcacacttgtaatcccagcactttgggagtccgaggcaggcggatcacttgaggccaggagttcgagaccagcctggccaacatggcaaaaccccatctctactaaaaatacaaaagttagccaggtgtggcagtgcacatctgtaatttcagctactggggaggctgaggcatgagaatcacttgaacctgggagatggaagttgcagggagctgagatcatggcactgcactccagcctgggtgacaaagtgatactctgtctaaaaaaaaaaaaaaaagggtaattttaccacattaaaattgcctttaggtctttaaaataattttccttctctatttttattttatatttaataatgttatatttataattaatcacattaggcatgatgttagcatgggccaggaaatttttytttagtgaaactgaaaaaaaaaaaaaaccctgcagggaagttatagcaacttcctactctgtatcattcatgaacatacactcagtttggaaaccaccctctttaaaagatatgatctattcttccttagttattgcagtatgcgtttgatttgtatgtgttattcttaacaattaaaggaaaaggtgaatgtaaattcacttggacaaaacaggaataaaagaatattatccttaagggaagtcttaccttaaagaagagaaaatgcacgtatttttctgggcgagggtggtggggtcagggaggaagaattgttttttctaaataaggcattaatcgccacctagcagtagaggaaggaactgcgcacttagtttgccactgaaattctagaaaacattagttttaaaggacatattacttttattgtaaacaatatcttaggaattattggtctattggcagactaaggattgaattttttctctcttgtcttgaggaaagataaagaaataaaacaaatgaaaatatttggcctatttgtaagcatactccttccatcataaaatgtctgttctcttgttgccgttgccactccagcaacaagctaaaggaaaagaaattctgaagccatcatgacacgaaaaaatgttgcctttggcagggcgcggtggctcacgcctgtaatcccagcacttcgggaggccgaggcgggcggatcacgaggtcaggagattgagaccatcctggctaacacagtgaaaccccatctctactaaaaatagaaaaacaaaattagcctggcgtggtggcgggcgcctgtagtcccagctactcgggaggctgaggcaggagaatggcatgaactcaggaggcggagcttgcgataagccgagatcgtgccactgcactccagcctgggcgacagagcgagactccgtctcaaaaataaaaataaaaaaaaawttttttaaatgctgcctttgtcctattagaggaagaaatatctgagtttttttgtttgtttttctgtttgtttgttttttggagtcggagtctcgctctttcgcccaggctggagtgcagtggcaagatctctgctcactgcaacctccacctcccgggttcaagcgattctcttgcctcagcctcctgagtagttgggattacaggcgctcaccaccaagcccggctaatgtttgtatttttagtaaagacggggtttcgccatgttggtcaggctggtttcgaattcttgaccgcaggtgatccgcccccctcggcctcccaaagtgctgggattacaggcgtgagccacctcgcgcggcctaagagaggtttattttgaaaatgagaagacattggccgggattagtaataacagttattattgttagtaataatgcttagtatatagtaaggtgatcaacaaatattttttgaaggaatgagaaatgtctggctccaaaacctgtgcttttcactattaccttctatgcatatatattggtggctgaaagtgcttggctggacacttcagagtggctcttatataaaagccctacttgtggaccaacaaaagagatatttggtttcttggggttttaatggctttcaactcctcgaagcatgatttggggatttggatcaggatacaccctgattcttaaccagtatttgcaaaattgatcaatagaggtatcttgcaggaagaatggaacagaaaaacaacactaattctccaatttaaagaccattattagttatttcaggattttttagaataaaaaaaatccaaataaaagccaaactgaaattttcccatgaatggccgggtggggtggctcatgcctgtaatcccagcactttgggaggccgaggtgggcgcatcacctgagatcgggagttcgagaccagcctgaccaaaatggagaaacccccgtctctactaaaaatacaaaaattagccgggtgtggtggcgcatgcttgtaatcccagctactcgggaagctgaggcaggagaacctcttgaaccctggaggcggaggttgcagtgagccgagatcgtgccattgcactctagcctaggcaacaagagcaaaactccgtctcaaaaaaaaaaaaaaaagaaagaaagaaaaagaaattttcccatgaacatgtaagattcattgttactcaactatctagatgacagtctgtaataattgcttaatttctggaaaaaaatatttctaaacaactcaagtgtgccatggcttttgtacaggcctctcttttagtcacacactgagggaggaaaattatattatacagtttagatataactctaaattgttattcttcccaattatgtctattaattccagattgctctattccaagtgttagctgttgccagaaaaaaaaaaaaaccttagcttctgaataaccagttaaaaataaaaagcttctaaaataccaggggtttttttgtttgttttttgtttttgtttttcctgagatggagtctcgttctgtcgcccaagctggattgcagtggtgcaatctcggcccactgcaacytctgcctcctgggttcaagcaattctcctgcctcagcctcccgagtagctgggattacaggcgtctgccaccatgcccgctaattttgtatttttagtagagacggggttttgccatgttggccaggctggtcttgaattcctgatctcaggagatctgcctgcctcccaaagtgctgggattacaggcgtgagccaccgcacctggcctccyataagcaggtttgtttgtttttttaatttttttaaatatgcatatgtacacacgatgtatatacatgttacacatattggaaaatatattctcaggatattctcccttctccagatggatagtattgaaagggaaaaaacacagtaattaaaaaaaaaatggtcagcacagtggctcactcctgtagacccagctactctagaggctgaggcaggagagttgcttgagcccaggagtgaactttgatcacaccactgcactccagcctgggcaacagagcaaaagcctgtcctaaaaataaacaaataaattaaaattaaaattttaaaaaggtgggagtgggtgcagataaggctagtttaaagcaagctgtttaaaggctatcaaatattagtcaaataaattatgaaacatttatatgatgtaataccttatagctatacagacatttaaagcatgtgacatgaagaaatgttcgtggtttaatgtttacatagaaaagcaggtttaaaaagaatcatatataatttgatacaaattttttgtggcagtttattttgagatattaatttttattttattttatttatgtatgtatgtatgtatgtatttttgaggcagagttttgctcttgttgcccagtctggagtgcagtggcacaatttcggctcactgcaacctccacctcctgggttcaagtgattctcctgcctcagcttcccaagtagctggggttacagacatgcacctccatgcccggctaattttgtatttttagtagagatggggatttcactattttggtcaggctggtctcaaactcctgacctcaggtgatccaccctcctcagcctcccaaagtgctgggattacaggcatgagccactgcgcccagccttgagatattaattttatgtgttctcctatcctactacccctttctcccattcaagcaagtatctagacttcagatttttgtaaggcaaaaagcaaacactgctcagaaataccataggctctgtcttgtgaaatgagaagagggaggtgaaagagggattcctcaaaagttagaagtctgggccaagctcagtggctcatgcctgtaatcccagcactttgggaggctgagctgggtagatggctcgagcccaggagttcaagacctgcctgggcaacatagtgagaccccgtttctattaaaaaaaaaaagaaaagaaaagaaaaaagaaaaaaacttagaagtctgaagcctatagtttgagtgaatagctaagattcccatcttgttctgtaacaaagcccagatagtggcaaaacctcaaagaggaaagccacatggggtaccttaggaagctgtacttgggtgcaggggctgccacattcacttacttgattccagattcttgagtaccaacagtggtaaagaaatatgagagtcaccagtctgaagtgaagatggcacaaaagggaatcccagcaccaaatcaatgtggagagatgaccaagtaatttgagataattccaggtacttctataataattcaagccctagaaactttgtacaaccctggatggagaggaaatgctcaatgataactaaggtagaatttctcaccagcatggcaggatgggagctcaggcttagattcaagtggacctaaagaaatgcagtatttatttctatgaaataagaatcatatacacaatatgcatatgtacacacgatgtatatacatgttacacatattggaaaatatattctcaggatattctcccttctctagatggatagtattgaaggggaaaaaacacagtaagtttcactacctagtacaatatagtaatttatcatattgtctttttttagcagctatttttagattttttttaaatttttttttttgagacagagtcttgctctgtcacccaggctggagtacagtggcagatgtcggctcacctgcaacctccacctccttggttcaagcaattcttatgcctcagcctcccaagaagctggggtttcgccatgttggtcaaggtggtctccaactcctgacctcaagtggtctgcccgccttggcctcccagagtgctgggattacaggcatgagccacctagcctggccaatcatattgtctttattgaaaaaaaatcttcaatgtatatccccctttttttttttttttgagayggagtctcgctctgtcacccaggctggagtgcagtggcacaatctcggctcactgcaacctctgcctcccaggttcaagcaattcttctgcctcagcctcccgagtagctgggactacaggcatgtgccactacgccgggctaagttttgtatttttagtagaggtggggtttcaccattttggccaggctgatctcgaactcctgatctcaggagatctgcccgccttggcctcccaaagtgctgggattacaggcgtgagccaccgcacctggcctcccttttttaattagaaaaaatgtatattataaaaccagctgtaagctgtttttcctatatatttgaacaggtcgaaaatagggaagggcatagataataaacttaggttctattttccagctgttttagacctattgatattaacatttccagaagtataatacaaacttaatgtcaaaaaaagatgaggatttttttttttcacagaaaaaagtattggataactcctgtaccctgaaaaaaattaaaatggtattatattagtcagagtctcagcaagaatcagatgcactctccaaaggggtaactgaagagagtataatcagaatgtgggcaggggaacagcaagtggtaatgcagtaccactgccaacctgtggccaacatggagcgggagaaggtaatacataatctgatatctctttcctattgctttctgatctactagtgtcttccattagctgagcccaaccaggagctagagaggaagggatcttactgatgcaatctataaaagattaaagtaccatagaatactatacagccataaaaaatacaggaggctgggcttggtggctcattcctgtaatcccagcactttgggaggtgaagacaggcggatcacttgagctcaggagttcaagaccagcttgggcaacatggcaaagccccatctctacaaaaaatacaaaaattaggtgggtgtggtggcacagaactgtgatcccagctactcaggctgaggtagagggatcacttgaacccaggaggtcgaggctacggtgagctaagttcgcgccattgcactctagcctgggagacagaatgagaccctatctctaaaaccaaaaggaaaacacaaaatcatgtcctttgcagtaacatggatggagctggaggccattatcctaagtgaactaacacaggaacagaaaaccaaataccacatgttctcacttataaatgcgagctgaacattgagtacatatggacacaaagatgggaacaatagaccccagggtcgatttgagtggagggagtggaagaagggcctattgggtactatgctcactatgtgcatgatgaaatcatttgtacaccaaagttcaacaacacgcaatctacccatgtaataaacatgcacatgtaccctctgaatctaaaataaaagttgaaaaaaggaaaaaaaagggtgaagtatatctatagggttatcagagaatatctagcacaatgacaaagtataagcaattccacaattttcctataaatatttccagataaaactatctactagaagagtactagaaacatagagttttagacttcaacttttggtactatgtaaattatttgaaattattbctactactactagagaacttttattcattcactaatttttttttttttttttttttgagacggagtcttgacctgtcgcccaagctagagtgcagtggagtgatctcggctcactgcaacctccacctcccaggttcaagcarttctcctgcctcagcctcctaagtagctaggattacaggcgtgcaccaccgcacctggccaatttttgtatttttagtagcgacagggtttcaccatgttggtcaggctggtctcgaactcctgacctcrtgatctgcccgtcttggcctcccaaagtgctgggattacgggcatgagccactgcatccagcccactaactcttaactaaattttattgagcatcgagtcagtgtgacacattaaacatatgtacaaagataaatatgaaacattatcctccagcggctcctgatttaatgtgaggacaacatatgaacaaataagtgcaattaagctttatatgtgtagttgcattttaaaagggactctttctgtctcagtttggctgaggctccaagaaagtaaaatgccaatattctcgtattttataataaagtggaaaaccataaaaagtagaaattgcccaaaaaaggtggcaggagtggaaagggaactgtttttgcaactcttagctgtccatctacttctaattcagagactggagtttagaagattttgagagtttttggtgtgctgtgagtggacattgctttttcctcacctcacacctagggaaagaggctttaatgaaactttgatatatgatccctacacctagcaggggggtagggcaggggttgaggtcacagtggactagtgtctgactcatatctgaggaattcattcattcaatacttaatgtagcacttattaagtacaggcactgtattcgcctattctaggtataggcaaatgcagtggtgagcaaaatagataaaaattccccgcttcatggagctaacattctagtggatgagagcaagaaattttggctaattgcaaaaatgagtttgggatatggtcaaagtctgcactctcagaggcaaagccactctgtaggtatttggattagaccagggctacgagaaaggttcacaaagaaggatgagacttccacagaaaaaaagctgggagtgtagctatacatgctagctattaatattgagctgatagccagatgaaatatatttacccaagggtaagcacaagattaccagtattttctcattgggctaaggtgagagttaaggtgttaccaaagaacgcacgcataaagttacaagtgtcaactgtaaacatctgccaagctcaaagagtaccagcccttaatcacagaactgtagtagccaagttaagaatgttcttgcctgttcctctgtttgaacttgaaagaaggaaggaaacctggagttggtggtgatgatgggagttggggtgggggcagatgtggtggcgattaggagagaaattttagacagggacatagaagggaagtcaaacattttttacttgaacaaccagaaaactcatgagatttgtatcttattttattcaatgagcatgggaggattaactccaccaggtgtgttttaacatgtggagtgaaaataagttacttacaaattgcaccctatacatctatttgttcaatgtaccagttataggtgctaaacataataacacggtaagatttacacatccatgaaaaaaattttcaacttggctcttatttagaatttacttttatttgattcttttaaaagcctaacataacttaccaattacctttaattttttttttttttttttttgagacagggtctttgtcacccaggctgatcatagttcattgcaaacttgaactcctgggtgtctcatgtgtccgtgtgaagagaacaccaaacaggctttgtgtgagcaacatggctgtttatttcacctgggtgcaggcgggctgagtccraaaagagagtcagcaacgggtggtggattatcattaattagttcttaaagattttgggataggcagtggagttaagagcaatgttttaggggcagggggtggatctcacaaagtacattctcaagggtggggagaattacaaagaaccttcttaagggtgggggagattacaaagtacattgatcagttaggttggggcagaaataaatcaatggtggaacttcgtcagttaaggctattttcacttcttttgtggatcttcagttgcttcaggccatctggatgtatacgtgcaggtcactggggatatgatggcttagcttgggctcagaggcctgaccttcctgtcttcttatattaataagaaaaataaaacaaaatagtggtaaagagttggggcagcgaaaatttttgggggtggtatggagagataatgggcgatgtttcttagggctgattcaagcgggattggggcagcgtgggaacctacagtgggagagattcaactgaagaaagattttggggtaaggggtgatattgtggggttgttagaagaagcatttgtcatatagtattggtgatggcctggatgtggttttatatgaattgagaaactaaacaaaagacacaaggtccgaataaaagaaggagaaaaataggtattaaaggactaagaattgggagtactcaggatgtccaattagagagtgtccaagggggttcaacgttattgtttgcttggctggcgagtttttgggctctatccttgagtttttttatgttgtcatataccaggccagattgatttaggtaaaaatagcactcttcatttaaaaatatacagagtttccctccccctttttttttttagtagtaagtcgaggcctcagcgattttggaggaaagagaaatgcaaagccagcaattgtttgttaaagaaggattagaaacagctaggagggagtgactgagattgatagtgtggtggagatagctgggagaggtagagggtggcataagattgggaacaagaataagagtaagtataaaagtaaagaataggacttcatcagggtgaaagtattgaagtgtactttgtcactgaagatcttctatccacttaaagagagacttaagggtggcagtttgaggtaaaaccaggtgccactgaataccaagagcctgagaaactgaggtgggaaggccaaactgaggaattatgtctgacagaagggatgaaatgaccgcggtggccttctcagaccctgtgggaaaggcctctacccagccagtgaaagtgtctacgcagaccaagaggtattttagtttcctgactcgaggcatgtgagtaaagtcaatttgccagtcctgggcgggggcaaatccccgagcttgatgtgtagggaagggaaggggcctgaacaatccctgaggagtagtagaatagcagatggaacactgaaaagtgatttccctaaggatagatttccatgttggaaaggaaatgagaggttctaagaggcaggctagcagcttgcaacctacatggaagaggttatgaaatgatgatagaatagaatgggcctgtgaggctggaaggaggtattttccttggcccaagaaccatttgccttgtttgggaagagattgataggtggaagtttcagtggggcagtaggtgggagtgactgatgagaaggagaaaaactggccatgagggacagaagttggaattctagctgcttctttagctaccttatcagcataagcgttgccctgagtgatggaatctgatgccttttggtggcccttgcagtgtatgactccagcttcctttggaagtaaagcggccttgagaagagtttttattaaagaggcattaatgatggaggaccttgtgtagtgaggaaacctctttcagcccatataacagcgtggtgatgcaagatatggaaggcatattaagagtcagtataaatattgacgcgtagtccctttgcaaaggtgagggctcgagttaaggcaatgagttaggcttgctgagagatagtggaggggggcagagtggtagcctcaatgatagatgtggaagatactatagcatagcctgcctttgctggtgagtggcgattaggcctggtggaactgccatcaataagccaagtgtgatcagggtgaggaacaggaaagaaggaaacatgggaaaatggagtgaatgtcaggtgcatcagagagatacagtcatgggggtcaggtgtggtatccagaataatgtgggaggccagattgaagtccaggccaggaacaatggtaattgtgggagactcaacaaagagtgagtacagctgaaggatctggggagcagaaagtatatgcgtcaggtgtgaggaagaaaatagattttggaaattatgagagctgtagagagtgagttgagcatagtttgtgattttgagggcctctaaaagtattagggcagcggcagccactgcacggagacatgatggccagcctaaaacagtaaggtcaagttgtttggacaaaaaggctatagggtgcggtcccggtccttgtgtaagaattctgactgcacagccctgcactttggctgtgtgtaatgaaaagggttgggatgagtcagggagagctagtgtgggggcagtcactaaagctgtcttcgaggaacagaaagaggactggggaaaggatttaggatctatgggatcagctaggtttccttttgtgagtttatataatggttttgttaggatggcaaaaccaggtatccaaaggcgaaagtatccaaccatgcctggaaggaaaggagttgtcgttttgtaggtgttggggtttgagagatcagttggacacagtyggcagggagagcacgtgtgtttttatgaagagttatgctgaggtaggtaacggatggagaagaaatttgagctttggagggggatacccgatatcctttggagaataaatgttgaaggagcaggagggtgtcttgttgagaagattcaaaggaggggctacaaagtagaaggtcatcaatatattgaataaggtgagaagcagaagggtggaaagaaagtaaatcaagggaaagagcttggctgaagtaatgagggctgtccctgaagccttgcggcagcacagcccaggtaagctgctgggactgatgggtgtcagggtcagtccaggtaaaagcaaagagaggctgggacaaggggtccaggggaatagtgaaaaaagcatctttaagatcaagaaccgaatagtgagttgtggaggaaggtattgaggacaaaagagtgtacgggttgcgcactacagggtggataggcaaaacaatttggttgataaggcacagatcctgaactaacctgtaagacttgtctggtttttggacaagtaaaatgggggaattgtaaggagagtttataggttttagaagcccatgctgtaacaggcaactgataacaggctttaatcctttaaaagcgtgctgtgggatgggatattggcgttgagcggggtaagggtgattagatttttatgggatggtaaggggtgcatgatcggtcgccaaggagggagtagaggtgtcctatacttgtgaattaaggtagggagatacaaggagaggatgtgaaggaggctttgaactggggcaaaaggtggcaataaggtgtggctgtagtccaggaataatcagggaagcagataatttggttaaaatgtcttggcttaataaggaaagtgggcagttggggataactaaaaagagtgcataaaggaatgttgtccaagttgrcaccagagtgggggagttttaaggggtttagaagcctggccgtcaatacccacaacagttatggaggcaagggaaacaggcccttgaaaagaaggtaatgaggggtgggtagcctccctattgattaagaaggagacggacttaccctccactgtaagtgtgatggtccaggaggcttccgagaagattgggcagtgtcagtcttcagccgctaagccgagatctgggaaggagtcagtcagagccttggaccagagttccaggggctctgggagtggctgccaggcaagttggatagtctgatttccagtgggctcccgatttaaaatcggtgagatgttccttgggctggttggtctgaggacccgaggtcataggtggatctcttcacagagtgagggtgaggacagcggactggtctcccaaaggagtccgctgacccgggtcttcggcaccaaatgtcttacgtgtccgtgtgaagagactaccaaacaggctttgtgtgagcaacatggctgtttatttcacctgggtgcagacgggctgagtccaaaaagagagtcagcaacgggtggtggattatcattattagttcttagaggttttgggataggcagtggagttaagagcaatgttttgggggcagggggtggatctcacaaagtacattctcaagggtggggagaattacaaagaaccttcttaagggtgggggagattacaaagtacattgatcagttaggttggggcagaaataaatcaatggtggaacttcgtcagttaaggctattttcacttcttttgtgaatcttcagttgcttcaggccatctggatgtatacgtgcaggtcactggggatatgatggcttagcttgagctcagaggcctgacactgggctcatgtgatcctgtcacctcagcctctcgagtagctgggactacaggtgcatacaactacacctggctaattttctttccttcctttcttcctccctctctctctccctcccttcattttttttttttttttttttttttttgagacagggtcttgctatgttgctcaggctggtaactcctggccctaagcaattctcctgcattagcaggagaaaaaaaagtgtcgggattacaggtgtgagccactttgcctggcttccaatgacctttaaagaagtagtactatgttcgctgacctagtcttcctacaaaatatctttattgatcagtttttcagcttctgattaatgctcaagatgtatcttgaggccgggcatggtagctcatgcctataatcccagcactttgggaggcccaggcaggaggatagcttgagtccaggagtttgagaccaacctgggcaacaaagtaagaccttgtctctacaaaaaaaataaaattatctgggcatgggggtacttgcctgtagtcccagctacttgggaggctgaggtaggaggatcacttgggcccaggaggtccaggctgaagtgattgtgccattgcactccagcctgggcaacagagaaataccctgtcttaaaaaaaaaaaaaaaaaatgtatcctgagagctgaggagctgagtatggtggctcactcctgtaatttcagcactttgggaggccaaggagggaggatcactttaaggccaggcattcatgaccagcctgggcaacatagtaggaccctgtctctacaaaaaattttaaaattagccaggtatggtggtgtgcacctgtagccctagctacttgggaggctgaggcaataggatggcttgagcccaggagttcaaggttacagtgagctatgatcatgccactgtactctagcctgggctacacagctagactctgtctctaaaaaaaaagttgttgttgttgttgtttttaacgatgtatcttgagccaaatccccaaaacacacaaagaggagctgaaaatcatataaacctttaataagcccttgggactttcattcttaacaaaaaggtcaaccaaatgccccttcttttggtctacaagtagagctttgataacagccattctgaagagtacagacaattgctgtgaataaaggatgtatcgcaaagccccagatatttgcttaggaaataattatcagaaggacaggtttggagtgatagatctatcactcattcattcaacaaatgtttagtgagtgcctactatatgccaggctttgtttcaggtactaggaatatctcagtaaatttttaaaaagtcaaaaaattatgtttggatatttatgtgattccctgttgcatatttacaatgtgtgcttcaacttttatttaaactagattcagtgggtttcttttatttgtatccaaaaggccctttctataaaagtgacacagtaataagaggttaccatccctaattacaggaagctcctacaagtcagtaagaaaatgattaacacaataatatgaggaaaggaatgaagtggcaatccactaaagtaacataaacagccaagaaatacaacaaaagatttttttactagtaataaaaaactataaataaaattaaaaattaaagaaacaggttttcttttttggcctatcaaattgataaaagtaaaaagtacttataatatccagtgttggtaagaatacagagaaaactgactctcaggcagcgtagaatattaaatggatataactttttttgcaactcagccatatttatcataactgtaaatgtaagttccctttgaccccacaattctacttctatgaattcttcatcaggtaaggtaattatgcacacaataggtgtgtatgtacaagaatattcattatagtatttttatgataccaataacttggaaacaattgaattgcacactaataattaagcaaattattatatttccatacaataaaatactatgcgactattgaaaataatatagaccattacttatggacatatgatagctataactttttaagtgtattaataaaaacagtatcatcttatttttaaaaattgtatatttattacacatctgtgtgaggcatgtgactagagagatatatatggaaagaattttcaaaatgtttatgtagtatatgacaatttttaaatgagcatttatttaatcagttagcactatttataaacacttaatatgtgctacgcattgtgctaggtcctggagaaacgaaagagaacaatctattaatttaatctgttaatttagtccaccaaatcaacagtgtttttcagaaatacgacaataaccagtgttgatgaattagagaaggtaacctcatatactactgttgagagtatatgttggtaaaacatttctggagaacaatttagtactttgttttttktttttttttttttgagatggagtcgcactctgtcgcccaggctggagtgcagtggcacgatctcagctcactgcaacctccgcctcccgggttcaagcgattctcctgcctcagcctcctgaggcacgccaccacgcccggctaatttttgtatttttagtagagacggggttttaccatgttggccaggatggtccgatctcctgacctcgtgatccacccgcctctgccttccaaagtgttgggattacaagcgtgagccaccgcgcccggctttttttttttttgaaacagaatctctattgcccaggcgggctggagtgcaacggcgcgaccatggctcactgcaacctcgatctccctggctcaagagatcctcccacatcagcttcccgagtggctgggaccacaggcccatgccaacatgcccagccttttttttttttwttattcttattcttattcttattmttattattattgtagcgacgaggtcccactgtattaaaataatatagtgatctcaaactcctgggttcaagcgatcctccgccctcggcctccaatagcgmtgggattacaggcgtgagccaccacacccagtctcttttttacaaagaatataaatagccggtggatgtcagattggcagctgtttgcagagatgtcagactatttcgttatggaaagatgctctcaaaagacgaaatagataaatcgaaagaaagtgtccattttttctcagtggcctaatctgtcaggtaccatgcttggttytgggggcatagaaagacattagcgccctcatggagttcaaagtctggtggaagaaatcaatcataataacaatgaggggttaacgacaacagacccttgaaagataacatctccagggaataaggaagagcattccaaagtattttgccaaatggcaaaaaccgcagttacttttgcaccaaccttaatgcaaataaaagcatgtacacaaacaagatactcgaggaagaatacagctgacacacagaaacggatcgttatcttgtggctttcctgcagcctcgttcctttcagtcacataacaccccaaatctgtggacggttaatgagagctagtatcacccagagtcacggctgttgactcggacgactttagatgcagcccgccagcgggagaaactggagggaatccgccatacacaggaacctagaagggctacgtgacaggggctgccccgcagctctcagccgccggcactcccagccaggttttcccgccagtctcagttcctagatcttccgaggctccgcccgccgccgagcggtcggaaagttttaaggagggggaagtgttgcaagcctatcgatatctctggaatagactgcgctaccctgcgccgccgccgtcaaactcccgcagacttctctgtagatcgctgagcgatactttcggcagcacctccttgattctcagttttgctggaggccgcaaccaggcccgcgccgccaccatggtacgttgaatcccgatctctggaaggtttagggcagagctctggtgactgggggatgacgagccacctctcctgtcatccttagcgtcgcccggtgccacgaggtatgagagcctcggcagacggccgggctccggcagtgattcagcatctccggcctggccgggctaggggttatcggtagccagtgcggcctttccaccgctttcgcttcccggggagcctccgacacttcctcctcggtcagctagatgagttcgcccctcaggttccttcagtggagtagattctgagcggtccagaatagctcctagtgctgtgtatgggagaggagaagacagagacttgacttggaggcctacctgtaccaccagtgcggacttgacccccaggtttgtgttcctggacagcgtccgttttcctggtgggtccgtctatttatctctcgcctagacttcgattagaagaggcccttttcaatcattttgtccagtcacctagttgcggatgagtaagccgaggctgagaggggaagtgatggaatcagggttacaatatagggttctgggtttccagttctgtctgccattctagcactcaatctcactcccatgactattattataatagtcgtaatagccgtaatggttctatcgctgcagctatttgtgtccacctctaactttgtgaggacatttttgttcattcaatgtgaatatacagacagcacttgtacaggcataactacagtgaacattaaaaaataagtcatacatgtccctaatcataaaaacagaaagggacgtttagataaagagctgtgggagtatatgttagggggatttgggaagaaaaggagaagacttcaagaaatcgacatttaagctaccttaaagaaaargaagacttttaaccatttattagggcccaataaaagggagcagcataagcaaaaatwggcaagaaagttgattgtgaactttagtaattgagcctaaaggggttgatatggagggtgttagaataagagtttggaaaaataggacccatttagatctgcttctccctctcccacgagtttatggtaaatgtagaattggcttacatctgagtacagtagtaatcttccagtaagactgcatgaacagagtgccttaacattgaatggaaayacaagcatatttcttaatgaatgttaagagttgggatttgaaatgttcttytattaacaggtatttttttcttttacttttagtttcgaaatcagtatgacaatgatgtcactgtttggagcccccaggtaaaataatgtttttaaaccttttctgtgaagtggctttttgtggctgcaatatatttagaaacttgtgagagcgtaggcttggggaaaatggaatataattattttagacgttcttggaagttgcatttataattaaaataggtttcctgatggacctagaggacattatgttaagtgaaataagccagaaacagaaagaaaaatgtttcatgctctcacttatatgtggaatcttttgtttaaaagggcaaatatatatatagagagagtaaaacagtggttaccagggtagggggtggcagtggggaggaaaaaagaggagatacaaagtagcaaatatgtaggttgagcaagtggaaagatctaatgtacaacatgaagactacagttaataatgcaggtagtgttttgtattcaagatttttgttaaatgagtagtttatagcccttgccacagcagaggaaaatgggtaactatgtgagacaacggatgtgttcattctgcgatagtgaccctactatatatgtgtatcttataacatcatgttgcatacgttaaatatacacaagaaaatttattttaaaagaagctttcagccgggtgcagtggctcatgcctgtaatcccagcactttgggaggccaaggaaggtagattgcttgagtcttggagttcaagaccaccctgaacaacatgaaacccggactctacaagaaatacaaaaattagctgggcgtggtggtgcttgcctatagtcccagctactgtggacagtgaggtgagaggactgcttgagcctaggaggcagaggttgtactgagctgaagattgtgccactgcactccagcctgggtgacagagtgagaacctgtctcaaaaaaaaaaaaaggtctcttgattwaaaaaaaaatcagttgagatttaactgtgctcacctgatatttgaaaaccctaatttttaatttataaaagatcttctaagatgtgtgttttttgttttttttttctttagggcaggattcatcaaattgaatatgcaatggaagctgttaaacaaggttcagccacagttggtctgaaatcaaaaactcatgcagttttggttgcattgaaagtaagtacagtaataaatatgtcttcctctgtagaaaacaatgtaaatttcaccatagaaaataaggttgtaaacttatttttacatttgtctctttttttttttttttacatcttataatgtctctatttagagggcgcaatcagagcttgcagctcatcagaaaaaaattctccatgttgacaaccatattggtatctcaattgcggggcttactgctgatgctagactgttatggtaagtataatcatgaaaaataaacatcctttttgtttcataattgattagttttctcaaaaagatccagataaggtattttaggaagttgtctgccaaagttcttgtaaattaagattatgaataccttggtggttttgagtttgttattaaattttccattttttgatccctgtaggagtaactaataagattaaacattagcacttttcagaagtcactgagtaatgtgatgtttgttaatacaatgtatatcgtttgagaccctgttatgtctaagaagaacgtgatacttttgtctggtttctaaggacaagctgaaccacacttgttttctttgtgcttgttttcttcaatacatcagtatttattagacatttattttttgcaatgctcaatactggatactgcagggtatacataagtgactcagacatggatcttgtcttaagggaacttgaaggcaagtttatctataaactcaaatgtagtttatctataatataacagaaaaatttctgtgagagtctagaagagacagattatttatggttaaaaggcaatacataaatgaagagatagggctttgaaattgcacatattgagttctcaccttcaccacttagtatctgagatttggctaaatacctaaacactgaattttttccagtgttttctttatcaaggctatttttaaatgttatttatttatttttttgagatggagtctcactctcacccaggctggagtgcagtggtgtgatctcagctcactgcaacctctacctcccaggttcaagcgattctcctgcctcagcctcccgagtagctgggattacaggcacccgccaccacgcctggctaatttttgtatttttagtagagacggggtttcgccatgttggccaggctagtcttgaactcctgacctcaggtaatctgcccacctcagcctcccaaagtgctgggattataggtgtgagccactgcacccagcctatttttaaatattttaaattgcctactgtaaaccactaacacagagcctttcaggtattatgtgagtatgtgtgttgtggatggcaggtagttagctaaaactaatcttgtaaatttgtgatttgattaggaaagaaagaatataaattataagggtgggcctggcacagtggctcctacctataattctagctctttgagaagcttaaggtcaagaatttgagaccagggcaacatagtgaatccccatctctacaaaaaattttaaaacttagctgggtgtggtggcacacacctgttgtcctagctactcaaaaggctgaggtgggaggattgcttgagcctaggatttcaaggttgcagtgagctatgatagtgccactgtactctagcgtaggcaacagagtgagaccctattcttttttttttttttgagacggagtctcgcgctgtcgcccaggctagagtgcagtggtatgatctcggctcactgcaacctccgcctccagagttcaaggaattcttctgcctcagcctcccgagtagctgggactacaagcatgtgccaccacacccggctaatttttgcatttttagtagagacgaggtttcaccatattggccaggctggtctagagctcctgacctcgtgatccacctgcctcggcctcccaaagtgctgggattacaggcgtgagccacagcacctagccgagtgagaccctattcttaaaacaacagcagcagcaaaaacagtgtaaatagtaatgctatggtttaagaatttcaggctgagcatggtgtctcatgcctgtaatcccagcactctgggaggctgaagcgggtggatcacctgaggtccggagttcaagaccagcctggccaacatggtgaaaccctgtctctactaaaaataaaaaaattagctgagcgtggtggcaggcacctgtaatcccagctacttgggaggctgaggcaagagaatcgcttgaacccaggaggcagaggttgcagtgagctgagatcatgccattgcactccagcctgggcaacaagagcgaaactcagtattaaaaaaaaaaaaaaagaatttcaatttactcagccagtcccttgctctaagtcagcaatataatgacagccttaagggtttccacctactcttcaaaatggaaaatgtattatattatcaaacattttatttaacccaatctataaaatattgccatgccracacataatcaatataaaaactttattaatgagttattgcacgtttttaggtactaagtctttgaaatttggtatgttattttgtacttggtgtacatctcaattcagtctagctacttttcaagagctccatagccacatgtgattattgcctgccatattgggcagtatacttttaggcagcattgggaaatggacttaaatataagtactgaacaaatagcttggttcctgtagtcaaccatgtgatgatcagatgtgacatacgcatatactggacaaagcaacattgagaaaaaggagcatatccatttcttgtttatcttatttataggcataaattctcttctccccaatgttaaccttgcttgaatttcatcagatttaacagtgagactcagcggctagtgtccagtatctcctctagagtgcttcttatgaatagaagtaacagtggcagaaacacgtaaagatcccccctgctgtgttttccatttcttatatttgctcttttggagaaatgttagtctgctttcaagaaaaaaggacagagtagataatctttttgctggttcgagatctagaattacgacaagcttgctgacagtgggaaggataagagaagagaggttgctgtttttcttttgttcagccttctcttctctgttccataagtgctctgatacaaagattttctagagctaaaaaatgtttcagtcttttttaaaaaccttatgtggctccagagtttagcacaaaaacgcacccttgcaggcatgtctttcttaccttctgtttttcttatatggatgttatccatgtaaacgcttgraagaatttgaagtgaaatcaaacaatttagattggaatagttgtctataatttgaaattactaaactttttttgtttcttttttagtaattttatgcgtcaggagtgtttggattccagatttgtattcgatagaccactgcctgtgtctcgtcttgtatctctaattggaagcagtatcctttttatgttagcatttatggatatgaactttgaagggttttgatacttgtgttaattattaggaatataataataatatgacataggtaagattgtgaaaactttaaaacaacaaattggattgctctttcattagcctttataagcaatttatatttgctagacacaaataagcccaacttcaggaaaatcatctaagcatctttttagaggggatttaaagtttcttaatggttctagatgtcccaagaaatcctagaccccttgtatccaaaacaaatcaggttttagatgggaagaaattattttgctggcactctttcttaggttcggtagaaagtcaaacattttatattaggccaaagaaatagtgtcctattgcattatttctctggtggattatgcaacaattaaagaataagccagagacctttgttaataatgtataatttgaaaataaagacagtacttcattccttgttaaaacaagctcgttaaccagtctaagagacccagataccaacacaacgatatggccggagaccatatggtgttggtctccttattgctggttatgatgtaagttcattgaatattgttatatgttaatgattttttttaattaactagaaatttttataatttttagttcaaccaaagtaaataattatgtggtgtatttatttctatttgtaggatatgggccctcacattttccaaacctgtccatctgctaactattttgactgcagagccatgtccattggagcccgttcccaatcagctcgtacttacttggagagacatatgtctgaatttatggagtgtaagtgacagccttgctttttttttttttttttttgccttttccagtctatatagtaaataaacatagtatcctaaatgcataaaactgtaagtcttatagaaagaatttttttwaaaaaaattatgcccatgaagagtttattgtttctgtcacatatactaatcttaacttctggttaccacagtagtttcaagcacgagtagaactttttcaaaatataaatgtgttcccaaccttgaaaattcttgattcatttggtcagaagtgtgccctgtggagtggagagyggagaaccactgtactacctgccagttgtaagctctgttcacttttagttttctgtgagtcttttgttattttaagccacacagacatttctgcattagtagtccataaacaagaaataaaaaggcagtgtagttgagggagaagaaggtaaaagaggtaagatgttatgacaggacaggttttcaagtgctttgctttgcattggaaggagggtatcgggttttacatttctctttgtcatcttatctgttttctggtgacaaagcattctttggaggaaatatttggggtttagtgaatgcagagaaaaatagtttaattgacattactcaaagcaaacttgtgggatgacaataggtttaactttgggaaaagaggattccttggacaaataagcttggtaaatgctggcttaaagtttaacattgtaaattatggtaaatggwttggggtccccaaggttacccctaaatttggagatatgctaggacttaaagcgcacagcatatagttgtactcccaggtaagacttttaacaataaaataacagtacataggtggatcattaaggaaaaatacagtccagaggaatctatgtgcaggcttccttatgctctttccttcccataaggagtcacagagtacacttgcagcaatatgtatgtgatgtttctgcccagagaagctcattagaaactcagtgtccaaagtttggttcagaactgctcatatcagcaccctctgcctagcacatttcaacctggataggaaattcctaaagattgcaataaatctatagataattttggggagtactgctactttgatgatacaaagcatctgatccatgaacatggaatrtcttcatttatttaggtatttaattctttttttttttttcctgagayggggtttcactgtttttgcccaggctggagtgcaatggcgcgatctcggcttattgcaacctctgcctcccaggttcaagcaattctcctgcctcagcctcctgagtagctgggattgcaggcatgcgccaccacgcctggctaattttgtatttttagtagagacggggtttctccatgttggtcaggctggtctcaaactcccgacctcaggcgatccgcccaactgggcctcccaaagtgctgggattacaggcgtgagccaccacacccaaccaggtatttaattctttcactgatgttttgtagttttcagtgtacaaatcatatttgtcttaaagtattttattatttttggtgctgttgtgaacagarttgttttcttaatttcattgcatattattcattgcaactatatagaaatacagttgatttttatatatcaatcttatatcctgcaatcttgctgaacttgtttattagttctagtcatttttttatagattcctaagatcatgttgtctgggaatagagatagttttactttytcctttctaactgccgtggctggaacctctggtacaatgatgaatataagttgcatgaacaaaccttcttttttttgttcctaaacttaagggaaaaggttttagtcattcactgctaagattgatgttacctgtcagctttttgtagatgccctctatcagactgaagaggttcctttcaattactagtttgttttgtgtttttattatgcaaacattttaggttttatcacgtgctttttatgcatctcttggggtggttatgcaggttttctcccttccttcagtgtaactgaaaattacactgactttcagttgttaaactaacttattcttgggataaatctcacttgtatatggtatataatttttttaatgtgttgccaggttccgtttgtagtttttgttgagggttttgttttgttttgttttgtttttgcatctatattgggtctgtagttttattttcttgtgatgtttttatycttgttatcggtaatactggccacatagaataagttggagattcctttttacaatgagcaaatataaggactaggattctacagaacacattctacaaaacttggagttgtataatttatagtcgggattttgatttgacctagcaaaagagaagatcaaaatcgtaacaaaaatcatgagtcctctcattaaataaaataagaatcagcaatgtcatagaatgctattaaaagattatatgactagcattaaacttggctgtttttactgtgataaatttagtgtgtaactaaaaaccacaatttgagactgtagatttgataaataacagaagcctagcataacaatgaaattaagaaataattgttaatttattacatataggtaatttaaatgaactagttaaacatggtctgcgtgccttaagagagacgcttcctgcagaacaggacctgactacaaaggtaagtattgtcttttccaattgtagatattaacgttacagtttaaacctttattgcataaatgtaatggagtatatatrcaacattctgtaatttgggatatgattgtcttggcagattcttttcctttaagctatttgctaagtaatccaattttattttttaaacatttctttttggtacaaagcagtaaaaccagtaaatttcatgcaaaatgtccttcattattttcagcagattggcatatcttggtattatttagttaacaaaaatatatatatattgagcacctaccatgtgcaggcactttctaagcattgaaaatacagtaaacacaacaaataactttttcttcatggaacgtacatcctagtagggaaagatagacagtatatacataagtacattatatagtatattagaagaagataaatgctatgtaaaaaataaaaaagcgttaaaaggagaaagaatgaccaattggatgtaggtaggtgtaatttaaaataggtggttgaggatattctcaccaagaaaatgaaatttgaggaaaagatataaaggaggtaagtgagtatgagctatgcagatctagagcaaaattattctaggaaatacaaatgcaaaggccctagtatttaaggcaaggaggccagtagtgttgaggtcaatcatcgagaggaagaggaaaagggaagaaatcagagaggtaatggaggtcccataagccattgtggttactctgcattttactctgggtgggctgttaagagtttgagcagaggaataccatgatttggtttaggttttaaaacagtcactctgtttggcattttaacgacagattgaggctgggcgcggtggctcacgcctgtaatcccagcactttgggagaccaaggcaggtggatcacgaggtcaggagatcaagactatcctggctaacacggtgaaaccccgtctctactaaaaatacaaaaaattagccgggcttggtggcaggcgcctgtagtcccagctactcgggaggctgaggcaggagaatggcgtgaacctgggaggtggagcttgcagtgagctgagattgcgccactgcactccagcctgtccagcctgggcgacagagcgagactccgtctcaaaaaaaaaaaaaaaaaaaacaaccggtttgtgggccagccgcggtggctcacgcctgtaatcccaacactttgggaggctgaggtgagtggatcacttgagatcaggagttcgagaccagcctggccaacacgatgaaaccctgtctctattaaaaatacaaaaatcagccgggcgtggcggtgcatgcactccagcctgggtgacaaagcaaaactccatctcaaaaaaaaaaaaaacagattgtaggggtagatagatagtggggctatgggtagaaatagttttaaggctattcaggtaattatgtgagagatgatagtgattgcagcagagtgacagagttaaagatgaagagtagtggttcaattttggatatcttttgaaattacagccaaaaaagtttgctaatasatttgttatagggtgtgaggggggaatgtctccaaggttttgggcctaattaattggaatgaaagatttatgatttactgaggtgaagaagatagtgggaggaacaggttttagagtaggcgttggggaggaaggtcaggcagtcagttgcggacatgtaaaatttgaaatgcctttttgtctaattgacggtacagagtaagcagttataagcaacacgtggagttccatggagagtggtccaacctacatttcaaatttttgaagtctttatatagaaatggcatttagagtctggactggaagagattcctaaaggaattgaatagttagacaagcattgtgaggactggaccaagaacactaacctttagcaactgggagatgagtaggtgttggcaaaaaagactgagagaggtggtcaaagaagtaggaggaaaacttggaaaatgaggcatctttggaggcaaacgaataaactttcaaggaggaggggcaatgaagttgtcactgaggacctgacaaaacaggcttaatggaataataaggcaaaaacctgatagtggaatcaggagagaatgggagacgaggaattgcagatagctttttggaggatatttctgttgacggtcactctgtcactctgctccaatcgctatcatctctcacatgaattacctgaatagccttaaaactatttctacccatagccccactatctatttacccctacaatctgggtttttttttttttttttttttttttttgagatggagtggtgactggaagaggagagaaataaattgttttgttttttaagatggaagaaattacatcacatttgctgcatgattgtgagagtaatccaagtaaatttagggaagcatttatgaggaaaaataatgagaaaattgttagaacaatgtcctttaatagtacataggtggaagggttggccttaggaagttttaatgggaaaggagagaatctagggacatagctacaggaaagagtggatacagtgggaacttgtgaaagttctcttctaattgcttctgttttcgcagtaatataggaacaaggttttcagcttcaaagagcttggagaatgttagaagtgtctaaaagaaggggagcatgaatgatgtagaaatgggtatagtgggatccaggaaccactaaggcctacttgaagttaatgatcattaataaagtgagattagtcagttttataaagccattttgttatggtgattggataattattgtttaatatcaatgtgaagactttatagcctgcattatctttttaaaaaaatgtttctagataacatagatctttggagtyactcatgataatcaaaagttagtattaatattaaatctgcaaatgacaagggtccactagtttccttcttttttctcctacacataagtggtttttaaggttttattcaaatgctatataaattcttattctgcttttttcacccaatattttatcgtatgtattttttcatccaaattctcttattttacttttaccatattttacccttcagaatgtttccattggaattgttggtaaagacttggagtttacaatctatgatgatgatgatgtrtctccattcctggaaggtcttgaagaaagaccacagagaaaggcacaggtatataatcataacacaagaggctttagttctattgtaagctgctgttcttaccacaactgtgtctgtaaattttccattttgtcttaaatattgaaatggrcccataattcaaatggcaacaggaaaattaagaactgagtaaagttaaatattgaaagggcagtgatctccataaacacaaaaagggggccgggtgcggtggctcatgcctgtaatcccagcactttgggaggccgaggcgggtgaatcacgaggtcaacagatggagaccatcctggccaacatggtgaaaccccgtctctactaaaaatacaaaaattagctgggcgtcatggcatgcacctgtagtcccagctactcaggaggtgaggcaggagaatcgcttgaacccgggaggcggaggttgcagtgagctgagatcctaccactgccctccagcctgggcgacagagagagactctgtctcaaaaaaaaaaaacaaacacaaaaagggagaagtgttgattatttggttatctattgctaggtaataagctaccccaaaacttaggggctagaacaacaaacactacttctcacaattttgcggctgactggggctcacctacatggttctttgctggtctcacctgggatctctcaaacattgcagtcatttgtggggtgcaactggaacacccaagataacttcagtcacatgtcttctttactcacaccttttaggtgtcttagaggagcatctagaaggcagagacctctgctaggatgactgagcctctgtccacgtagtttcagggccgcttcttcagcagggtctctctagcatattggcaactcagggcttgcaaaagtcagaagtgaaagccgccaggcattcttaaggctgagatgcaggactggcacaacatcacttgtacacattctgttggttaaagtgagtcactggcctggcccagattctgtttgagcagagactgggagaaatgctcattgggggccagctttggacactaagatggctcttcataaagagaaaagcatcaagaagtgaatctcaggtgaaatatgggtctttttgctagatgtttagaatatacatttgctatttatagatgcttatttgatagcagtgtaattgaaagtaaaaaagaatctagtatggaaatttctacagcatgagtttttttaacttggaaaggatattgttggtactatttgggggatcaagatttgcaatatttaaactgtttttggtaaaaactagcactgttgggaagaatgctgtggaataccacaaactagtttggcaaaggggaaaagaatgtctaaaaagtgctgattgtattttaaacatagtagtgataatacaaggaaagcttttattcctgagcaatgcaaagtacgataaaatggtggaattgttcaatgatatttaggttttcagaaatgtgaaattatatatacagttatcctcgaacagtgtggggtttagtggtgccaaaccccagcatggttgaaaatccacatataacttttgactcctaaaaatcttctgatagcctgctgttgactggaagccttactgataacataaactgacaattaacacataaatagactagtttcttttttgttgttttttgagacaaggtcttgccctcttgtccaggctggcgtgcagtggtgccatcatagctcactgcaaggttgaactcctgggctcaagcgattctcctaccttcccccgcgccaccaagtagctgaaactacaggtgtgtgccaccatgcccagcacattttttttctttttagtagagatgggatctcactgtgttgcccaggccagtttcaaactcctgggcttaagcaatcctcatgcctcagcctcccagagtgttgggattacaggtgtgaactgctgcacccgaccaaatagactattttctacatatattttatgcattcggcatacctaactttttcttactctttttttttatatttctaggctacacagttggtctgctagtttatatttattggaaaacaaacaaacaaaaaaaaagcttcaccctaaacaatgttagagtaaaagcaaacaaaaaagaaaaagaaaaagaaaaaraaatctgcatataagtggaccctcactgtttaaacctttgttgttcgagccaactgtattttttttaaataaaaaatctttattccctcaaatcatgagcactcaaggagaaaaaaaatactgctcagaaatgttaacaggacagtgaactaaaactgagtattcagaatatctctttacccctttttctcaatttttaataacgtaatatttgtgattagatgtgtatattgatcaagtgttcattttacatattttctttttttctttccctgttaagcctgctcaacctgctgatgaacctgcagaaaaggctgatgaaccaatggaacattaagtgataagccagtctatatatgtattatcaaatatgtaagaatacaggcmccacatactgatgacaataatctatactttgaaccaaaagttgcagagtggtggaatgctatgttttaggaatcagtccagatgtgagttttttccaagcaacctcactgaaacctatataatggaatacatttttctttgaaagggtctgtataatcattttctagaaagtatgggtatctatactaatgtttttatatgaagaacataggtgtctttgtggttttaaagacaactgtgaaataaaattgtttcaccgcctggtatattgggtttttgtttttttaagtagcttcaactctatatagtagtctgggattacaactggtcatttgcctaattaaattgccttatttttagtgatggagaaaaataatacctcttatctgtcatagccttataacagttctccagtgtatgaactggctgcatgagaatccatggagatttggtttagaatacaaatttcagggttcaactgtggtgattttaattaaaacttaagaaaccaccacttcctgatataagcatcagttatcatatgaatggttttctttccaaccagcaaatggcagtagttgtagctctggtctttgaagggaacttctgtaaaaacaacacatgggaaattgtaatcccaaaccttttatcctctccagccccactccagcatgatctttaggctgccttctgttattcccatgagtggcatactcaggtattgcagaaccatttttatcttagaccatgtaaactgaaattagaggaaatctgatttaaaaaaaaaaaccataatcctggctgggcgtggtggctcatgcctgtaatcccagcactttgggaggctgaggtgggcggatcacttgaggtcgggagttccagaccagcctgaccaacatggagaaacctcatctctactaaaaatacaaaacaattagctgggtgtggtggcacatgcatgtaatcctagctactcaggaggctggggcaggagaatcgcttgaacccaggaggcagaggttgcagtgagccaagatcgtgccattgcactctagcctgggcaacaagagtgaaactccatctcaaaaaaaattttaatttaatttaatttttaaaaacccataatccggccaggcgcggtggctcacgcttgtaatcccagcactttgggaggccgaggcaggcggatcacgagatcgggagatcgagaccacggtgaaaccccgtctctactgaaaatacaaaaaattagccgggcatggtggagggtgcctgtagtcccagctactcggagaggctgaggcaggagaatggcgtgaacgcgggaggcggagcttgcagtgagccaagatcgcgccactgcactccagcctggagcgagactctgtctcaaaaaaaaaaaaaaaaaaaaaaagacaaaaaccataatccaaaatttggctgctgacatctagaggagttattttattttctgagataatacatctttctgaagaaaaattcatttatagatagtaacccattttagacctaattctaattagctgctattggctttgggcaagttacttagctcttttttaaggaaaccctttggagaattatagtgagggttaaaagggagaatttatgtgataacaccttttaaactctaaaattcatagtttattttttccccccaactttcccaaatcttcaaaagccttagtaggtttaaatccccctgatttcttagagaatggtaaaagtagctctgggagccttattaagggaaagatgtctaagtactggaatgtgagagatgtcagtttctccagcagtagcctcaggaatctaccatgcaagcttgggagttagacgcaagtaccatgtggctatttgacctacagtggagttgcatcaagcacatgtaactttccacacacatacacacacacacacacacacacacacacacaaaatagtgaactcaggaactcccacctgcctctacactcaatgggtatttagtctggggagggagcataagtgggaaatataataatctgccctttgcttaggcagatctctcttccacatgcattccattgggtgagcctctgtctttgctgaatgattctgctgtttaaagatattgtggctcatacctgtaatcccagcactttgggaggccgaggcgggtggatcacctgaggtcaagagttcgagaccagcctgggcaacatggcaaaatcccgtctctactaaaaatacaaaaattaaatgggcatggtagcacgcgcctgtagtcccagctactcgggaggctgaggcaggagaatcgcttgaacctgggaggcagaggttgcagtgagctgagatcatgccactgcactccagcctggccaggtgacagagcgagactctgtctcaaaaaataaaaccaaagatattgttatgtttatcattgtggaacatgcacctgttccacaaatacaaaccactagttggcttgtattcagctaaaaaaataaatattctgtattatactttgggagcaatttaagtaattttttcaatgtgatttttagtcttatatactgactttagaacttaaagtcctccccactccagtaatactcaaccccactgtatatacagttcattgtgatgccctttcatgtttagtctgttgtactcacatattccatttagtctgttgaataattacaaacagtaaaatcctaatgatgttttataaagcctgtcactttgatacaaagatactcaattcacctggaatttattgagcatgtatgtgtgcagctctgaagaactggcatggaataaaaggcagtggctgggtgtgttggctcacgcctgtaatctcaacactttgagaggccgaggtgggaggattgcttgagttcagttcaagaccagcctgggcaatatagtgagaccccatctctacaaaaatttttaaaacttagcctggtgtggtggcacacacctgtggtcccagctactcaggaggctgaggtgggagaatcacttgagtccagagtctgaggctgcagtgagctatgatcatgccgctgtactccggcctgggtgacagagtgagactcttgtctcaaaaaaataaaaataataacgtagatgacaggattcaggtcctagttctaactcagtgtttggccattacatgatttggggcaagtccctattctctaggccttgactttttagataccacaatttctatggtccttgataaaatgacaaggtctttgctctgcatttataatttaaaggcattcaaaattatataattacatcttagagtaaaacagcccaaacaaagtgtattttacaacagatcaggaagagttaatgaggttaatattaaggtccttatacccattcaaaaagctttgtacttaagaatatggaaaaatatatgcactgccaatgacaattgtaggttcagatctaactaaagtaatatgtaaaacattacattttcttgccttttcatatttagaacttaatgacttggggtcatgagaaacctcaaagttattctgtaacagaatgaacctctggggcaaatgaagtctgtacggtttaagtcctacaccatgatggccctaaactgagctttcttactgtaaatctagtttttataccttttttggcctcatttcttgctgacagattgtcactttttggtaagttaagtgggcttggaaaccagataactgcatttgtaaaacttccatgttaaaaacgaatacacagaaaaggaacaaactgttgtacacacacccgggattgatctcaggggaattatgctcagtaaaaaaatccaatctcaaaagattacattgtataattccatttatataacattgagatgataaaaatcatagagaattattagtggttgccacaggttagtgtgggaggtggctatggctatcaaaggacagcatgagaatccttgtgatagaactgttctgtctcgactgtgttggtgattacacacatataagcatgataaaattgtctacaagtgaatataaaaacgagtacatgtaaaactagtgaagtctgaacaaggctgggtgaattatgtctgtcaatttcctgaaattgatattgtactataactatgcaagatgttaccattgggagaaactaggtaaagagtatatgggatctctgtattcatgtcactctaccattaagattaaatattaaaaaaaatgaatgcacagaatcagagaggcactcttaaagtgctgtcaacacatggcctttgaatacaattttgggtgctcaaagaatttgtagattgcttgatggttctaaaaagagaaagctcaaaagagctagatcctacataaatgaggtactattggtgttccatcttcctgagatgaacctgttaactagggcagttgccgtcagatctgtttttattcgcagtattttgcttaagctttaagatattttgttattaataattggccataaaacccttttgtgggcagagggaggtgtaggggcggggcgtgctatggaacttcaaatgggcaaaaccgaaagtactatggctgattgcagctgtaacaggtctttggagatacgtaaaatcctttaaaacagtgactgtctccctttatgcataaaaattttttctaatctactgggtgctcagaaaggatcacggaaagaggccattattaaataaaaagcagaaattataccaatgtgactttggattttcaaataactccagccctacctgcagagaggcagattcaaactactagcgatgttaagaactgaaatggattttaatctagtgataattaataaaataactgaattaccttcccaatagtattagttactttcccagtttattagggtgtggacaagaaaaaggattactgggtttccactttctagtccagagctctttttcacgggaacagagccctgtaaaagtttccctctctccaagcactttctccccttgactgttcctgaagaaggaacgatttccagttagcgtttaaattagcatagtgcttaactcagagcttggcttgcagggaaaactagaaaatacgtggtttcattgctctgcggcctaatcaaaccctggacaagagaagaggaagaaaataggatatacttgcagcgcgcaagcgctgcacaaagaaagcatgtcctctctgagtcgccgtaggtgctaggtggctgtggcttcggtcgttaccccacccccttccacgtcagccaaggactctggagccgccgccgccgctgctgcggttcatatccggagtagacggagccgcagtagacggatccgcggctgcaccaaaccactgcccctcggagcctggtagtgggccacaagcccccagtcccagaggcgtggtgggtcgggcagagtcggaagaactggctttctagctggaagatgcggaaggggagcgactaggccgcttgcgtctgggcctggcagaagggaccgggtgggggtacgggtgggggtgcgggtgggggtgggggcggagggctaggaagctccgggtcggacgctccatcccgtcctttgtattggccgggggtcttttccctcccaagacccctaggcgtaccctttcaggcctagggctgctttgctggaggaaggggaggaggaagcgggtggggcgaggtgggggtgcagcgcgttgattaagggacccgcggacatagagtcggaacccaccaaggaccgcgataaagcgctttagggttttggcagagtattcaggcacaaggtctcttaacttgagcatgcagattgtgtgttgtgtaaaaaccatacggtccataacattgtggggtgtggctggggggactgtcactgttctgtgggccttcattcggctatacagcattctcaaacactggaccgggatgcgatgagggagtgatagataatataccttatgccagagctgataatgtggtttttactagaatttatttttatgggaacacgatatagattgacctgccctttctaatactttaaaaggtcactataggtacttgtttgtgggtttttttttttttaatttgtaatgatatgtctgtgtttatttttctagattttctggcatccttaaatcttgtgtcaaggattggttataatataaccagaaaccatgacggcggctgagaacgtatgctacacgttaattaacgtgccaatggattcagaaccaccatctgaaattagcttaaaaaatgatctaggtaaacttcgatattattttgagaatgaaatgaaaaaagaaaaaacaaaaataaaaaactcatatttcatattcctttataattagaaatgcttaatttttgtctaaagtttttctaggatctcttcgatagaccttttattaaaaatgcgaacttctttaaatattggttgtttgaaatagaacatctcagtttatcttagtaaacctaaa

SEQ ID NO: 97760 - DNA, 112613 bp, Homo sapiens
  misc_feature (1)...(112613): n = A,T,C or G
gctcagtggtgctgctcactgctttatgtttaactggtagtctctgccactgtgttctcctgaactttaaatttcctcagttattacaaccaattattcggtatatactttgtgttggacaatctttctcttgtgaacatctatgagtttcgaaaacaaaaatcatcagagctgaatctgagaaatagaactgttttcgtcacaaacaagttacagttacgaggtactgaaaaaaaatgtgtgattctgcaagtaattccaaaagaggaatttttttaagattttgagcaatgcatagtatcactggagtagggtagattaggtacttgggagaaacgaaggaagaaagcaagcaagcgtcacaggacggacggacaggtaccatgtcttactgtttcttttcttgattttttgtttgtttgtttgtttgtttgtttcagacagagtcttgctctgttgcccagcctggagtgcagtggcgtgatcttggctcactgcaacctccacctcccgggttcaagagattctcctgcctcagcctcccaagtagctgggattacaggtgcgtgccaccatgcctggataatttttgtatttttagtagagatagggtttcaccatatgggtcaggctggtctcgaacttctgacctcaggtgatctgcccgccttggcctcccaaagtgctgggatagaggcatgagccaccgtgcccgtccttcttgatcatttttaaaaaaacttcccaaccccaaataaactaccaagtcctgcttgcttttctttgtgtttggataacgtctttcacaaaaatgaagcccacactagattatcttcacttacacactttccttggagtgaacttatttgactcccctaaagggtctcttaactcttttcttgtcctccgttttagtagattacagttcttccttatttatctcgggatagttcttatacaaatattaaaacaagcataaaagtgacaagagttgtgtacacatgtcctgtcagaaacgacaaaagctccttttagatccactgaaaaaggcttatttagagccctatttaagaccaacagtttcattatcattcagggacaaattgtgccagaagcaacctgtctctctttcaatctggtaatccttatattttctctatgcagtaaatcgctccatattagacaatattttgcagtttttattatcctgttatcagttgatgcttgggaactttttatcgaggaataacattcaaaagctaacgctgttcttttagtaatttccttcctaagtgaggccactcatacaccaaactacctttgccaaatctttaaaaaaaatttaaatttaagcaaatcaatgagtacatggtttttcttgatgtcccattaaacatagagcatggttgctcattcttttaacatttttgggcttctacaacataccagatacaaagatttatgacagagaatctgctctcaaaagaactcgatgagaaaggaaatgtaaaaagagaactgtgacacaaccaagtaacttttataatagaagcatctacatatcaaggtgactcaaatgggaagtggggagcagtcagattaggtttcccaaagatattaaagagataggaaaatcttggccaggcatggtggctcatgcctgtaatcccagcactttgggaggccgaggcaggtggatcacctgaggtcgggagttcgacaccagcctgaccaatgtggagaaaccccatctctactaaaaatacaaaatttagctgggcgtggtggcacatgcctgtaatcccagctactcgggaggctgaggcaggagaatcgcttgaacccgggaagcagacgttgtggtgagccaagatcacaccattgcactccagcctgggcaacaagagtgaaactctgtctcaaaaaaaaagaaaaacatatatatatatatatatatatatatatatatatataaatataaatcttgaagacaaaaatttaccagatttgggccaaggtagaaggaaaccaagactcaaaggtataagaagacagggagtggaagtgctcagtgtgtcagagacagaggtggaagaggggatggggggaaatgagggttaaactataatgggaacttctgcctctgtccacttggggaaaactgagatcagacttaccccgctatcaaaaacaactgggaaacgagatgatctatgaggcaatgattttcagtgtggaaagcagacagcacaagatatgatgcctgaaggaagggaaatgaactgagtaaatcttattgttgtcttggttttctgtacttaaaaggtagctacagtgcagaaggagatccaaagaagagtacagaaatcacgctgagatgaggaaatggagaccagagtttgggggaggctgagaaaccagaatttgtggcacagagtaccatacagtaggttgctgcccagcaatgaagagatccagattgaaaacagaaatcatcacagctgaatctgaaaactagaactattttagtcaaaaacaagttatagttacaaggtactgaaaaaaaatcgtgattctgcaagtaattccaaaagaggaattttttaaatgttttgagcaacgtacagtgtcattggaatagggtagattaggtacatacttggaagaaacgaaggaagaaaggaagcaagcatcacaggccggatggacagatactatgtctcattgtttcttttcttaatagtttttaggaaaactttccaaacccaaataaaccaccaagtcctggttgcttttctttgtctttggataatgtctttcacaaaaacgaagcccacccttgattatcttcacttacagggtaatgcctgtgggtccaatggaggctctggctgaatactaagctgtatgtgcataacacaaagctccatgggtctgagcaaagaatgtacaggcagctgtaagctgaacaattctcggagctcacaggggattcggatacatctgagttccaacccaccaaaggggaagagttcactgaacacacaggcattcaactgcgaccccagaagagtcacaccctagtaggaaggctaaactagtcctagaataaactaatcctataataatggctacgagcctttaagacaaccatcaaaaggatcgaacatctgtaaataaccaccttccaaaacaaagtccctattctttaaaagaacacagcatctactagaaatacaaaaattagctgggtgtggtggtgcacttatggcacaatatcaaatggtctatcatatctgtgattggagtcccagaaggagaagagcaagataatgggtgaaaaatttttaatttgatatattttgataaaaattgtaaacctacagatccaagaaatccaatgaacaccaagcagcataaacacaaagaaaaccacatcaaggcacatcataatcacactgttgaaaaccagtgatagaaaacttgacaatcagccatagaaaaagagacgcattacatatccaggaaaaggataaagatctgcagatttcttttttttttttttctttttcttttcctttttttttttttttttttttttttttgagacagagtctcactcttgttgcccaggctggagtgcagtggtgtgatctcagctcactgcaacctctgcctcttgggttcaagtgattctcctgcctcagcctcccgagtagctgggattacaggcgcccacaaacacgctcagctaattttttgtattttttagtaaagatgtggtttcaccatgttggccaggctggtctcgaactcctgacctcaggtgatccacccacctcggcctcccaaagtgctgggattaccggcgtgagccactgtgcctagcctggagatttcttcagagaaagtatgcaagcacagtgaatgatatctttaaacttcttcaagatgtcaatctaaaaaaaaaatcctccaaaaacaaaggcaaaatacttatattcagaaaaacaaaaacagacaatcaccagccaatctgtattaccaaaagaaggttaaaaaatgttctacaggcagaaggaaatgatatcagatagaaatctggatcttcacaaataaatgaagagcatcagaaatgataaaagatttttcaaaatcatttctaaatgtttcaaaagaaaattgacagcttaaagtaaaataatgttctgtggggttattacctatgtaaaagggagatataacaaaaataatacaaaggatggaagagggggaatggaagcacacactataaagaatctaatagtgaagaagaagtggcatgatgttatttgaaggtagtcgacggtaaattaaagatgcattttataaaccctagaacaaagaaagaggaggaaaatgaaggtcaatacttgagataaaatggaatactaaagtatactcaggcaggaaaaaaggaatgaagaataggacaaacagaaaacaaatagcaagttggtagttttaaacccaaccacatgataattacataagaagtaaatgaactaaacattccaattaaaagtagagatggggtttcaccatgttgaccaggatagtctcgatctcttgacctcatgatcctcccgcctcgacctcccaaggttttccttctttatccctagtcatattctttgttctgaagtcttctttgtttttatctatataaccactgcggattttttactattagttgtcaagctgacagatcgtcaagctgaattttaaaagcagatccagctctgtgctgcctacgaagatggagaatcccacttttaagaacaaagatacaggccgggcgtggtgactcacgactgtaatcgcagcactttgggaggccgaggtgggaggatcacccgaggtcaggagtctgagaccagcctggacaacaagttgaaatccggtctctactaaaaaggcaaaaattagctgggtgtggtggtggacgcctgtaatcccagctgctcaggaggctgaggcaggagaatcacttgaacctgggaggcggaggttgcagtaagctgagatggcaccattgcactccagcctgggcgacaagagcgagagtctgtctcaaaaaaaaaaaaaaaaaaaaaagatacagatagatttaaaaattaaaaggatataaacacatatcatgcaaacactaatagtaagaaatctgcagtggttatatagatataaacaaagaagacttcagaacaaaggatatgactaggaataaagaagaaaaaccttgggaggccgaggagggcagctcatgaggtcaagagatcgagactatcctggccaacacggtgaaaccccatctctaccaaaaatacaaaaattagctgggcatggtggcgtacgcctgtagtcccagctactctggaggctgaggcaggagaatcgcttgaacccaggaggaggaggttgtagtgagccgagatcgcgccactgcactccagcctgggcgacagagcgagactccctcccactccgcaaaaaaaataaataaataagaagaaagaaaactgatacccagggtcctggtgccagactttacactactgcagctatcctgggtgatgtccagagatgaacggaatcagaattacctggagggtttggggaatcacaggttgctgggccccacccccagagtttctgattccttaggtctgggtggggcctgggagtctgcatctctaaaagattcccaggtgacacgctgattctactggtcttgggatccactctggaaccacttgttgactgacctcttcctcctgtttaaaactgacatgatcctatcttgaatgatagtgtaacaattagaaagataaaataaggaaatgatgcgcttgaaagtgtagacactgatttcccttgtgattgattaattgagattgggatttgggataaaaggaaacctaggattctgccttagccaaccagtcgggggcgggaggtgggcaggaaatgcaggagaaataagattttggggtgaaaacaatgagctagggtttggatttgcttgaattttcaatgcagtactcatatatctttctcacttttaaaagtctgtgaggtggacatggactggcttcgtcggtttgccaaggtttaattttgtgccttaaatgggcacttgagagctttgtaaaaaycgatgtgtttgctggccccgtgtttacgggcctttgtgatctccgcgttcgcatccaatctggcccttgggctccgagaaggtacacgtgtgtgtagggcaaggtccaaccagtggggccagggatctgagcaacaagcgcgccctgtgtcctttgtggcagggaccgcttgtggacggcggatgaggatgaggcgcccagatcttcccgaaatatttcctaatcgttcatcatgatgttatgttgttgttttcacaaagggaattaatattggcctccttttctacaaatcttgccaacactgcgtgaaatgttttcgttgcttctctattcccaaggtttcgtattattttaccaagtcggaaaatggacggcgcttaaactgttttttccctgaaaggaagagggctgtaatcactaaagtgttttaaaatctccagcgcaaaagcctgcggtgccacagggacgaggcctggagagcagtcgctcctagaaccggggcgcgaagggcacccccgcctccagcacgcgccctccgccctcccggcctcgctccccccggagtgggggcctcgccggcccctggtccccgtcactcagcaacgtcgggtcagccttcgccgggttagtggcgacgcggccgcgcgaattcgcacaggtattccgcgtttctccgccgttccccgccttggccggaggcttccgaggcgtcccttggtgcagggtgggaagcggcccgcgccccaacggcccaggcgctggagctcaccccgagcgagggcggtacctgaggcttcggggagcccgcgctgaccgcggccccgtccccagacccctccagcaaccccggccccgccccagacccctccggtgatttacccccccggccccgccccgcagatacctacagtgatctccccccggccgcgcccnnnnnnnnnnnnnnnnnnnnnnnnnnnnnnnnnnnnnnnnnnnnnnnnnnnnnnnnnnnnnnnnnnnnnnnnnnnnnnnnnnccagtggtcccccggccacgcgggctccgggggggcggggcgggggcgcggccctttgctgggacagggggcgtgggcccgagtagcgggcggggggcgcgggcccgggctggggcgggggcgggggcggggagcgcgggagccccggtgacgcatcagtgacgtcggtggcagcgggcgggtatttcccgggcgagaccccgcggcggagtgggcgcggccagcgtggaacgggggcgagggtcgcagagtcgccggctctcccttccccagtctgggcccccacggcacagggggccgagcagaagcccccagcgtccagggccgggggagggtccgcctgcgcccccaggcccgcgtggtcgggccctgcagggcgggaggcgcggcgcggggcggggccggtgacgggacgcggagaccccgcgggcggcgggaggggcacgaggcgcgcgtttgcacccgagcccggcccgcgccccgatgcggagcgatgccgctcggcctggccgccccccgcgagcaccgcgctgcagacgaagcccgcgcgtgatcccgctccgggtaagtgggcgcccggccggagccccgggtgtccgcggggagagcccagcccggtgcagccagacgcggaagggaaactcggggtgaaagtctccggacctagggagacggctctggcgccggtgtggtcctcacgccgccagctgctgctgcacgcgacacaaagacctgtggttccctcggcctcctctcccgggacctcccgccgggccccggggaagcccgcgcgcgggtgtggacagccccctcggagcgcgtccaggggcttccggggctgggggcgcccggtccctccggcatgaggcaggcgggggctcgggggtcccctcttccatttgtaggtcacagagcgtttgctgttttcccagcggggacgtcccccgtggaaaaggacctcagtggcaggagatggcgtggctggttgggcgttttctttggggaaatgtttctggcgagtgcctgaggaagccctcctggctccccagcagcccagacgccgcctcgggagcactcggggtgacgctggagccaccgcagctgagggtggttttcctcacctccttgatggcgtctgtccccgaggctggtgctgaactgaaatgtgcttcgttcgccgcgcgcgcccggcagcaaccggggagctttgtttggcttgattttttaaattgccttggaaataacgcgaaacggcgggagggtgaagtggggaggaggacagagcgtggtggggaaagactccttaatttaagatttgcttcatttcgagtatttggggctaaggtgttaggaaacccgaaaatgttaaagtttgatcaagtaataaagtggatgatggacgccgggcctcccaccgtctccccggccccgcggctgccgcgtctctcctctacccgtcgcctcccaggactgtcaaatgctggcaccgggcccgtgcctctcagccggagcaaaaggccgcctaggctgcgcccgtgtgctccattaaaacgtgccagtcctgtcgtctgctcatgagtgaggtgtgccgcttcccacagtggacaggaaatttgcagcggcgaatgcctcacagtagccatgggggacctgggctctgcggccggcttctcgattcctcccgcaactccttttcctgatttttgtatgaggcgggggaggggaaccagccgccatctgatctggccctgttccctgcaagaggcgactggggggacaackaagttgataaatggaaagccttttccagcccggagaaacagacagaggacctataaactggattgtttttgaaatgtagggtttgctcagtgaccggtcatgataagagatggctgtggcacttaataaatagtaggtgtaaatgcaaatgcaaggtttacagtgatgccttgcctgttaatgagcagcctcaccatggggttagttaggctgaaatgactatttaggacaatggacttcctgttggcccccacctccatgcacaactccagtgctcataggccttaaaattcgcccaaggaagccagtggaggatgtaggcctggctcagaaacagcacagctaaggggccattcccagcagtcctatgattggcgtttctcatgcaaactgatggtggagaaaccagaaaaaaaaaaagcttttcctagattcactttacagtttttaaagcaaaagtgacagtccctgaagtcccccaatattcagtgcattctttgaaatgatagaacatcaggtgggaacatcgcctgtaatcccagcactttcagaggccgaggcaggcagatcacttgaggtcaggagtccgataccggcctggccaacgtggtgaaaccccgtatctactaaaaatgcaaaaaattaggcgggcgtggtggtgcacgcctgtaatcccagctacttgggaggctgaggcacgagaatcacttgaacctgggaggcagaggttgcagtgagctgagatggtgccactgcactctggcctcaaaataaataaacaacatgaggtgggaacatggaccctgacccctggggaagcaagagccacagctgtctcaggagggcaggaacactgtaaaatgtgtacaatgctccttcccccaagacctacacgcccaaacccaygcctaccacaaaactactgcttatgcagaaagcaaagactaaggtctgtacccaacaatttcttcttttatttatagctgcatctcacttatttcactatcacatttttcctagtttgtctcagtttctgcttggagaggggagaatgcctaataatgtatgtcagaagattgcccctttcttcgtggaattttgaagtagtaactttaaaatattacctgatttttgttcttgaaacaccttttaaggatatactgctatctaatcttgctggttttccttttttaaaatttggtatttttattcattctagatatacttaggcatagagacttgtattattcaggtagagagattgtttcttttttaaaaccagaaaccaaaatttaactcctttaatagaggtataagtactacataaatarcctatcaacagtggatagcaaggatattttaattgaaagtcagaaaagctaaatggtatcaggaamgaaaaggagattgcagggtaatactaccgaaagactgaaagaagctggttaaaaacctctaaagaataagccaaagactgttaataaatgatcaaaagtaaaaacacaaatgaaattttcattttaggaaatgttaagaaataggggctagaaaagctgctgaaagaaaaaaattactgcagagaaaacaatgggtgcttaaaaagagatcagttcagtgagcttgctggagcgttccaaattcctctaattgccaaggagttcttgttagactgaatggtggctggtgggcaatcagattccctgctggaaattggtagacagagtgacaggtgccatgcagataagggaaagccggctgtgtgcaagacgccgtgctcactggggaaggagccctgggtgcccaggagtgaggaagtatagggagctatggaggaactgttcgtctccatggccgtgaggtttgtgggtcaccaaaggcccagtctccgaggatcggatagggctaggagcccaggttagtgggcaacaaggggaaagaagggcaatgattgggctagacgtgtcatgtggatgatctcctttgatactcacaggatacctgccaagtttctaatttgcaaaaaacagcagtgactgcttgtgtcctctctgtccaggagtgttctggcagcgggtttggtgggtggtgggaaccttttttaactgatgtaggaaaagtatacacaaatgacaagtgaaagtgacagagacgtgtggaagagaaaaaagtggagaactgtagagagacccacactcaggcactgcacatgagctcctttcccaggaggatttgtttctcttgcttcttagatttctaaaaccatttctctctgagttgctgggttggctttctgtggtgtgacacatgtgctctgaggccatggaaggccctagagatagaagaagcactctaagtatccctctgggccagagagattgtttcttccccaacaccccctgtgcatgaggcgggacaacagccacgatggatcatatgagctggcattaactgtgcctttatgcctttctcatcagtgcctggacctcctcctggtgcccctgcctaatgtacagctgtaaggccttgtcttctgtcccctccatatgggctccaacaaagaaagagaggcagggygataaaataggaagaaggaaaacatttttaactctttttaaacattcttttttttttttttttttttttgagactgagtttccctcttgtctcccaggctggagagcaayggcacgatcttggctcactgcaacctccgcctcctgggctcaagcgattctcctgccttggcctcccaagtagctgggattacaggcatgtgccaccgcgccyggctaattttgtatttttagtagagacggggtttctccacgttggtcaggctggtctcgaactcctgacctcaggtgatccacctgactcggcctcccagagtgctgggattacaggtgtgagccaccatgcccagcctgaacattcttattcaagcacctctacaactacagcagaaaaagtgtttacatgttcctccaaattccagcacccaaactcaaccttgtttcttctggtgtcccaccacacagagaggtaaaattgagagatttctagcaaagcagtacccatgtatgaaggcccaaagaggagaaatgagcttagatggcgggaagaaaagagcaagaggctgttgagattggggtgggaggcagggcagggcagggaggctgctgagggctgagagcaggttcttctccacaatggcccagcaggactctgtggctcaggtccagacactgatgaacaggaagagcagatggggtggtcatgccccatgctgggactctgtcttcccagagggtcaggctcttggaggccagaggccagaggtcaggcagcagtacaggcagcctggctttgcaggctgagccaagtcatcaacacaccttggaaagggctacgtgttacccttcaacacccacaygtccacgtgggccctggggtctctggcggcccggggcccatgtggacggagtgtctgctgctgcatctccccttcctcatcagtggtctctgtcttcccatggctccctgtctataggaaggtccagctacacccaacaactggcatcctcctcctggatgtctctccagcccgatctgaggagccatctgccctgccctgcggctctggggtacccgccctgcacagaccctggatggaaatttccagcagggcctttccgctgcccctagcctgtggccgactaaacgagcatgagtcagtcctcattcggttttagttttccttcagcaatcttgggaaaattctgttttctctgtgccccagttaactttgcgtatcactcagaagctgctctagtctgaaggtgcttgtttatccccccggcagctgtggggctgcatggcagggtactaggggactgcagcctggttaaggagacctgatgacttcagtctacaccgtgcatgtgtttgacggtgtgtgcggggaagaaggtgttaccaggatgagagacagcgtcaggcttgctcatgcccaagggcagtggtgggcctggagtgtgggtgtggaggtggccgaggagggtcgctcggtggatgtgagtagaaaattccaaaatgttgacctcaagggaaataaaggggaactggcagtgttgccggccactgaattctctctggaacagggtgaggtgtaggtccagggcaaggccttcgtgggtctcacacgctccctcccgctgtggctgaattttatctgatggagacagagtcactggcctcttttgctgatctggacctctgggtgcccgcgttcccgccacccagccctgtctctggaaggctgtacccatcaacctttcagtaggagtttggcgtttcactgccattcccctccacttggttgaccttgtagaattgtgccttttggggactctctcgggcagatctttctgtgtgtgctccgtgaacactgcagcaagtgtgccctcagcccctgctctgccgcgtccccgcctttttgggttggctgtgctcactgatggatgggtcagcatcctctgaacaagtttctcgttagaccctctccttgtgctagggtttgttgcagtcaatagtgtctgaaagaagccaattgctggcctggacccaggcacgtttttattcatcagaaattttctttgtcatggatttgccattctagggctctgctgatctcactgtgatcttcctggtgtttttagttttactgtccagtactgctccccgccacattccttttcattactgggtgctatggaaggacttttccaatacagacatactgctggatgcgatcgatgtgttcatcgaagactgcatgtgaaccttgcatttgtgaggtgttcattgactgcatgtgtgataagcacctgcaataaatatatgcatcagatagtttaggcactggtgacagggaaacaaataagatayggtcatgcactccagaggagtcagaacctagagggggtgcatgtgtgaaaacagcccacctaccctggattagtgcacagacagggagagtgttagttctttctgatagcagtgcagaaagcgtgtgacaacagagggwgtcttgagctggccctggtgagctgaggcaggtttttcaagccagacaaatgagaaagggctttccaggcagggcrgccagcaggggcccagggtcatgaaagaggagtggagagagcagaaaggttgctcagagccggggtgtgaaggtgagactgaccgtgaagaatggggaatccagggccattgtcaggcagaagcaggaagcagcaggccccaccttggccgtctggctgtgactgccatgtggggaaggtcggaggcgtggggcaggagagggaggacagggagactggataacgcccaagggtgccccggccccagcgtcagtcggggtggccgtctgattggaaacagagggccagggagaggctggtgtctgggatcccagggtttccagactgagcatggatggacgaggggtaatgtgacctggttttgtgaatgaagctgggcaagtagagagagggtgtatgacttgccaagtcaggaggtgacatcgagggggcatgtacgtgcagagctgagcagaggtctggctggacccaggtgaagccacaggggcgagattgcctggggtgatccgaggtgtgatgacagcagggaggcccgcgcctccaagaacacacggcaagtttaggacaaaacaaatatccttctgtaggaggcacaccctttcttacacagactttcatgcataggattcccttaaaagagaccctcccaaccctgccctctccctggccccctgcccctcctgcccgcctctgcaaaaccacagccaacccgccaccacctcgccttcctggatgactcattctttctgcgttgaagcagttgcatcctgcctcttgtttatgatttctttgtccctctgatgcttacggattggctcggacgctgttagcacccgtctcttgctgcaggcccacgtcggggaatcacagtgtatcatccttccgtgcgtgggtctctattcgagagggagtttctgttctatgttttgctcagttgcccccggtcactcttttcccacccccaagcaccagtggcctcgaggcggagggctggccttggccctgcttcacagtaaccgcggcagcttacccgcgacacctgcacgggagcggggccaaggctcaccccgcccctgccgggcctcgctcgggttcttccaccctgcgttcgcctcggaccgctgtggttagctgtgaaatgcccctgcggtctggttttctctccttttccgcacggttcttagtgtgttrtgttgcttttccgcactgtacgttggaagctctagggctacgaaaaygcaggcagttgcgggggaagcgaaaaatccccgccctcatggaagttctgttacggtggaggaatcagaccaatgataagaagtcagaaaatcaaaagtagtttaaacaagtacatgaataaataagcatttaagatatagtaagtgcatgagagaaaaataaaacaaggctgggaggtagggaattccggggaagggggtggctcacattttaaataggctgcttgtgggaggacctgccatgttgatccgaggttaaggtgacctcccaaatgagctcatctgatgcacgtggagccaacaggtgaaagtgttgatggagtcacagattatttatttatttatatttttaggtggagtcttgctctgtcacccaagttggagtgcagtggcgcgatctcggctcactgcaacctgcacctcccaggttcaagccattctcctgcctcagcctccctagcggctgggattacaggcgcccgccaccacgccagctaattttttgtatttttagtagagacagggtttcaccatgttggccaggctggtctagaactcctgacctcaggtgatccgcctgcctcggcctcccaaagtgctgggattacgggcgtgagccactgtgccccgccgattatttatttagttttagaggcagggtcttgctctgttgcccaggctggtgtgcagtgatgtgatggtatttcattgcaatcttgagctccccagttcaagtgagccttccacttcagtctcctaagtagctggggctacagttgcccaccaccatgcccggctaaattcttttaaaactttttgtagagatgggttctcactatgttgcccaggctggtctggaactcctggcctcaagtgatcctcccacttcggcctcccaaagtgcataattacaggcatcagccactgcacttggcctacagattaatttatgcccaagtgccttcctgacagaataaggtggctttcccctcctctcacccctagcatataagaaagctacattaaccaaaaggagtatttggtagtgtaactcaaggtagaggaagagacagagattctttttgcaaaatgacacgcaagaagcagccccytctcactccaaagtgggcctcttcacagcctggctgttttgtgggtgctccacccatccagggactggggctgctgggcccagtgacctctgacctgccaggcgccaagcggcaacaaaagggagggagagctctggcccaccgggcaatttgactcttcctggagccctgcagggggtggtggccccgagaggctggatcagagaccctcaggtccgaaggtctggtgggctaaatgaagtagagaggccgccctcaactccaccctgccgggattcaggcgggctcaaggacgcagcttggcaaggactgtcttatgtattcgccttgatgcgtggtctggcaggttcactgtagtctgttgaatgatgtgtgtatcctttcttctgttttacacacctgttttgagaaccatttacttgtagcacagtctgtgtataaagcctaaggtagatgcagcagtggttctcaaacctggctgcatacattttgggcagtttttaaaatatcccttcttgggcctcatcccctggacattctgacatagtgggtctgggctagggtccgggaattagtctttgagttttgcagccaccagatttgagatgcattgaaccaaatgatttctgtgggtccttattcctgawatctgattccccccaacctgcctaagcatccccaggctcttgtgtcctatgccagcctctcccgctcctcgtggggctgtgagggtttgaccaccgtaagcatgatgtgcctgcaacaccaggtctcctccccaggctgaatgcatggatctgtcctcttctgcctggggtgagagacagccttctctgtggggaaaccagctaccaccctgaagagctgcctctgtcagagcacaagatccccacctagagaccccctcactgctcccctcccacagcagcaacggcagctctgaggttctggacaccccaaaggacacagamctaccttcacccatgagccgtccaggagacatttgacagctgctgtgtgccatrtcctaggggtaggaatgcaaaataagtcagaggccatccctgctcctgaggcatttacaatccagtgagggagacagasgattataacacaacacagagcggggcacggtggctcacgcctgatatcccagcactttgggagaccaaggcgggcagatcacctgagattgggagttcaagaccagcctggccaacgtgggtgaaaccccgtctctactgaaaatacaaaaattagctggttgtgaggcaggagaatcgcctgaacccaggaggcagaggttgcagtgagctaagatagtgccactgcactccagcctgggcgacagagtaagactctgtctcagaaaaaaaaagcatacaacacggaattaagaaaagctcccacctcaacacagaaggacaccaagcccggcccagaaggacagggaaggcatctggaaggaggtctcatgatttggccagatggaactattggggcacagccagtgcaaggcgaaagccttccaggctgggggctctgtttcagcaagggagaatgattatggctcacattaattaagtgcttcctgcagcccaggctcttagtggcttatgttgtatgaactacttattcctgatgactactgtggtaggtagaatcatggtccccaaagatggccaccctctaatccttggaacttgtgaatctgtgaatcttacacagcaaaaaagattttgcagatgtgattaacggaaagatcctgagatggggaggtgatcctggaatacctggcaggcccagtgtcgtcacaaaggttctcataagaggaagataggagcatctgagagagaaggtgggggatgctgctgggctggctttaaaaatgcaggagggcccattactgggtatatacccaaaggattataaataattctactataaagacacatgcacatgtatctttattgcagcactattcacaatagcaaagacttggaaccaacccaaatgcccatcaatgatagactggataaagaaaatgtggcaatatacaccatggattactatgcagccataaaaaagaatgagttcatgtcctttgcagggacatggatgaagctggaaaccatcattctcagcaaactaacacaggaacagaaaaccaaacatcgcatgttctcactcataaatgggagttgaacaatgagaacacatggacacagggaggggaacatcacacaccgagccctgttggggggtgaggggcaagggcagggagagcattaggacaaatacctaatgcaggcaaggcttaaaacctagatgatgggttgataggtgcagcaaaccaccatggcacacgtatatctatgtaacacacctgcacgttctgcacatgtatcccagaacttaaagtaaaatgttaaaaaaaaaaaaaaatgcaggaggagccacaagctcaggattgcagatggctgtagacactggaaaaggcagaaatacgaactctccccagagcttccacccacagccctcctggcaccttgattttagtccatcgagacccatttcagacttttgaactccagaactgtaaaataataaaactgcattgttttaagccataaatatatggtaatgtgttgtagccacaatagaaaccaatacaaccattcctctattttgaagggaagaaagcaggaggtgaagggaattrcccamatttccrgagctagaaaggagcagattcaggctccagggcctgcacctgtccactcacctctcttctgttcctcccgcctggaagggrtttaaaaacagcagtccagcagctggggcttatcggagaccaggagcattggaagatgaagctggccagatgcgcaggcaggagccagggtccgggaagctcttcttggtcaagtagagggaagtggctttgcaggccattggcctgggctccttttcggtggtctcctcaagtctgtgccggactgggagtgccacaagagcagaggtcagctccttgggcccagtgcacccacatgtggcttcagccacagagtgagctgtgtgcccatacagactgtgccgcctctctccattatcagatggtttaaaagtgccaccctggccaggtagtgaagggcagacatctggttaagtgcccgcagcatccttatgcatcgaaaattctcctatgttcaaacatctgtttccacctcatcattgttttcctcattctaattttttttttttttttttttttgagacaaggtcttgctctgtctcccaggctggagtgcagtggygcaatctcggctcattgcaacctccacttcccaggttcaagcgattctcatgctttagcctcccctagtagctggtattgcaggcacgcgccaccgcgcccagctaatttttgtatttttcgtagagaaggggtttcgccatgttgcccaggctggtcttgaactcctggcctcaagtgatccccccaccttggcctccgaaagtgctgggattacaggtgtgagccaccgcgcccagcctcattctaattctttaatataaagcatcccccatcttccagcgtttgactgaaataggtggtcagaggaatttttaggtggtgttttaagcattgtttttttaaataaaggacacgtaagcataacctgaaactactcccgatatgtctgctcaatttatattccaagtattttgcaggctgtgcttggattttcaaaggagcaatcactagcatttgattagcatttttcagtttgctaaaagcattcatgtaccctgtccacttgatctttacagaaatgccaggaggcagggatttttttttttttttttgagacggagtctggctctgtcgcccaggctggagtgcagtggggaggcagggatctttatccccattcttgaaggaggagactgtggttcaaaggagaatcaccatcaggacaaggtgcctagaggagcaaggacggcacccagggcttccactcgaactccacactgttcctagggtatcctcttgccctaggggtaagaggtagcagctggggtagcagggaaagacctagaatgcacttacaaggaaatagggtcccagaatccagttccgatgtgtccctcccaggtacagaagtacaacactggggcatccgcatgccatcgcctgtcagtattggggatcccaccctgctttgggggttcatcggatctctggtcttaacatgagattgttgtatggaggaatgtgattgaggctcaccaacatctcagggcacaggcaattgccctgctggaggacccatggagatacgcaggtctctgatgggaggtctctgatgggaggtctcagcgtgggcaccgtgcctctgcgtggccgtggcttgctgcaggcactgctccccatgtggcaaagatgagggaatgcaggcctgctgctcagtgccagctgctctcctctacacggggctcccctagaccttgccccaggcctcaccgcaggacctggtgcctttggggttccccttttctgagacccccaaagagccttcctcaaataaatcaaaggctttagcgtctaaaacttgtycctgaagaaggctttctgaacccgctttggaagtaaaaagcaaaattcctctttgcacttctgtgtaatcgtcctcattctccttgaggcagtgcggataactctggctggtcagaggaggggcaggtatgaggaagcacggtgaaaacagcccagccctgtctctcaggatattctccctctacagagagagagccagttcctccctacactagtctgggcttacctgtctagcaagaggagggttcctggccattacctgggtgtcccctggcagtgcagcaataccaggttctcaaacactaactggttggttaaggaggttaagttaccttcwgtcttctgcccttcagcttcctcaaggtggaaggtgggccttcagagccactgcaaggggtctctgaatacaggtgcacaacccaggaaacctgtgtagagcaattgcgactgccatgtgtttgtatcctgctgattaatttgcaagtatgcatagatgcctttgggattaataaagatgaatttaagtatgttactgaattaatcacagctttgtcgtgttgtatcttctgtggcgacagatactgaaaatacagccatgtattagttggttttgtgttgctataaagaaatacttgaggctcagtgattgataaagaaaagaggtttatttagccgacagttctgcaggttgtacaagcatggcaccagcatctgcttctggggaggcctcaggagggctccacccccatgactcaaacgcctcccaccaggccccacctccatacatcaggaatcacatttttccccgccgagatggagttttgctcttgttgcccaggctggagtccagtggtgcgatctcagctcactgcaacctccacttcctgggcttaagtgattctcctgcctcagcctcccaagtagctgggattacaggcgcataccaccacacctgaatcattttgtatttttagtagagacagggtttctccatgttggtcaggctggtctcgaactgctgacctcaggtgatccacccgyctcagcctcccaaaggaatcacattttaatatgagayttggatatccaaatatccaaaccataagaggctgtaagagactgcrtttgtctgattgactttagaagggacctaatttataaatgtttaaactttgcgctttaaaaccattggaaccatggtttgcaaaatccttccatttctggtgctccatggttcattaacaatgccatgttctggtacattttctaaatktattcactgtctatacccggctttgtattgccttcctctatcagctgctgacttcagcaaaggaagtatttcttttttttgttttgttttttgttttttgagacagagttttgctcttgtcgcgcaggctggagtgcaatggcaccatcttggctcactgcaacctccgcctcctgggttcaagctattcttctgcctcagcctcccgagtaggaggcatgcaccaccacgcctggctaattttgtattttttagtagaaacagggtttctccatgttggtcaggctgatctcaaactcccaacctcaggtgatccacccgcctcagcctcccaaagtgctgggattacaggcgtgagccactgcgtccagccagcaaaggaaggcagccttactgtggggtcctaattaggaacaaggagccaggctggtgggagcaagggaaagcagaaagaaaatacagataagctataaatctgcgtttcttcatagtctaggacacatagcccatctgcgcaaatgactcacgatcttcctgcacccagatatcaccagaccctcggttgatagaaaaatgcaagttagttcacagccaccttgacattatcaatactgcacttagccctctccagcacacagaacaagctccatcctataaaatccccaggaagcctttgtctcctccagtcagctcctctcttgctaactggcctattgctttcttgcaacatatttccatgcttttgctaataaatctgcatttctgtacctatgactgtcttggcaaattctttttactgcccgtgccackggccccagacagtaaccactcgtgacacaagggcattgactgggaagctttacagagagtgagtcttcctggtgcaggggtggagggtaattttgagactagctgatccctcaccctccctggaggagtggggactagttagtgaccagtggaactaactgtgccatcctgtaggaccccaatctgagctctctctgatttsgaatcctcccatttcccaccatgaacctttcctaggaccagagctttatttttctgcttctcacatttggattctcgtctttttatccttccctatttgcttataaagactgtccatgagctgggccatgtgtacatttttcttgctttttatggccttatcctggttggacttctcccatccagctgcttcttcacccaccaccaggtgactcctggttgagaggagaaataggctgagcacagtggcttatgcctataatcccagcactttgggaggctgaggtgggaggattgcaagaggccaagggtttgaggccagcctgggcaacaaagtgaacttctgtctctacaaaaaattttaaaaattagctgggcacagtggcatgcacctgtagtcccagcagcttgagaggctgaggcaagaggatcacttgagcccaggagttcaaggctgcagtgagctatgattgcaccactgcactccagcgtgggcaacagaatgagaccctgtctcaaaaataaaaattttttaaattttaaaataaagtggaaagagaaataaccagagccagcctccctggcagactgtcttgctcggaggcttcccagcactgtcccgccatatggtacatgagaagttctgtcatttcaggtgaaggggtgctggcacagagggcagatcttgtcatctgtggcttttttggctcctgggaagaagtggaacttatccctgcttgtctccatccccagcctgccattcataccaccagctctgctgctcagggacaagtctccatgaacaaccatatcgcagggaccagcagcaggctgtcactcattaaaacaacaacaactgcgtcagactctacatcgtttttcctggaaagtatccagattatttccaggctttttaaatgagtcctatattttttttcactgctgccaatatactctcttccatgcatggcgtacttgagcaacagacatcagcctgtctgcaaggtctgaataaccaccgtagagagatcctttgaatgtatggaacagatgatcagcagtgtccgtgggtgacagccttcaagattagttcttccttcctcttttaaaagcaattttctttgaatagtctttcggtttcatccatgcttctaatctagaatgaaaactacgtgactacgttttttctttytctttttgcttttgttttttcagaatcgagccattaagttgttacttaatctcaacaaaggccgatgacaatgtctaatattctaggaatgtgccaagtcgtcatcttggttttgttcccagctgaggcattttacttaattctaatcgttttggggcaggaagacgacagacagttacaaaagggaagactaaaacacaaagagaaaaaaccttgttcaaagtcatacaaataatttttaaaaatagaaataggattaaaagcaagtctcctggctcctcatccactcctcctgtctgaaaaatactttttccagttggttaaaccacatctccagaaccacttctctgtttgtacttgtaaggcagaattttctaattcatttctgggagctcattttgcagcctaggtattcagtctttgcacacagatgagaaacatgttggccgggtgcagtggctcatgcctgtaatcccagcactttgggaggccagggtgggaagatcgcttgagcccaggagttggagaccagcctaagcaatctagtgagaccctgtctctacaaaaaataaaataactagctgggcatggtggtgtgtgcctgtaatcccagctcctcaggaaggaggcaggaggatgacttgagcccaggaggagtttaaggctgcagggagccatgatggtgccgctgcaccccagcctggttgacagagcaagaacctgtctcttaaaaaaagaaagaaggaaaaacatgtcaactaagccttgccctgcatgacgggctgttcagctgggaagcagcaagcctccgcacacagccctctgctggtgacctcccaggccctcccaggcttcacttaaactctgctgtttgaggtgtgcacagaaggaagtattcttgctatcttttggttaactgagaactcatccacgtattgccactcataggaattagaaaaaactggccaggcgcggtggctcatgcctgtaatcccggcactttgggaggccaaggcaggtggatcacctgaggtcaggagttcaagaccagcctggccaacatggtgaaaccccatctctactaaaaatacaaaaattggctgggcgtggtggcatacacctgtaatcccagctacttgggaggctgaggcaggagaatcgcttgaacccaggaggaggttgcactgagccaagatagcaccactgcactctagcctgagcaacagagcaagactctgtctgaaaaaaaaaaaagaaagaaagaaaagaaaaaagtaagctacgctgggcatgcaaacagtgttaatgcagaagccactttagggtccaggcaccgagcctccgctcagagcatcaatgcccaccagccctcagtgctgcatgctccaggacggtgcttcccagaggttctcagctgatagagcagcatgtaaccagtgtggaaagatcaacctaggcacattacaattttagagagtttatccgagcagagggtgattcattaattggacagcaccaaactgcaagaggttcagggctccactgagggggcgtgaggggtaaacatttataaggtgttcttggaagcaagacaaagaaaaaatacttgatcagttaaagtggagagtctcagctgggcacagtggctcacacctgtaatcccagcactttgggaggccgaggagggcggatcacctgaggtcaggagctggagaccagcctggccaacctggtgaaaccccatctctattaaaaatacaaaaattagctgggtatggtggtgcgtgcctgtaattccagctacttaggaggctgaggcaggagaatcgcttgaacctgggaggcagagcttgcagtgagccgagatcgtgccacggcactccagccggggtgacagagcaagactctgtctcaaaaaaaaaaaaaggagagtctctcattagaaattagctggtgwttggttaggctcacgtttcattttactgttgacattgagttgggtttagtttgcttaggtcagaatcctaggcaaaacagccatctcagcctctggccacccaattgattattttctaacaccagctacagtagtatttcagagttcctcttccagagcccgtgtccctcaagtctacaggccatgcgtctaggtcattctgagctgcgtccacactcccacggtgactttctggtcattcctggggcagcttgagccatcagacaggacttgcgtatgacaggcgaccctgctccagaggccttgaattgctgtctcaggcagtgctggctggcactttgcaaaccgtgtactttcgtcagaattcccgggacaaacaaaacacccggctgttgctgctcagccttgatgacggcatctgataagtgatgagagcgtggcatcatcaggctgttggtcttgattattcaagtagttgagtcacaggctgctgttttcagcagcaaacattcaagtacttacggcatttgaagatgtgtatctggcagctttaaggtgctgacaatgtggggacctttctgaaatagtcccacaagagaattcttgaatgtcttgaagaaagatgaccagcctcttttgtgagtgtgcgtttagtgtatgtgaagttatggggaatggaggttactcattctattttaacagacagggaagtgtaaaagtgaagatgtgtggcatctctactcaccaactctaatcctattgtagtatctaccctggaaaaattatcgtgcaagagacatgctcataacatcattgtacaaaagaaaatattggaaataattcattgtccaccaacatgagaaaggataagtagaggggaacaatgtgatgaagacagtaaaaacccagaagtgtcatagaaatgaaggggagtgctcaggtccagggaccaaggtggctgcccagctcaagaaagctttgagccaggcatggtggctcatgcctgtaatcccagcactttgggaggctgaggcgggcagattatctgaggtcaggagttcgagaccagcctagccaacatggtaaaaccccrtctttactaaaaatacaaaacttagctgggcatggtggcatgctagtcccagctactcgggacgctgaagcagaagaatagcttgaacccaggaggtggagcttgcagtgagccgagatcatgccactgcacttcagcctgggcaacagagcaagactcaatcttaaaaaaaaaaaaaagaaagaaagaaaaaagaaagaaaaatttgagaggctggtagcctcagaatgaacccttgaaggagggcagagatggcttttcacaagaagtgttgggtgctgagtcaaggaggggtaaagtagataaaatagtggaagcaaaagcatgcgagtggaagaggcctaggtccccgagagtaaaggcaactgcattgaaattctttaatttttcataccatatgggagaagttgggaccaatttttttgcttcttgtaattgcatttgacatttcagaagagttatcccaacttggtatggtgactcacacctgtaatcccagcactttgggaggccaaggtgggaggatggcttgaagccagttatttaagaccagcctgggcaacaaagcaagcccctgtcttcattttttttttaattggcggggcatggtggcacgtgcctagggtctcagctacccaggaggctgaagtgggaggatctcttgagcccaagagtttgaggctgtaatgagctgtgattgcaccattgcactccaacctaggcaacagagtgagaccccatctctaaaaacaaacaaacaaaaaagcaaaaaaaaaaaaaaaaaaattcaagcaaatgtttgactttatcgcttccaaggagaacaagtgccagttttgtcagagaggaaatgcatgtccatctcctgggtcctgctcagaaccaaaggaagctgaagactctacaaatgcaaaagtgaagggaatggcaaaccctgagagaagccatacagagaaaggaggctgggcttcctgcagggaagctgtctttaaaaagggccaccgcctagcacctgcggatcaaagtgaatagggctgatgcgagtctcaatccccatattcagatatgcggggaaaagtgacttttctaaatgttttaaaacgcaaatcgaagcatgcattctgcctgtttggcctgcttgggttgcctcagtgtttccccagaacttacacaggaccaggtatctgtccactgggtgacccgtaggacaccatcatctgggtggggaccctttaggctggttgctgttggtggtcttgggtcctgcctggggacacaaaactctccacaagactgcccatgacctcctccgcttcagggcacccaatggccattttgttctagggtcttgtaacccccccccgtctcctaacaaggctttgtggcccccaaccaccccagcttgcagagagggtcactctccggtcctgcaggcaatgctcttcttcctcctgcttctggccaagacattttcctccgatactctgaattctttctcacctctggggtttaggcttttggaaacaaaagccagaaagactcttgggccatgtctggttttttgttgttgttgttgttgttgtctttgttgttgttgttgagacagagtttcgctcttgttgcccaggctggagtgcgatggcacaatctcagcycactgcaacctccacctcccgggttcaagccattctcctgcctcagcctcctgagtagctgggattacaggtgtgtgccaccacgcccagctaattttgtatttgtagtagagacggggtttcttcatgttcgtcgggctggtatcgaactcctgacctcaggtgatcctcccacctcggcctcccaaagtgctgagattataggcatgagccaccacgcccggccccatatctgtattttaacccatcacacccatcccttccttgaatggggaagtattggttgatatcacaaaatactatccagtctcatggttgaaactaaggatcctgattttcctttcaaagagttcagtatactccagtcttcctctctgatgaagttaacatacccggaagccttccagtttccaacagtgtcctggggagaggccattgtaaatggtctgcagcacaagtctgaagcacagattgactgccgcagctggttcctgcatgcatcagtggtgatcagagctgccacttcctcacagccccctgtgccgtaccagacagttttccaaacccttcactcacatgatctcatttcatctaaaactatgtcggccaggtgcggtggctcatgcctgtaatcccagcactttgggaagccgaggcgggcagattacaaggtcaggagtttgagaccagcctggccaatatggtgaaaccccatctctactaaaaatacaaaaattagctgggcatggtggcggacacctgtagtcccagctactcgggaggctgaggcaggagaattgcttgaacccagaaggcggaggttgtcgtgagctgagattgggccactgcactccagcctgggagacagagcgagactctgtctcaaaaaaacaaaaacaaacaaacaaacaaaaaactatgtcatggggtaagtgcattttacctattccacaggtgtgaaaaccccaggctaggagagataagacagctttcagaaagtcatgctgccaagtgacagagcctccctcaggtctgtgagtagcgatggtgcatttctcttcctcttgtttgtcatgagaaagtctcccagtcccaaagacagtctctaatttgggttctaagttctttttttttttttttttttttttttttttttttttttttttgagatagagtctcactctgtcacccaggctggagtgcagtgatgcaatctcagttcactgcaaactccacctcctgggttcaagccattctcctgcctcagcctcccaagtagctgggattacaggcatgtgccaccacgcccagctaatttttgtatttttagtagagacagggtttcaccatgttggccaggctggtccctaactcctgacctcaggtgatccgactgccttggcctcccaaagtgctgggatcacaagcatcagccaccgtgcccggcctggtgttctttatgaagctgctgtcttggcagcaatggtcacggaaaaggtcctatcagagagtgacgagtttgctcagtagacggtggggctggacattagygcagctgaggtctgaccacatcagcaggaccagaattaggtgagaatttaaagaggcactcggccgtgtctcatcgcacttgcaaggccctgagatagatcacctctttaaattctgtgttctaggtccctcactagcctccctctagtcccaggccctccctatgagctttgaaaagcttgggaaagtcaagagaatgagcagacaagtcacagattgggagaagacatttgcaagacatctgataaatgctgtcactcagaatacaaaagaactcttaaaactcaatagaaaacaaaacaaaacaaaatcctattaaagatgagcaaaagttttgaaaaggcatcttaccaaagatacaaagatggcatttgaagagaagctcaacatcatatgtcattagggaaatgcaaatgaaaaggaggagaaaccactacacaccatttagaatggccaaaatccacaaccctgagaatacacaaagcgggccaggatctgcagaagcagacactcttgttcattgctgttgggaatgcaaaatgcaacagccactttggaagacagtttggcagttccttacaaaacgacacctcctcttcccatatgstatagcaattgcactccttggaattttcctgggttgaaaacttatgttcacacgaaaacctgcacacagatgtttatagcagctttattcataattgcccaaactcggaagcaaccaagatgttcttcagtaggtgaatggataaataagctgtgaaacatccagaaaatggaatagtattcagtactaaaaaagaaatgagctatcaagtcatgacacaacatagaggagacttacatacgtattgctgagtgaaagaaatcagtctgaaaaggctacatactgtgattcccactatatgacatcctggaaaaggcagaattatggaatcagtataaagatcagtggttgctgtggtggaggcacctcctgctctgaatgtggcgttggggagggttgaataggtggagcaggaaactcctctgtgtgacaccataatagtgagcacctgtcattagacatctgtcaaagcccatagaatgtgcagtgccaagagtgagccctattgtaaactatggactttaggtgatattgatgtgtcagtgttgggtcattgatggtcacaaatggaccactctggtgcaggatgttcatgggggaggctgcgcctatttggggacaggagttatgtgggaactctgtactttgtgctcacctttgctatgaacctaaaactgctctaaaaaataaagtttattttttttaaatgccgggaagtttgcagaagaaggctaggaaaatggggaagaaaagtactgtcccagggcaagaggagaaagcaagggaaagggatatcattcttgtggctttgtgtgggtcacagggtcggcctgcaaaagacatcaatcttcgttccctcccccagagccccagagcccctttgccaggctggggccctgacctgcttcttggaaacccttcctcatcagcttggcagctgcccgcatccaccagcacctcagtgtgggtcctcagcaggctgtggttcctccttgaacctacgtttgaggtcagcggttccccacgttccagaaagtcagctgtgtgttgcagacattcccacaagctgcaatttaccagcaaccatcttctcccagtgttcaggagcctgtttgcaaatagcactactggccaagcaaataaccagttagctgaggagctgggagaggaaatggtagtggagccaaaggcaacaaggaaaccttctttgatctgtcttagcgctaaaaaaatctcataggaagcaaatgaaatgagaagcaaaattgcacacaatgttaagcaaaaccttgatactctggaacaaagacatcctgttttttaacaaagttaattcttcaggaatgtaaaaatgaatggtttgcccgaggaatggttatagaaaattcattcttcttgaataatgctaggagctggaatatgacagcttttgtcttttcttcagttaaaaaatgaaatggaaaactcaaaattatcattttcctctaactgtcactttctactttgtaaaaatagcctttctattgaaacaatatcatgtcaaaatggaattggcagccgggcacgggggctcacacttgcaatctcaacactttgggaggttgaggcgggtgggtcacttgaggtcaggagtttgagaccagcctgggcaccatggtgaaacccccatctctactaaaaaaaaaaaaatacaaaaattagccgggcgtggtggtgcgtggctgtaatcccagctactcggggggctgaggcaggagaattgcttgcacccaggaggcagaggttgcagtgagccaagatcacgccactgcactccagcctgggtgatacagcgagactccgtctcaaaaaaaaaaaaaaaaggaattggccacacagactgaagtactagatgatctttgaagggactgctagagccacgctcttcaggcatgtgcttttcacctgtactctggccaggcaaaggctcggaggaccctccgtcttcggctcacagcatttaaacattgtggagtttttgtgttattgtgatttttagatgtccattttgtctctttagtagagaatcagatagataatagaaataatcattcttccctcagctttttgcaagctgggaatacagagatgtgcatgaaagaggaggtctttctcctaccccagctgctggttgctggggagacagcatgatgaggggggctgctgtggcggaggcaccccccgctctgaatttaaaaggtgaaagtggtcaggaaagatcctctggaggtcaggaaagattccctggaggtcaggacagctgatgcaaggtatgggagtggaataggtgctcaccagacaagaaaggaagagcgttctcagcagagggagtggcatatggagagcccaggatggagcaagcccgctacagcccgtctctcctgcagactgcagcaaaaacgctggaaaaatataaaaagcaactccctgaggactcacgaatcacataagagcatgtggattggggaggacaggcagaagccacgaagtcacctgtgtggatgggagtgtcctttacatttgttttctccttattcttgtggctttgacctgagtgggcccaagagcagggctgcagcggtggccgtgcaggtagcgaatgttctgatggaaaccccacatggctggcgagaggaactggggaaagggaaccctgtgatccttttttttctttttctcctttctctcacagctttgccccaagaacgggccccagttcagaattgcacagtggtggctgcatgcaggctaaatctccaagataaaccctgtctttctggtcagggaaacaggaaaaggtgcccttttgaactggagggtgtggcagaaaccctggagaggagagagtgtgagaagtggatcatctcattcttttttatttttttcttgaaacagaggctcgctctgttgcccagggtggagtgcagtggcgcgatctcagctcactgcaacctctgcttcccgggttcaagcgattctcctgcctcagcctcccgagtagctgggattacaagcatgcaccatcacgcctggctatttttttttttttttttttttttttttgagatggagtcttactctgtcaccaggctagagtgcaatggtgcaatctcggctcactgcaacctccacctcccagcaggttcaagcgattcttctgcctcagcctcctgagtagctggggtccaccaccacacctgactaatttttgtatttttagtagagacggggtttcaccatgttggccaggctggtctcgaactcctgacctcaggtgatcgaactgctgacctcaggtgatccacccgcctcggcctcccaaagtgctgggtgagccacctgacctcagrtgagccaccgtgcctggccgaatttttgtatttttagtagagatggggtttcaccatgttggcccagctggtctcaaactcctggcctcaagtgatctgcccaactcagcctcccaaaatgctgggattacaggtgtgagctaccgcgcccagcctcatctaactctttttatgaaccacaaaagttccagcctcaccccttagctacacatgcttaggacagaaccaaagtaacatagcaaaagctttgagaacagaattaggattcataccactactcacgtctcttggagttgcaaagactaaaaattaagctgagatcagaatctaacctcacctaatctaacaacacacttctaaatagcccatggttcaaaaaggaaatcaaaagagaaattagaaaatattttgaattgatataaaaatgtgtgggactcagtgattaaagggaaattcataccattaaatgctgattttatttcgtttcatttttatagaatatagctttatttatagaatcttacaaatcatttacagtccacataagttaattttattttctaatttcttttcataagagctgagttattttttaaaacaatgtgctggaggccaggtgcggtggctcatgcctgtaatcccagcactctgggaggccgaggtgggaggatggcttgaaccttggagttcgagaccaacctgagcaacatggcaaaaccccatctctactaaaaatacaaaaattagccagacatggtggtgcactcctgtagtcccagctattcaggaggctgaggcaggaggctcacttaagcccaggaggtcaaagctgcagtgagccgtgatcatgccactgcactccagcctgggtgactgagcaagactctgtctccaraaaaaaaaagggtaaaatactgcagtggaattgcagaactgtaaagggaaatatgaacaataaaatcctctcacacaaatatcggacaacttttttttgccaggtgcagtggctcacacctgtaatcccagtatgctgggagactgaggtgggcagatcacttgagttcaggagtttgagaccagcctggccaaaatggtgaaaccccatctctactagaaatacaaaaataattagccaggcatggtggcgcacacctgtagtcccagctactcaggaggctgaggtgggaggatcgcttaaacccaggaggcagaggctgcagtgagccaagattgagccactgcactccagcctgggtgacagagcaagactctgtctcaaaaaaaaaaaagaaaagaaaagaaaaagaaaaagaaaaaaaggaaagaaaaaagaaaaattaaaaaaaattagacttttttttttttttttggctaatctccagcatattaccatctcgtcagaagagggcttactaagaccagatcttaggcaacccaaacagagcctccttttttttaaacccaaggtgacggaccaatgaggaatagcccccaaaattgacattagacacaaaatacctgtaggarcaaggacaggggcagcctgcctgccagtgactaggtgagaaggagcagacacctggtgctggcttactgttcctgcatgtgacatgtactttccttggtaacattaacaggggctggtccatccagaaagaggttgaagctactaatgccaggggtgaaaagtctttagaacaactggctattccttagacttctagatgtacaaatgcttaaaacagcacatttggccgggcgcggtggctcacgcctgtaatcccagcactttgagaggccgaggcaggtggatcacgaggtcaggagatctagaccatcctggctaacacggtgaaaccctgtctctactaaaaatataaaaacttagctgggcgtggtggcgggcacctgtagtcccagctacatgggaggctgaggcaggagaatggcatgaacgcgggaggcggagcttgcagtgagccgagatcacgccactgcactccagtctgggcaatagagcgagactccgtctcaaaaacaaacaaacaaacaaacaaacaaactgcacattcaacacccagaagtccaactcaccaggcaaagctgttgccaacggcaacttacagtcaggagataatatgactgtctccagccccactaagttccgactaggactgacctctgcacccaaagagttttgtgttgttttgttttgttttttgaaatagagtttcactcttgtcgcccaggctggagtgcaatggtgtgatctcggctcaccgcaacctccacctccccggttcaagcaattcttctgcctcagccacccacgtagctgggattacagacgtgcaccaacatgcccgcctaattttttatatttttaatagagacagggtttctccatgttggtcaggctggtctcgaactcccgacctcaggtgatccacccacctcagcctcccaaagcgctgggattacaggcgtgagccaccacgcccaacctccaacgaaagttttaaaaggatttccctttgaggtagctgtctatgaaaggaaatttcttaatatagctgtgcacaaaagagaaagcaccctattatttcatattttatttttcaatttgttaaaggttatatttttgagctcctctcctaaacaagaaacctgctaactctaacttagtactttcttctccaaaacaaaggctattatttttaaggtataagaagatctatagggaatgctaaaattatacatttaatacatcgatgtgagttagggaaagcaaaatcttccagagtcataaactttgagtgttattttctggtagctcctgaaagcagttttagaaaaataaaacagaaaagatgaagaactgtttttataacaataataaagataatataaaaagttagatttcaacattcaaggaattggtttttggttaacctggaccataatcctatcaggagtcagtcctgatatttcatctagaatctcaatcactgaagttttcctccctcttcagcctattctcaaatctattgaagtcaacaggcaagataaggagagaaacttgtaatatcaccagcagtttccttgctcatgctcttttcaagaatatccctggtttgagagatgtctcccaggaagggaaaacaaaactgatgcttttttgtttttttccctgagacagtcttgctctgtcacccaggccggagtgcagtggcgcaatcttggctcactgcagcctccacctcccaggatcaagtgatcctcccacctcagccctgcaagtatttgggactacaggcccacaccaccacacccagctaattaatttttgtgtatatatatatgtgtgtgtgtatatatatatatgtgtgtgtgtatatatatgtgtgtgtatatatatatatatataaattttttttttttttttttttttttagagacagcgtttgcaatgttgccgagggtggtcttgaactcctcagcccaagtgatcctcccacctcagcctcccaaagtgctgggattacaggcgtgaactcaccacacccagctgatgctgcctttaatgactaagagtggacagttttctgtctaagaagatgaaaaactcactggcggcgtgcagtggctcacgcctataatcccaacactttgggaagccaaggtgggaggatcacttggactcaggagttcgagaccagcccggccaacatggtgaaaccccgtctctactaaaaatacaaaaattagccaggtggggtggcacatgcctgtaatcccagctactcaggaggctgaggcaggagaattgcttgaacccaggagacagaggttgcagtgagccgagatcacgccactgcactccagcctcggtgacagagtgagactctgtctcaaaaaaaaaaaaacaaaaagattaaaaatttaggcaatggcaatgaagcagtactcttgtgaatcatgcacacgaatcagtttgtgaacacagcccctgggctgcaactgcaggcaccactgagaaaggcttctggagagtctggcttcccaaattggctaaagaawctcatgttatccatgtgatagtaataaatcgattcacacagtgagccctgcagattagctttccttgaagccagagttctgaggcaagggatccagcgtgcctgaggctggcccacggttttacagacaagtatatccgtccattttctgggcagaatcagagcaattcatattcatattcagttcaacgaaggattccactttttgtgtgtgtgtgagggaggaagcggtaacctacacaggtgattgaaagcccatctgtagcataatcaytgggctgccattctgcaaacatctgcagtgccccaaactaagtttgtgaccttacatttcagagacccctgttattcatgcttttatttatggaagtagcaaatcctaaattttgcttgcactgattccatttctgattacccttgtttaagcagagcataaactgcattccaattctaccagtcagcttgccactgtgcagatatctccactaggggaggatagtttgtgcagtctgccttctaacagagatgtctgaaatatgctcagaatgtgcttttagggaggcagctcccaagtcttgtcttgtcttttcttttctttctttttttttttttttttttagatagaggcagagtctcactctgtcgcccagggtggagtgcggtggcacaatctcagctcactgcaacctccgcctcacagattcaagcaattctcatgcctcagcctcccaaatagctggaactacaggtgcacaccaacacacctggctagtttttgtatttttagtagagatggggtttcactatgttggtcaggctggtcttgaactcctggcctcaggtgatccacccacctcagcctcccaaagtgctgggattacaggcgtgagccaccgcacccagcctgcaagtctcttagaagataggagtggggaagggaagtgggaatcacagcaaaacattgtttccttgtagactctctgaccttccattctgtcagtgttgacctgaaagaggaggtccaggaagctacattacctccacattagctcacctggacagccaggaaataccaggtgctgcccccaaatcaatacccagcattctgctaggagcagatgagcaaaatgacaagacacagagcatccgtcccactttctctcccactccggatgatccctgcctcccctctcaccctgtcatctgttctcacttagaattctctctgagagaagtaataggcaactaagcagactttgaaaaaataagagggattcctgcatcttctctgtaagaagaggtgaacctgtttcaaaactggccagccggaggtccaggatgcccagccaatgtcatgggccccaaactatggattcacctcttgatatttctaaccaagttaaaaccactggctgtatttttgcattgtcaggtaaaggattcaaaatctttcggcactgggcagggcacagtggctcacgcctgtaatggcagcactttgggaggctgagacagatggatcacctgaggtcaggagttcgagaccagcctggccagcatggcgaaaacccatctctactgaaaaaaaaaaaaaaaaaaaaattagccaggtgtgtttgtgggtgcctgtaatccctgctactggggaggctgaggcaggagaatcgcttgaacctggaaggtggaggtttcagtgagctgacatcgtgccactgcactccggcctgggtgacagagcaaatctccatctcaaaacacgcgcgcacacacacacacacacatctttcagcactggttccaagggaaagaggcgagggtaatcagagaaaaaggcttgtcttgcaagctgcattcaggttccagagtcacagagagaaaaggaggtgaggagagggtgagaggtactacctggagactggttactagggacgtttcttcctaggacagagcattgtaaacaccgctgacatctgaaggcgggaatacaatctgtgtaagtttttcatggaacaacctcttccacggtgctttgtggatggcgagtcctcaggccagggatcgggcagcccagggcctgacttcscatcccacaggctcctggcagggccctacccaatctggatctgtcctgaatatatcacgaggaccagcatgacggtgaatctggccaacagacccaggttctgaatgacaaaggggatggagatgctgcccttcctcccatcctcttggcagacctcattcgtctcagggaacatatcaaccacagcaatattcaagaacattcctccaaccagcacaaaaattcagttggcagagaagtggctgctggccaggatgccaaaggccagacccacatagcagcaggcggaagggggttgaagaagacagtgctgaatggtcctcctagcgctaagcaggatgacaaagtcatgtgggaactcctcatggaagacggccaccaggtgccgaggccttggaccacacagacggtgaaagaggcgccagtggccaggctgctgaggacattgtggaggctgttgcttagggtgatcacccaggccagagtgctgataaagtagtggacacctttcagctccagcaggcactctggggagcctgcagaaccagcacagagagtgagcccaccacgaccttcccatccatcatrgactgcttgccatccagttcactgtggcagtgctgagggctcatgtggtccaggtccccattctgcagcttctccatcacccccctcctcctggtgcttcttggaaggaagcctctcagaggcataatggctatgtctatgtgatgttcattttcctgtttgagaaacatcttcaagatctctgaaaaataaaaataaaagcccccagacaccactgcagacttggacacataatcatcttccagagggttgaaatcaaaagccccaggaatgagctaggagagcacattggactagaggattccaatcgccagagctatgacgtggagcagcagcttccttctgtaaaaggccttcttgaaggcaccacgatggtgcccatgagggagcagagggagatgacagtcacatagaggagatcgtatccccacacttcagttgcactagatggtcatcccagcattgaacagcatgacagagaatcctttttcttgccttatccagcttctagaggctgcacactccccttcgcttgtggcccccttccaccttcaaagccagcagtgtagcgtcctcagatctctctctgactctgacactgactcttctgctcgccctttcacttacaaggtcccttgtgataatccatggtaattggttccaccaggataatccatgataatggtcacacagaggagactatatccccacacttcaattgtgctcagcctcccctcttcgatctatgcattytctcgttctcctggtccacagaggtgcgggccaggaatctagctcctggagaatggcggcagagctcctggagctcactccttccaatccatgactgccactgaaattgtgggcagcaaagcagtctccagaactaaagcacatcgagaggttcctctgtccctgcatgggctcagtgaccttatcccacctcactcccaattccaggtagttgagcaggatgaggctgctcccagcccactgccacatccagattcagctgctgagtttatcccacaggaaagaggtagcactgacagcgtgcacgcctgtgggtgacgcatgatcctcaggagcagttcaccatgcgctgagcagggccagtaggaggcagctgtggaaggccaggtacagcagcttcatggtcaccaaataagcctgacactcaagcagacagcagccacccccatgcagcctcagctgcagggccccagggttgctggctacggcaggagcagctcagtccatacgtctgcacaggcacccatctgcctgaaccctgatccctgtgtcaggcaaaaatgtttattttagaaaaaaaggaaggtctctctaatcactgacctcagcttttgctttaataaactaaagagagagagagagaaattcaaaagaagcagagaaaggaaataatatagaataataaagcagaaatcagtaaaattgaggacagaaaaaagagtcaatgaaaccaaaagctgcttttgtgaaaagagtcataaaaataaatctctagccagaccatccaagaaaaaaaaaatacaaatgaccaatatcagaaatgaaagacggaacatcactacagacctacatacataaaaaggatattacaaagaatgttatggccataaattcarcagctgaaatgaaatggataaattctatggaaaacacaaacaascaaagatcacacagaagaaatggagaatctaggccaggcgcagcggctcacgcctgtaattccaacactttggaaggctgaggcaggcagatcacttgagctcaggattttgacaccagcctgggtaatatgatgaagcccgtctctacaataaatacaaaaattagccagtcgtggtgactcacacctgtggtcccagctactcaggaggctgaggtgggaggatcacttgaacccaggaggtgaagattgccagccttatatgtcaggactgcttgaaaggttcacacaccctcttcctctgctgcatgagaacccaaccttggcaactacctagctctgttaccctgtattgctgccgtagcaagttaccacatgcttagtgacttaacaccagtttattatattacagttctagaggwcagaagtccaaaatgaatctcagtagggtaaaaccaagctgttggcagagctgtgtttcttcaggaaacaccaggagaaaatccttcttgccttttccagcttctagaggctggacacttcccttcacttgtggcccccttccaccttcaaagccagcagtgtagcatcttcatctctctctctgactgacaccgactctcctgcctcactctttcacttacaaggccccttgtgattgcatagggtccactaggataatccatgataacctgcctgtcttaaggtcagctagttagcaaccttagttaattgcatctgcaacctaaaacccccattatcatgttcacaggttctggggagtaggacacagataactttgggaagccattattctgcctgcctcaccctgtaaaccagttaagatgctatatgtcaactacattgccaggcaacattgcttatggtaaaaatggcccctgactggtgaattacatatggactgggagtagctaggaatggaatttaaatatctgatgtagacgccatgctttgaacttctcagcattttggtgactgctatggtctgaatgtttgtgacccccccacccctccaaaaaaaattctgtgttgaaatctaatccccagtgcagtagtactggggctttaggaggtgattagatcatgggggcagagccctcatgaattggacttgtgcccttataaaagaagcctgaggagcctgtttgccccttccctcatgtgaggacacagtgagaggtgaacagtctgccgcccagaaaagggcccttgtcacaacctgaccatgctggcaccctgagcctgaatttctaagctcagggaactgtgagaataaattttgtagtttaaaagctacccaggacrggcatgatggctcatgcctgtgatcccagcactttgggaggccaaggcgggtggatcacttgagcccaggtgttcaagaccagcctgggtaacatagcgaaaccccatctttactaaaaatacaaaacttagccaggcgtagtggcgtgcacctgtagttccagatacttgggaggctggggcaggaggatcacttgagcctgggatgtcaaggctgcaatgagtcatgatcgtaccactgcactccagcctgggtgacagtgagaccccgtctccaaaaaacctacccaatttatggtattttgttatagcagcccaggtgaaccaagacagtgacgcttgtgaaagtcacgtccccgagatactgccctgtggtgcgcatcttcccacgcagaccctgcacctccctgtgaaggccccgtctgtttgcaccatgaccatcacatggggctaagataactcctggatgttacatactctgctgtgagaaattctccaggactcctcacacaaggcagcctggcattgttctgctggcaggccagggcctctgtccccatccttctgaatagatcggagcacgttctgtcatcgtcttgtgagtctgaatgtctagtcaatcttcgacgttgtcctgggctaaagaggggctgtcttccatctgataaccaatgaggagccaacccttatatttgtaagtacttcgttttctttttctttctcctcttttttttttttttttttttttttttgtgagacaaagtctcactctgtcgcccaggctggagtgcagtggcacaatctcagctcattgtaacctcaacctcccaggctcaagcaattctcatgcctcagcctcctgagtatctgggactacaagcatgtgccaccatacctggccaattttatttattttttgtagagatgaggtcgtactatgttgcctcggctgttcttgaactcctggactcaagcgatcctcccgcctcgacctcccaaagactgggattacaggcaagagccaccacacctggccaatacttcatcatatatactggcaatgctcaggcaaccctgttaacagtcgaaactgagacccacaatggttggtaatttgcccaaatttgcccagaaagttagtgggctctttcccccttctcaaatatgctaaaaaacaacccacctgcttggcaacattgtctaatgcgaagttgggattagtgcccagttcttcaaaagatctttatggaccctaagtcacagatatacatccaaccaatggtcaaatctactcactgacttcctgctggtgctgggcactacatattcaagaatctcggtccagggaggacgcaatggcccacatgtataatcccagcacattggtaggcaaagtgggaggactgcttgagcccaggagttccagaccatccagggcaacatggcaagaccctgtcctacaaaaagtaaaaaataataaaaattagtccagcatggtggcacacacctgtagtctcagctactcaggtggctgaggtgggaggatcacttaagcccaggaagttgaggctgcagtgagccatgatggtaccacttcactccagcctgggtgacggagtgaaaccctgtttcaaaaaaaaaaaaaagagagagagagagaatctctgccctgtgggtaactacattttatctcttttgcagtgcttctttttattttttattttttctttgagatgaagtctcgctctgccgcccaggctggattgcagtggcactatttcagctcactgcaaactccgcctcctgggttgaagtgattctcctgcctcagcctcctgcgtagctgggactacaggcatgggccaccacgcctggcaaatttttgtatttttttcagtagagatggggtttcaccatgttagccaggctggtcttgaactcctgacctcaggtgatccgccctcctcagcctcccaaagtgttgggattacaggagtgagccaccacgcccagcctcttgcagtgcttttttttatcttgacagagacacatggccagggtgagagaaagaggaaatcagcagtttggtaggaatttgaaacaggagcctttttctagcaccttgaataggcaatggtaggaaagtcagaaattaatcaaaaatgataaagacattcgagaaagacacaggaaccagcttgaaggggctcccactggccaaatccaggacaatttatacatcaaaataaatactgatagtaatgaattgtagcctactgaataaaacagaaaaccctgagtgcctcctaatagcagccaataattgaatatattgaaagtttgataaggaacaagtttagacagtttcaaggtatctttccacaaattcttattcattacaaaaataaaaagtaactacagtgaagaaacttggcagacaccaccttaatcacgtgatgacaacgaacatcattaatgggacaaggtgacatcttgggctactggataggatgcaatgagaagaatgcagtttgtcttctgtgatgttcctggcaaaggataacacctgcatcttatgaggagacagaaaagaagcccgaattgaggggtgttctacaaaataacggccgctatcttggaaagtgctgtgggtcgtcaaagtcaaggaagggctgaggggttaaagaggcataagaactccatgtggcgtgtgattctcagctgaatttactaccgtgcagggcattactggtgcatttgatgaaatctgaatagcgttagaggattagatgatggtaacgtatcaataatagtttcctaactttgatggctctatcatgtctttctgtgtaggaaataagaagtattcagggctgacaggcagttaggttgacatctcccattcaagtggttcaagaaactttttttttcttttctttttttgagacagggtctcgctctgtcattcaggctggtgtgcaatgacgtgatctcagctcactgtagcctcagcctcccgagtagctgggactacaagtgtgtgccaccacacccggctaattttttttgtagagatggggtttcaccatgttgtccaggctagtctcgaactcctgagctcaagtgatctgcctgccttggcctctcaaagtgctaggattacaggtgtgagccactgcgcccggccaggaaacttttctttatgctatacttgcaacctttctgaaaacttgaattgttacaaaattcaaaatatttaatgttaagactttttttttaaagtaaatgatgccaacaagcatatgaaaagatgctccacatcattagtcattaggcaaatgcgaatcacaaccaagagagggtaccacttcacacccacgaggatggctataacccaaaaagtggaaaataacatatgttggcaaggatgtgaagaaattggagctattgctgatgagaatgtaaaatggttcaaaataggtactcaaatacatgttcgtggcagcattattcacaatagccaaaagatggaaacagcccaaatgtctatcagcagatgggccgataaactaaatgtggtgcacctgcatcatggaatactcttcagccataaaagggaatgaaatactgatacatgctacaacatgcatgaatcctgaaaacattacactaagtgaaaaaagctggccaggtgcggtggctcatgcctacaatcccagcactttgggaggccaaggtaagaagatcgcttggagccaggtgtttgagacaagcctagacagcaatgkgagacccctgtctctatttaacaacaacaacaaaaaaaaattgaggagccagacacagtggctcatacctgtaatcccagcactttaggaggccgaggcgggtggatcacctcagctcaggagctccagatcagcctggccaacatggcaaaaccccgtctctactaaaaacacaaaaattagctgggcgtgatggtgggcacctgtaatcccagctactcaggaggctgaggcaggagrattacttcaactcgggaggcggaggttgcagtgagccgagattgcaccactgcacttcagcctgggtgacagagtgagactccgtctcaaaaaaaaaaaataaaaaataaaaaactaagtaaaaaagaaaacaaaggaagaatccagtcacaaaagactgcatattttgtgattttatttatgtgaaatgtccagaatgggtaaatctgtagagacagaaagcagactgttggttgccaggatctgggaggagcgggaagtgaagagaactgcttaatggagaactgcttaatggaatgaggttttattctgaaggtgtggacgtgctttggaactaaatagtgttggtggttgcacaacattgtggatgtactaaacgtcactgagttgctcattttaaaatgattaattttattgtaagtgaattgaacctcaatacttttttaattcaagcatttcaatgtgaatttggtatttttttaaaaaggaaatggtaagygataaaacatagttggcagcagctggcagcagcctttagaaacagcatttcctggccaggtgcagtggctcacacctgtaatcccagcactttgggaggccgaggtgggtggatcatgaggtcaggagttcgagaccatcctggccaacaaggtcaaaccgtgtctttactaaaaatacaaaaattagctgggcatggtggcgtgcgcctgtagtcccagcaactcaggaggctcaggaaggagaatggcctgagcctgggaggcagaggttgcagtgagccaagatcacgccaccgcactccagcctgggtgacagagcgagattccatctcaaaaaaaaaaaaaaaatagaaacagcatttcctgtagctggtcccagaggatggagtcacctcatctttcttggacagcctcaaagtcccacatcagaatggrctaaagtgaggggagggggctgggccctgtgctgggcaggagacaccctcccggagagaggcagggaggstggcctcatgacttctgctcttgtggctttgctctgaagtaggaggctgcaccctaaccctagcaagaatactgaaaagccgtgccgatgggatggcatgaaagggagtcaggctgggcggcgtggatggatgaactgctgcgaactcattctccctgatcaaagcgcgtgacccactaaattcacactggtggttttctactacagagtctgtgaagtacaatgcatttgcttcagataattcacagaaccacttgtctgcatgctttccgctgtaggcggctgcctcccgagagtaggccccacggtgcacccagtggcgatggccagcaacctcattgaacaacacactgtccatccgtgctgtgtaatctgatgttggtggtgacaccatagctcatctgtcacttctccatttagcaccatttcaatatttggtctggaaagaataattagttttattggcactaagtaatcttttacctccacaaatctgaaaagtacagattgaagaacatagaaagaaaccttcagggctgggtgcgatggttcatacctgtcaycccagcactgtgggaggccaaggcggggggatcatttgaggtcaggagttcaagaccagcctggccaacatagtgaaaccccatttctactaaaaataaaaataaaaaaaaattagctgggtgtggtggtgcgcacctgtaatcccagctactcatgaggctgaggcaggagaattgcttcaacccagaaggcggaggttgcagtgagctgagatcacacgactgcactccagcctgggtgagactctgtctcaaaaaaaaaaaaaaaaaaaaggaaagaaaggaaggagggagggagggaaggaaggaaggaagctagctactggagaagtgagcatgcggcttccttcctctgctcgcccccccatgctgctttgggccaaaggctctgcacgcagcccagccttctgacccatgctccccctggcccatgagcctcccacagccaggacttcccctgcccctacaagtcatgagttgctcagctccgtcttcagcccaaactccctgtgaattccatctctatcagtcctcctgtctgctggccatgtgcttctcagtttcccaaaggcctcctaagttcagcctggccctatgtgaactctgcaccccattccacttgctcttttcctaagcgtgcggaacagcacagcaccatctccctggtggtcagcccagatatgccttcctttcccccctccccagcatccagatcctaaccacatcccctggctcttccaccctcaccacctggctctccaccccgtctccctaccagagccagtatctagactcccatggtttcctcattggtctgtttgatttttcttttttttaagacggagtcttgctctgtcgcccaggctgaagttcagtggcacgawctcagctcactgcaacctctgcctccygggttcaagcgattctccttcctcagcctcccgagtagctggggttacaggtgcatgccaccatgcctggctaattttttgtattttttaatagagatggggtttcactatgttcaggccaggctggtctcgaactcctgacttcatgatccgcccacctcggtctgcttgtttatcttgttcacctctgatccattctccacactaggttgaagtgacctttctagaatgtaacagcagagcatggtggtacgcctataatcccagctacttgggaggctgaggccagaggatcacttaagcccaagagtgcaagaccagcctgggcaacacagtgagacccwcccccccacactctcaatcaaaaaaataaaatgtaacagcaatctttttacttctctgttaaataacccttcatttgatgacacctgcctacatgataccagtcccacactcttagtgtggcactcaaggcccttcctggtctgctccctgacctcctgggcttcaggaataagggaccacccagggtttcctgaaagtgccaggctggttctcagttgctccgtctttacccatgctgcaacaccacacttgcatgggacttctgcctggaactccccctctctgatcacagtgcctagtgggtcccattcatcttcctaggctcaaattgagtataaagcccttcctaaccttctccttacctgaatcgatcatctccttcttggcccctctaccctttactgacctctgtggtagcaccttgatttgattgttgagtttgctgctgttagttttgtctccacataaatagaaggcaggaatcacgggccaggcacggtggctcacacctgtaatctcagcactttgggaggccaaggcgggcggaccacctgaggtccagagttcgagaccagcctagccatctcgactaaaaatacaaatattagctgggcgtggtggcgcatgcctgtaatcctagctacttgggaggctaaggcaagagaatcgcttgaacctgggaggcggaggttgtagtgagccgggatcgtgccgctgcactccagcctgggcaacacagtgagactccatttaaaaaaaaaaaaaaggcaggaatcatattccacctccacccacttcctcatttcttcagtgagatgcctgacatagtatgtgtttaatgaatgaatgaatgatatggggttctcaccttatttttgctgctyattagctatttaatggctttggacaaatgacttagctggccggatctcaattttctcattttacaagtgaaaaaaattgaggtgagtataggttayaaattctgcttctcagttcatgctcccatcaccctgagatacattcctctcccacagccatgaaacgccatacaattgtcagagaggcgtttcttgtaggtattacaaagaacaacaacaacaaaatctgattctttgtagtagtgagcacagacttgtggccacatttctgggttcctgactatactgagttcagagtttacccccagaattcatatatatccagaacttcagaatatgactttatttggaaagtgggtctttgcaaatatgattaagttgaggtcatactggattaaagtgggacctaagaccaatggctggtatctttataaggagcgaagatgacacggtgagacacagagaagtgggttatgtgaagatgggggcagagattggagtgatgtctacaaatcaaggattgaatgtcaagtgttatcagaggtcaccagatgataggaaaagatgaggaagaaggattttctcctggggccttcagagggagcgtraccctgccaacaccttgattttggacttccagcctccggagctgtgagagaataaatttttgttgcttagaaccacacggtttgtagtaatttgttcccacagctctaggaagctgagacgtggcccagccacgccatcgctcaactaccttttcgtccccygtgtggtgatctgcccacttcagtagagctgcgatagactcgaatgacaatgaattcattctagactgtaaggtttatagactgtacaaacacaccagacacaggtttgtgttcctccatacgtgccggtcaacaccgtggtccagtttgagtaacttgaataacccagcagtcagaaagaattaacatcacagtcagtaagggctgatgtaagagcctcaggccacgagtaaacttctaacatcttctcctgttgattaagagttttgatttytacctgcaaggccgaagcaatggtcagggagtgtctgggtggccagctaggtgagggagtggatagcgtgaagggtcccacggaaggtggatctagtttctctttctgttgtttattctgcactaatttgtcaaatgttcttaagtataaccgctggtctgccaatcttctctaattttcttgaccttaataaggaccagataaggtgacaggtgaccagcaggccccagcgtcgttcggaccccgcgtgctcttcctaagaaactgtggttgtctctcaagtccattacaacccatgccctgcccaaagcttcgaatccctggacttgtttagcatctgtgtgattaggtgttattagaccagctggatgctatcgggcactcaagatgtaagttgagtaattgagacccatactgtaaaatgtatcaagcttgcctatcacagtacttaatttgcaaagtggttgaagtcggagtggggaagagtcatccccctgcgagggggacggtgttcctactgcaaacgtagagccctgggtgtctgggtgggagggcacctcgttccctgcactcccttcaggggtcaggacattcagctccagcctaggatgactgagaaacagcagaattgatcatgtggtgctaaaatgccaccttacacatccacgtgtacagatagaaaggctgtgccctttgctgccacagcgattatgacatccaggtgaattaggacttcccctgccttttattattattattattattattattattaattattattatcattattgagatagagtcttgctctgttgtccaggctggagtgcaagtggcgcgatctctgctcactgcaacctccacctcccagactcatgcgattctcctgccttagcctcccaagtagctgggacttcaggcacctgccaccacacctggctaatttttgtatttttagtaaagacagggtttcactatgttggccaggctgatctggaactcctgacttcaactgatttgcccacctcccaaagtgctgggattacaggtgtgagcaaccgcacccggccctcccctcccttttagatccctgtgtggaagcgaacgtgacctctattcttgagggaatgccaagatgtcaactcagttagtgaaattcttgtgacaattcaaagccaatttttcttacagctgaaaggggggaatcttaatgctcacgatgaacgctaggagaacccagcctgaatgttggtgcaaaagcagtgctatctggtgggcctagcatctaacagaattttagggtaaaatgttagaccctagaaataaacacagtttcactaggtggaatccttgttagacctgagtgcctcattgtattgagtttcccaaatacaagctcttaaatgagtacttctgtctcaggtttaaaagcattttcaaggcagccatccagtatactaacctctgttgaaatactgtatcggttagtgagatgcaaagctgctgtgacmaagagacgcagaaacacggtgacttaaagagtgtggaaatgtatttcactttctcatatgagcccagaagtaagaagccaggctaacggggccgctcagctccagggggaatttggggacgtgggctctttccgttttgtttctctctcgtcccccaggactgtgcttctcagattgtcttgagcatcagaaccacctggaggccttgttaagcactttcccacgcccagagcttcttttttgttgttgttgttgagatcgggtctcgctctgtggaccaggctggagtgcaatggcgcgatctcagctcackgcaacctccgcctcctgggttcaagtgattctcctgcctcagcctcttcagtagctggaattataggcacctgccaccatgcctggctaatttttgtatttttagtagagacggggtttcactatgttggccaggctggtctcaaacttctgacctcaggtgatccacccgcctcggcctcccaaagtgctgggattacaggcgtgagccactgtgcctggccccagagcttctattttggtaggtctgagtgggcccaagcatttgcatttctgacacgttcccaggggacattgatgcctccggtccagggaccacacctggaggcaccactcaggccactgtcctcgcctgcccttgttgaacttaagctgtagacacatccacgtgtgatgggaaagagctcagaggtccccaaatgatatctgaaagcccaggcctggaagcggcacccatcatttccactcattcatcgtcggcatctccattggcaagacgtgagtcacaaagccacacgtagctgcaagcgaccctggggaatatctatccaggggccacctgccctgtcaccatgacattcctgtgagaggaaggggagcatgggttctgtggacagccagcccacatacacccatgacaatatgatcattgcttatttatacatctctccctcagcacctgagctctttgagggcgggcaagtctcattccatcttacggcttcagaatctatcatagaaagcaatgtagatgctaaagtccaggtcaagttctttggttatacactgagagccgggcgcctccctcataagaatattcatggatcagcatggtgattccagcagtccatggcgcccctcaccaggcagtaagctctgtgagagcagagacctcacacctgtgcctcaaagccgagcaccactagggggctcctcttttagatgatttaattaattctagtagccacatctttcatccattgcttggaatgtatttcagatgtcagcccaccagcytatcccataccctaacaaggggttttagacaccttccctgtatcatcactgtttctcaaagtaaggaagttgttggagccatcagtacatctgcatgactctgggtcattacccttcacaacccagagttaatttagctccatttaagaactgaaacagcagcagccatggggaattaaagtctctgttgaagcctcagtttattctttcatgcacaccagagtcacgttcatagggactggctacggcgtgcccgccctatcttggcaatgggggcacagaagctaaaaaaaacaaggcctctgcccttgaggggctcccagttagctcatggccagccagtgggccttcccactacctcacaatgaaacacagcaattttttcaaagatgaatatattttcttcttttgagagggaagaaaagcttttgaaaacatcatggtaaaatttagtgctattaaaaagcagctttcagccaggagtggtggctcatgcctgtaatcccaatgctttgggatgccaaggtgggaggatcctttgagccaggagttcaaaaccggcctgggcaatacagtgagatcctgtctgtacaaaaagtttaaaaattagctgggtgtagtcctaactactccagacgctgaggttggaggatcacttgagcccaggagattaaggctgcagtgagctatgattgcaccactgcactccggcctgggtgacagagcaagaccctctctcttacacacacacacatayacacacacacacacacacacacaaaagccaggcgccatggctcacgcctgtaatcccaacgctttgggaggccaaggtgggcagatcacttgaggtcaggggttcaagaccagcctggccaatatgttgaaactccatatctactaaaaatataaaaattagctgggcatggtggcacatgcctgtaatcccagctactcgagtgactgaggcaggacaatttcttgaacccaggaggtggaggttgtggtgtgccaagatcgtgccactgtactccagcctgggcgacagagtgagactctgcctgtctaaaaaaaaaaaaaaaaaaaaaaaaaaaaagctttcttccgcaaccagataaaggaatccagtcaagagctaaattcccatcagctccaacaatctgtgttattttgagaaatagcaatgatacagggaaggtgtctaaaatcacttcctggggtaggctggtgggttgacatctgaaatacatttcaagcgttggatggaagatgctatgcaaatgccaggaggacaaggagaaattgatagtgtcttttctgatgtgtggcctctcaaagagcttctagagttagtaagttatctaaaagaggaatctaaaaagctgatggggctgtgaataacattaagggtcaggagaacagcacctctgctgtccaccactgttatgactgacccacgtgtcttcagccaggctcttcatcttggaccctgcataaggcaggactgggccctgctggtctagctcagaacttttcaaactctaacgtaaacctgaatcacctgggttaaaacgcagattcggctgggtgcaatgcctcacacatgtaaccccagcactttgggaggccaaggtgggcggatcacttgaggtcagagtttgttatcagcctggccaacatggtgaaaccccgtctctactaaaaatgcaaaaattagccaggcgtgttggctcgcgcctgtaatcccagctactcgggaggctgaggcaggagactcgcttgaacccgggaggcggcggttgcagtgaaccaagatcgcgtcactgcactccagcctaggcaacaaagcgagactctgtctcaaaaaaaaaaaaaacaaaccaaaaaacaaacaacgacaacaaaaaaacccgcagatttgacttcgtaggtttgggtaggacctgagattctgcattgctaacgagctccaggggatactgaagctgatgtctcccaccaggctgtgagtagcagcatgcagcctccccgaggtcccagccagtcctgttgagtgagagcctgagatacgggtttcatgacatacacaccaaagtgtgggatgctccagctagatgcagacttgagcagtgtgtctcaaacgcggctgcayattaaaagcacctgggaaggccgggtgtggtggctcatgcctgtaatcccagcactttgggaggccaaggcaggcggatcacttgaggtcaggggttcaagaccagcctgaccaacatggtgaaaccccatctctactaaaaatacaaaaattaagctaggcatggtggcatgcacctgtaatcccaggtacttgggaggctgaggcaggagagtcacttgaacctaggagtcggaggttgcagtgagccgagatcacaccactgcactccagcctgggcaacagagtgagcctgtctcaaaaaaaaaaaaatcacctgggaagcttcaacttccactgatgcctcagtcctcccccagagattgtggcttaaagggcctggggtttgacttgggcatcaagatctttatttttttaattttatatttttggggttttttgagaaagggtctctgttgcccaggctggagtgcagtagcatgattacagctcactgcagcctcaaaattccaggctcaggcgatcctcctgcctcagcctcctgaatagctgggatcacaggcgtgtgccaccacacccagataatttttaaattttttgtagagatggggtcttactgtgctgcccaggctggtcttgaactcctgggctcaaacaatcctccgctgcagattcccaaagcactgggattacagacrtgagtcactgcacccagctggaatcgggatccttaaaagtccccctagtggttcagatgtacagcaaagtctgagaagctctggttgcctatagagcagtggttttatcataatctccaagagagctaagacagaactctaaggtcatggaggtgggtagagcagggccttagtctctgtacattcccagaggattctgatcccaaccaaatttggggaaccgatggtagagaacagcttccccacagtgggctggggagtgtagtgtgcaacctacaggtacagccttgatccagcacctcagccctctgggtggggtcttgggtagccagagtcagggaagccagttgcctcagtggttctgttttccccagaatgtggtggaaaagtagaagaagcactgttatattaaaatacaaaaccaactccgggtgcagtggttcacccctgtaatcccagcactttgggaggtgagtggatcacctgaggtcaggagttcaagattagcctggccaacatggtgaaaccctgtctctacaaaaatagaaaaaaaattagccaggtgtggtggtgggcacctgtaatcccacctacttgggaggctgaggcaggagaatcacttgaatctgggaggtagagtttgcagtgagctgagatcgcaccattgcactccagcctgggctacagagtgagactccatctgaaaaaaaaaaaaatacacacacacacacacacacacacacacacacacacacacagcaaacaagttaaaaaaaaaaacaaactaaaacataaagcattcctggatctctgtcagagctctttacaagatcatgagtcccattcataagagctccatcctcatgacttaaccacctctcagaggtcccacctcctaacagcatcaccttggggctttggatttcaatataggaatttggggggggtaggggggacataaacattctgaccatagcacaggctgagaaaaatgcaccaagcacaacttcaaaccatctcccctgaagttgaggccaaaatgaatttggattccattttagccaggggagcaaacaggtctgtcagcttattcttgtcgggcttttagctttgctccaagttcattaggatgcctcggagatggatgccgtagggcagagcattcggaaaacccttggggaatgaactcattaccccagagtcagccatcctggagagactgtcctggagaagtcacagttacggaggatggctgcaaagggaaggcgaacagggctatgagtcttgaatgggctgtaagaaacctttcaaaggccaggcacagtggctcatggctgtaatcccagcactttgggaggccgtaggtgggaggatcccttgagcctaggagttcaagaccagcctgggcaacatagtgaaactccgtctctacaaaataaaaaaaaaaaaagtaaaaattagccaggcatggtagtggacgcctgtagtcccagctacacaggaggctcaggtggcaggctcgtttgagcccagttcaagcctacagtgagccgtgatttttccactgcactccagcctgggcaacgaagcgagaccctatctcaaaaaataaatattaaaaaaaaagagctttcgagtcgtctgatctcttctatgctaaatgtcctttggttgaaatcaaatttctaatgcatgtaagtatattatacatcaacaggctaaccatagttatctctgggaaaaggcattatcactggtctttattttctttgttgtaattatctttatctgcacattttttgataataggtgtttttttgttttgttttgttttttgctcttgttgcccaggcatgatcttggctcaccgcaacctctgcctgtcgggttcaaatgattctcccacctcagcttcccaactagctaggattacaggcatgtgccaccacgcctggctaattttgtattttttgtagagacagggtttctccatatttgtcaggctggtctcgaacttcccacctcagttgatctgcccacctcggcctcccaaaatgctgggattacaggcataagcccctgcgcccggccaggtgtgtgtgtgtgtgtgtgtgtgtgtgtgtgtgtgtgtgtgtgtgtattttgtttgtttgtttgtttttgttttgcttttgtttttgagacagagtctcgcactgtcgcccaggctggagtgcagtggagcgatcttggctcaccgcaagctccgcctcccgggttcacactattctcctgcctcagcctcccargtagctgggactacaggcgcccaccatcacgcctggctaattttttgtatttttagtggagacggggtttcacccagttagccaagatggtctcgatctcctgacctcgtgatccgcccgcctcggcctcccaaagtgctgggattacaggcatgagccaccgcgcccggccccaagtgtatatttttataagaagaaaacacgtgacctgtttccatttggcataggtttggctggagctggggytccttgtgttggggggcagagcgactgggcatgaaggtttgcagggtccaggggagcagtctggtgaggcccggggtggcctgtggccctgaagttgtgtttccagtctgctctgggtcagatctgagggttctctgtctgcctcgagctccccatctccccaaggtctgatatggagtccccaggcttttggggaaggctgctgagyttgaggagaggggaaccatgggacagggtggatggggactctgggagcaatgccagggagtccccacacctctagacatgtctctggttgtgctttcaggtgacctcaaagcagaagctctgaattcacctctcatctgacgactgacagctgmtgccaccgccagcctctgtcccttgcccaggcctgtcacacggctgcctctcagcaggtaaggagagtgacttaccctgtgtaggggcaggaggacagcaggtgtcttcgccaggagcatgtgtgtgggctggggtgagactcagttctcaggatccttgatggtggccaggtcctcacagcatcaytttcttctagcaatcatcactgtcctgtccccttctcccaccctccacggcagacacggggcccttagaaaccttttgccacctcctgttatcccctatgtgaatggatgtgcacctgttgggggagcaggggaggagaactgagccatccccgagggctgctgggccttggctggggaaccrtgctgtgtgcttccctgtgggaaaagagatgctattgcagtgagcttccttgttcagcaaggatgaaaggaggtccaccactcacttcctccccactckcagtttaagctgctgggtcccttcaggctcagggatagctgtgagaggtgacagcgtgctggcaaccctcacagcccttgctcgctctcggcgcctcctctgcctgggctcccactttggcagcacttgaggagcccttcagccctctgctgcactgtgggagccccttcctgggctggccaaggcgggagctggctccctcagcttgcagggaggtgtggagggagaggcacgggcgggaactggggctgcgcacggygcttgcggaccagcgtgagttctgggtgggcgtgggtttagcggccccgcactgggagcggccggcccgcaagccccgggcagtgaggggcttagcacctgggccagcagctgctgtgctcaacttctcaccaggccttagctgcctccctgcggggcagggctcgggacctgcagcccaccatgcctgagcctccccaccaccatgggctcctgcacggcctgagcctcctggacaatcaccgccccctgctccatggcrcccagtcccatggaccacccaagggctgaggagtgtgggcgcatggcaygggactggcaggcagctccacctgyggccccagatgggatccactaggtgaagccagctgggctcctgagtctggtggggacttggagaaactttatgtctagctaagggattgtaaatacaccaatcggcactctgtatctagctcaaggtttgtaagcacaccaatcagcaccctgtgtctagctcagggtttgcagggtttgtgaatgcatcaatcgacactctgtatctagctacgctggtggggacttggagaacctttgtgtggayactctgtatctagctaatctagtggggacgtggagaacttttgtgtctagctcagggattgtaaacgcaccaatcagcaccctgtcaaaacggaccaatcagctctctgtaaaacagaccaatsagctctctgtaaaatggaccattcagcaggatgtaggtggggccagattagagaataaaagcaggctgcccgcgccagctggggtaatctgcttgggtccccatscacgctgtgsaggctttgttcttttgctytttgcaacaaattctgctgctgctcactctgggcccccactgcctttatgagctgtaacactcaccgcaaaggtctgcggcttcactcctgaagccagcgagaccacaaacccaccgggaggaaggaacaactccagacgcgccgccttaagagctgtaacactcaccgtgaagctctgcagcttcactcctgagccagcgagaccatgaacccaccagaagtaagaaactccaaacatatccgaacatcagcagtagcaaactcccgacacgccgcctttaagaattgagaattgtaacactcacggcgcaggtccgcagcttcattcttgaagttggtgagaccaagaacccaccaattccggacmcagctgtcttttgggcattgtcyggaaggccggctgtagtattctgcctacagatacttrtcaastgctcatggacagaagtcrtagttggggaggatggctgcaaaggcacaatgacatttggcttccagaaattctaagtactgtgccstgagtcaggtcaggtcagaagcactggggatggaaccgccttgcattggtctcccagccccaactttgtatttactgagttgtgtgctgcaagatgcagcccatcagaattttacagagcatggtcggatgcaggcactcatgcctgaattccagcaatttgggaggccaagacgggtggatgacctgaggtcaggagttcaagatcagcctggccaacatggtgaaaccccatctctactaaaaatacaaaaattagctgggcatagtggtacgcacctgtaatcccaactactcaggaggctgaggcaggagaattgcttgaacctgggaggtggatgttgcagtgagcagagattgcaccactgcactccaagcctgggtaaaagagcaagactccatctcaaaaaaaaaaaaaaaatgttacagagcaaaccggggtctgcttgcccagcgtggtaagaccagatatccacaccgaggtgttgcagtggaagaaaggagggtgtttaattgctgggcaccaagcaaggaggacccggcggctcatgctcaaatcctgaccagtagcttgcaggtaagggtttttaaagtcggaggtacatttcaggaaagaagttacaggtaagattgtaaaatcgacacatggcggttgcacagtggttttgaccgaaaagggcggctatcttcaagccaggggttacaggtcgtggatggatttaaagatcttctgatttgcaatcacttaaggaaaagaagctttgtttaaaatgttggggtcggcaaaaaaaatgttagctctggcttgtgggcaggactccctccaggaccctcaggaagaaatttatttatttatttagagataagagtctcattctgtcacccaggctggagtgcagtggtgtgatcttggctcactgcaacctgtgcctcacaggttcaagcaattctcctgcctcagcttcctgagtagctgggattacaggcacgtgccaccatgcctggctaatcttttttgtatttttagtaaagacggggtttcaccatgttggccaggctggcctcgaactcctgatctcaagtgatccacctgcctcggcctcccaaagtgctgggattacaagtgtgagtcactgtacccggcccaggaagaaatttagaaccaaaagcagcagtcagagttgagtcctcagttccccctcatctgaggtctctgtgccagctgattcattccgtagggggccgggtttctgaaaaacaactcagagacatatgttaagatgttatctttagtttctatagggaaaccaaacatctcgtaattctagcttccttggctattgttttaagctactattaccttcttgcttatcaagtcacttatttacttctcagggctaacttggtgctagcttggaatttcccttgaaggaactcaagattttcctttatttccctgctgggggtcccacagacccgtacaacgggttctctgctgcatctcaagaaacccccggtgcgacctatgtgcatgagcacattcctgtatacctgggaagaaagagctgtgtgagcacgtggccccaggtgccacccctaagcaaatggtcccttttcccccttgcctcatcttctggaaagccgagagcccagtcagtgttgccggtagccagtgtgcgtgtggagatttgttgcagctcctctctgttcctacttccatttttcttcttgggtccaggtgggatgtgcagacgcatgaatgtctgtgcagggaggcatacctgagtccccatggaagtacatatagcatccagacagtctcagaaaggcaggggcgttattcaggtggagcctaaagggtacctggccaggtaggggaagcaggacctccgaaaccttcttatagggctctatcttcaaagcatgtggttgtcttcagcaccattggcaaaagccattaccttctcccccaccagggatttcctgctttttttgcccacctcagggaaggggctccctcctgacacctcactcccaggttaagcaaggttaggatcacccaggggatgagtctgttccaggagagcaggacagaccaagtgtgggggatgaaatcctaagcgccactaggccaaggtgggtaatgagcyrggagcagtggcggagcagtgcttccttccactcctgctgaggagcgctgggaaattatgttacctaacctccttgaatatatttccttatctgaaaaataagaggattggaaccggacctccatgttcccctgcaataccaacagtcagtgattcagagccttgctactcaaagtgtggtccgtggaccagcagcctcacgaagctcgttagaagcgcaggatctcrgcccctaccccagagccactcgatcaaaatctgcattttaaaatcctsaggtgattcatatgcacgttaaaattcaaaaaggactagttgagacagcccctaaggtacatgagacatcctatgcgtcccatgcaaggtaatttggacactaaggaatcacgaagtagaagtggctcacagccagcagtggtgctctcctttgrtacgggccagaatcagcctgggagattgtaaaatacggacgtccaggtgtgcagggccacagtgctgggagaagccagagcagccccttggagagagaaaacacaaacacgcacacatgaaatcgcttaaggatcactctgggcaacaagggtgactgtcctagacacagaatcagggtgagccgagggcagcagagcagagaccgtggagcaggcctgtttacccagtgctcccgaaagacggcttttcatccttacattagaatctcttcctttagttactgaggggcctctcaggggaatctgtggttacctctccaccttctttttttttccagacagtctcactctgtcacccaggctggagtgcagtggcgcaatctcggctcactgcaatctctgccttccaggttcaagcaattctcctgtctcagcctcccaagtagctgggactacaggcacccaccaccatgcctggctaatttttgtatttttagtaaagaggggatttcaccatattggtcaggctggtctcaaactcctaacctcaggtgatccacccacctcggcctcccaaagtgctggaattacaggcatgagccaccacacccagcctctccaccttcttaagcaagaatgcagaagattgcagggagggaagactgttgatgttgttgcttgttttaagatggtcaggtgcagattgcataaatatatttgcatattctgaggaggaaaagcgccagagacgtggacattacaggatggaggggtgagtgtagggcagatcccttggggaggggagcggtctactgacctgtgaagtgttagccttggctgagaagatgccttcagctgcaagtgacagatgacccaacaaatatggcctgaaccatgaggagtacattatctcatttcaaggatcaggaatagacttccaaggacccacccagctcaaggatccaggtcattttctccactagactagtgaccgtgtccttggttgattccccagtggttttatggctctggcagctgcaaacacaactcaaggtggccaaagacagagctttctccccttgtccctccgtcggggaggaaaaccctccctatgagtccctgcagatttcccctgatgtcccattgaggaggacaaggtcacgttgtcaggttcacaactataccaaatgccctgcttggggtcaggttccagcccatgctgaggttcgaggggagtgggcrgatgggcaggtagctgaaggaacactcgtggggccataagcaggtgaaatgtagttttactcaacaggtctctcagcagctgactcataccagctctctcacactgtccgccttgactcagctgtctgctctggctttgtggctcctctcagcagccagctcccacacatagctgcatggccgactctcccctgccttcggggtcagcagcttaactctttctctctctgggcacgagctgaactgtgctgtgccctggctccccctgtctacctgcaaaatggacagctttggctctttctctgggygccagcatgcctgtacagtgtcagcagggcaataatagcttttacaaacaacagtggcttagagccaaatgatgagccttccgatgttatggctatatggctgtgatgacaagtggagttatacgcctgcgctctaaacttgctgagtcactctggatgtttacctcagcctatccttgaccaaagcacagccatgttcctgacacgcgtgctctggccttacagcaagggaggcaagaaagtgagtctgccattgtcagcccctggggaggaaggagggccctgccggcagggcagcaagtcgggagcagctgtgggtggtgtcctacaggctctgctgtggaggaagagctgctgccctgagtggaggcaaggatggatgtgggtgtggagtggagtaggtggggtggggaacattaaggagggttctctgctaatggccattctgtgtagacagaggggctgaggtcctctgctgaggaggaaaggtcagaggtgatgaggaagtgatgaagactggaagaagaggatgaagggagggggagatgatttggggcaaggagtcctattgccaggtagctctgagggcctcgcagaggctggattgtggatgtctgatgggcagagtttagtggggggggtctctccagcagcgctgagcagccccttcgtgagtgtggagaggggaggagttgggtccataccgaagcaggttttagggacagaggaaagggccagagaagcagacggctcttgggagacagtggtggtagttgggtcatgctgttgaggctaagtatggagccaggggaggaggaagcagcagagaaggggctgagggagaagctggggtcggagagcacagcccccgctgggggccaggtccaggggcctcggctgtgggtggcagacatgggctggagagtggacgcacatggagggcctgagagggaggccatggagggatggaacccccagagggtcacccacccgcttattttatctcctggacacaacaaggaaagcacagtgcgctggtgggaccttcccacaggaagcctccagccagaactctcctctgcggagagggtagggcatgtggaaaacgagcccttcttttgaacagcggaagaatgaggaagggctgagggatcagggccgtctgaacagcgcctgggagggagagaggtgggcgcagctgcaggggcctgacgggactgagagtcggctctgctgctttccccggtaacgttagctgttccctccccgccacatgacccacctgtgcacatgtgcacacatcctcaaggactcacacttatacccacacactcacactccagacacaaacacaccccccacaccctctcacacactccatacacttacacacacgttcaccccgcatgctctgagacgtgcctgtattcacactctcaccttcacacacacacacacccccaccccacactctcccacactcaccctcacccccaccctgaaccctgacccacacccacacacaccctcacacacagacacccaacactcgcacacataccccacagtcacacacacacccaacaccctcccacactcacactccaccccacattcacacaccccaccccatgccctcccacactcacactcaccgccaccccacaccctcccacattcacaaccccaacccacaccctgacacacacccacaacacacccacctcacattcacacacccccaccccccatccacactctcacactcaccccccaccctgtaccctcacacacgctcacccaccctcacacacacacccccacccctcaccctcatacatgctcacacacgtgctcacacacacactcacacacaccccacccctgaccctcatacatgctctcacactctcacacacacacacccctcaccctcacacacaccccaacccacaccttcacacacactcacatacactgtcatcacacacaccccacctcacacactcacactcacccacaccctcacacatactttctgtcacacacactcacccccacacactctcacacgctcacccccaccccacactttcacacactcctactcaccacagactccctcacacacagtgcagagccctcccctcctccctttgccctgctccatgtcctcttggcttcacccctgctgatcccaaactctacctcctcctcccctgaacctcccccaactcctaaatgcccaagtcaaagacaaggggcgagagggatggagtctagaatggggagagcaggatcaagatttgaaggcagtcactgtagggtctgtagtaggctgttttgtgttgctgtaaaggaatacttgatactgggtaatttctaaaggaaagaggtttaattggcttatggtcctgcaggtggtacaggaagcatggcagccagcatctgttcctggtgaggcctcaggaagcttccactcatgcagaaggtgaagggggagccatactatcacacagcaagagtgggagcaagagagacagcaggaaggcgacacacacttttaaacaaccaggtcttggatgaactcagagtgactttcacttatcaccaaagggtggcgctgagcccttcctgactgatctggccccgtgatccagtacctcccaccaggacccacctcccacattgggaatcgcatttcgtcatgagatttggagggaacaaacatccaaatcacatcagagtccttttttcattgcatcagctgggaagggttgggaactagactgtgtctcctccctcattttgtgtagacacacagcaacgcagacacacatcagcacacacacacacacggagagatggccacacacagactggcacaaggcctgcacgagcaggcacgtgggcacatacagacacacccaaggacacaccaacacatgtgcaggaacgcrtgcacagttctgctgagtgggggatgaaggggatgttccttggatttcaaagctcccaacttgtcgtgattctccttcccttgttgttgagttaaagttccaaactaagataaggacacacatctattaaactctgatttgggtggctgatctgtcttctaacgagaatattttacttttcaaaaaytgcctttggacaaatgtagttgccattatgcctttctgggccagagaattagttcatatgtgattaaaacccacagagagagtgggtcccatacactaacctactggccaaatagaaaatttcttaaaaattctaaatgttttgtatgaagcaagtataacattgatatttaaaccagatgaaggtagcattaaatgacttaatttattacttaagaatagtactgaattccaaaattacttaagaatcttgatgcaaaaattatcagaatgttaccttatagaatttggtaatatatyacaaaagtaaatatgcatttacctttgacccagtaattccagaaatgtaccttgaagacacacccccacaataatatgagaatatagatgtaaatgcccgtaaatatatggattgaaaaatatacagtatatccacacagtggagtactgtagtatgtagttctaagaaagaatgagtatgatcttttttgcatatcagtgaactaatatgtggtgctttctaaaatgtattgytaaatataaaaacaaagttcaaaagcacacacacgttatctttttgtgtaagaaagaaggagaaatgagaaaacatatatgtaactgcttactttctaagaaaataaacacaggaccagcctgggaaacatagcaaaaaaaaattttttaattagccaggcatggcggcacacacctgtagtctcagctactcaggaggctgaggcaggaggatcgcttgagcccaggagtttgaggctgcagtgagctgtgattgcaccactgcattacagcttggatgacagagaccctatctcaaaaagaaggaaggaaggaagaagggaaggggaaggaaaggaaaggaaaggaaaaggaaaaagaagcataggaaagaatagtctggagtccaacgtgatgggaaggaaggaagaccagagggagggaggaagggaaggagggagggaaggaaggaaggagaaaaaagaagcataggaaagaatagactggagtccagtgtgattggttgcccataggaggtaggtgggaggggagaaaaggattggaatgggcagtgaaagtgacacctgtgtgaatatcaatttgcatcattttaactttgaaagtatggttgctgctttacatactcaattaaattaatacaataaagtccaacagttgtgaggtgggaaaaaaacctaaaactgaaataaaatataaacagaagcagacgaataatagatggtggccagggcctcttcccacctcatctgtacctttgggagccagtgtcacttgtgtttctgctctcagtgacctgtccccagctctcaggctttagttttaggcttcctttgaagcagattctcattagacggggcaattgtgatgtgtgtagcacatgctttctgtgaccgaacaggtagcactacactggtcttagtcacggggcatcaatgtgtgtagggttagggagaatttcttctgcctccctctagaaaataaatctatgcttgggatagggaagaaagagagagagagtgtgtgtttgtgcgtgtgtttattgttgaaaacaaactctcaacacaaagtctgtaaactttttggaaggacaacaaattaaaattaataaagcaattttattcattagaaatgtgtgttatgagccatagattgttaggagaggccatttgagacactcggctaggcttcaaagctttgagtttgagttctggatccacaaatgttggctgtaggatctttggctattggtttaatttctctgatttttgcactttcttcctttgcaaaatagaaattaatattgtcccaccaactgtatgggctrctagagcaatgaatgagcaaacgtgtgtgaaagtgaatgatgactcaaagcactatacgaatgtccaagcattacttatggtcgtggtggtgatggtggtggcagtggtgrgggtgatggaaaagtcattctggaaccttctgttctcttctcactgtcccygggactgagaaagtttttccaaacaaaagcatcatgtcttgctcctcttactcgaatgaggcattcctttctcttatcccaggagggttttctaccaaatgctgtccatgctcccagatgctccctggcttggacagagaagctgtaggtggtgggaggtggggttcccctacccttggaagagcagctcttctaacccttttactttggttacytctaggggcagtagaatgaaagagggcatgtctaataacagcaccactagcatctcccaagccaggaaagctgtggagcagctaaagatggaagcctgtatggacagggtcaaggtaagcatgcatgcgtcagccccaccctccgcccraagctcagctcaaaacattcctcctgcttccaaagcagacttgtgagagttaacacgtcacccagcagagcatgcagccaaccttggcagctgtaacatttacaaatgagtgtttgcttcacagttctaagtgtgcccaaggattcaaaggatgcaaaatacacagtgtgcatgaattccataaggagtctccaaaaatagactcataattcatctcggctctatttagctccgttgtcatgccaataagcaagaaagagagtttagcaatgagatcaatcacttttctgctgtgatacagtgcctttgaggttcaacaacatcggatattttgacaggattattgttgagggtggagctctgaaccatgcctgggtgtgtcaaatattcctttggtgaaaatgaagaaaggttccagacacctcccgttgtattcatttcactgatgagtgcaggtctctccacgctgggaggactgcagcaagatgaagccacctcttctccagatgccactcagaggtgagcagaaggccaggcaaagcatgtggctctgaacragtccgtgagcatgacgctcgytgactgtaatagagttgaaaggaaccccaactctggtgtcgggaacctgatgccaggaagctccatgtgtctgtggtcttggggaacacaaatcagaggtctcacctgggcatctgggattcaaaaaacacagaatccatggcaacgggcgactcctgaagccttctatggacagagcctccctgacccctcccctcatgctagtgtatggctagaaagcaccaatactcacctctgtgtggacagttattcttttcccctggagctctgggggtacaacctctccaaggaggcagaaaatatgcacggaaagttacatgagggtatatgaagcaaggaaggaatccrgcgtgatgtaagtcagtatcaccggacccatgttactagagcatctacatctcatacataccgataccaactgcaaattacatgtcagtccttggtctctagactagaggagggagcaagtttagaacccagaaaacaattctaagacacagcgggtcccaatagcatagaaaggggtttcaaatgaaagctgcaggcatcccgtgctccagaagtgcagacaggaaaaaggatgaggactgcagtgaaaggcattgctgagcacctaatctatacttgaagggtcctgggagagaaatgtgaaggcgacagtctcctccgtatggctcagggaagacttctcrgagttgtgagctatggctggctctgagctgatagtggaggaggaaaggccggtgtgagctaatcacggctcgtgtggagcagctgggcagcgggaggagctgcaggttgtgctgggaagagagctatgggaggagggcgccatgcacacaggtgcggaagccacagccatgaggtgacaggtgtgtgaggtgaaccaacctgtaagcaatagacggagttgtcagaggtgaggaggtagttgaagctctgagtaatcaagagaggcaaggaggggcagaaatcgggtacagtgtggagcagacagcaaagatgcgatcggggaggcaaacacaccaagaaaatcaacagaacatggagagtaaacgtgggaggcactagggagagagacgttagaatccagctgtcaagccccatggccagagacctgaaaagacagtgggccccagtttgggctataaggcagttctcctttgcccaggcgttctcttctggcaaggaagataaattctgcaatagcatcttcacctgccacagacaccgccccaggagyccctgtgaggaccgggtgtcttcaagaatgaaggcttcttcaagagtcacttaggcacacacactgtcactaaaagaaasaggaaagtcaaagacaaatgagttactgtaggagttcattctcacattgctgtaaagaaatccctgggactgggtcatttataaagagatttaattggcctgtggttccacaggtggtccagcaagcatgatgcctgtatctgcttggcttctcagggcggagggtgcggaggcctcaggaaattgaaaatcatggcagaaggtgaagggtaagcaggcacatcttacatagcaggagaaagagagagaagggggaggcgatacacaccttttttttttttcttttttgagacggagtctcgctctgtcgcccaggtgtgatctcggctcactgcaagctccgcctcccgggttcacgccattcttctgcctcagcctcccgagtagctgggactacaggcgcccaccaccrcgcccggctaattttttgtatttttagtagagacggggtttcaccgtgttggtgaggatgktctcaatctcttgacctcgtgatccgcctgcctcggcctcccaaggtgctacacacttttaaacaaccagatctcttgagaactcactcactattacaacaacagtaccaagggagatggttttaaacccttcatgagaaaccacccccatgtccaatcacttcccaccaggccccaccttcaacactggggattacaatttgacgtgagatttgggcagagacacagatccaaaccatatcagttactcaggtgatattcaatcaaagggataggcaggccagatgtggtggctgacgcctgtaatcccagcactttggaaggccgaggcaggtgaatcacctgaggtcaggagttcgagactagcctagccaacatggtgaaaacccatctctactaaaaaatacaaaaattagctgggtctggtgacgtgtgcctgtaatcccagctacttgggaggctaaggcagaagaatcacttaaacccaggaggtggagtttgcagtgagccaagattgtgccactgcacttcagcctgggcaacagaggaagaccccatctcaggaaaaaaaaaaaaamaaaaamaaaaaacgggataggccgccatgttgctgtgctgaccataatggaaacgtgaamgcaagattcctcagggggcctgccagaggctaattcagatcctgtggtaattccagggagtaggccagtgacagctgtgtcagatttggttcagaaacagagttggtggaaacagaatgttgtcattgaagagacaatgcctgaggagagagctgaacctaggaaccgcatctgtgccaaagatgcgtgagcacacatgggtggtttttgtttttttcttgcttggacacccttgaacattaatttttttagttgtggtaaaatatatataacatacaatttatcattttaaccatttttaaatgtacaattcatcagtattaggtacattcacaatattgtgcaaccatcaccagcatccacctccagaactttctcatcttcccacacagaaactctgtacccattcagtgccaactccccattcgccctgcccatgcctggtgaccaccgttctacctttttcctctgtgaatctgactacactaggtatctcatataagtgggatcatacagtatttatctttttgttcctgtcttatttcacttaacttatcgtccttaagatccatctatgttgtagcctgtatcagaacatcattccttttcagggctgagttgtattccattgcatggatagaccacattttgttatccattcatccattgatggacacctgggttatctccacctttggactattgtaaataatgctgttaggaacatgggtgtgcaggtatctgttggagtctttactttggttcctttgggtacccacaagtggaattgctggatcatagggtaactctatgttcaacctttttacctatttttttttttttttttttttttttgagagatggagtctcactctgttgcctgggctggagtgcagtggcatgatctcagctcactgcaacctctgcctcctgagttcaagtggttttcctgcctcagcttcccaagtagctgggatcacaggcatgagccactacacccagctaatttttgtttttagtagagacagggttttactatatgttggccaggctggtctcgaactcctgacctcaggtaatctgcctgtctcggcctctctaagtgctgggattacaggcctgagccaccatgcccggccttatgttcagcctttggaggaactgtcacgctgcttacacaggggcttcatcacgtcacgtcatcaccagcagtgcacaggaattcccgtttctccacatcctgaccagcacttgttttctgggtttttttttattaatgtatttactttttttttttttattaatgtatttactttgacaagtaaaaattaaagtcactcactatcatgacgacagtacygagggggatggtgtatatttatggtgtacaacatgaagttttgacataggcatacattgtggaatggctaagtcaagccatttaatgtatgtattctctcacatacttagttttctgtggtgagaacacttaaaacctattctcttagcaattttcaagtatacaatacattgttattaattgtagtcaccatgatgtgcaataaacctctcgaatttatttcttctaactgaattttttttttttttttttgagatggagtcttgctctgtcacccaggctggagtgcagtggcatgatctcggctcactgcaacccctgcctcgygggttcaagcaattcttctgcctcagcctcccgagtagctgggattacaagtgtgcaccaccgcgtccagctaatttttgtattattagtagagacggggttcgccatgttggccaggctggtctcaaactcctggtctyaggtgatccgcctgccttggcctcccaaagtgctgggattacaggcctaagccaccgcagccagccctgaaactttgtgtcctttgaccaacatctctctaatctcaccaccccacagcctcaggtagccaccattttactctctatttctataaatttgacttttttacactccacatataagtgagatcatgcagtatttgtccagtgcatggcttatttcatttaatataatatccttcagggttacccatattttstcaagtaataagatttccttcttttttagggctcagtagtattctattgtgtaaatataccacatttgctttatccattcattcgctgatagacacttaggttgattccataacttggctattttgactaatgctgcaatgaacacagaaacacagatctttctttgacatactgatttcgtctcctcgggttatatacctagtagtgggattgctggatcctatggtagttctatttttaatttttgaaaaacatccacagttttccaaaatggctgtactaaatttaattcccaccaatggcataccacggttcccttttctccaaactcagcaacacttgtcatcttgtgtatttttgataattgccatcctaacaggtttgatgtgatatcttgctgtagctttcatttgtatttccctgatgatctagtgatgtctgtttttttaataatagtcaccctaatgagtatgaagctcacacatggttttcagccctaggcatccctggtttcagggcacagtgtggctttgcagaaaaatctatgtgatgcaagacttgaaagaaaaaaaaagaaaaggtgcatcttggtatcagccagactatacgaatgtggaaagaaaggggagctgtcaaggacactcccgatgacctcgtcaaggaccttgaggagggaagagagaggaagtcaccagggaaaggcaatggcctttctgggatgggtacgaggttactgccagagaggaggaaggaaagagggaggctggataggaaatgacagagggcagccctggggaaggaggagaggagcagtttttagaatccactgaactcgcacacaccatgtcagaaacaccagggccagatgacaacactgagatgggccgggcgcagtggctcaagcctgtaatcccagcactttgggaggccagggcggttggtcacgagttcaggagtttgagaccagcctgaccaacatagtgaaaccccatctgtactaaaaatagaaaacttagccgggcgtggtggcacgtgcctgtagccgcagctacttgggaggctgaggcaggagaatcactcgaacccaggaggcggaggttgcagtgagctgagattgcaccattgcactccagcctgggtgacagagcaagactctacctaaaaagaaaaaaaaagaaaacactgagatggattttccaaggaagaggaaaaggccaggcccatactgactgcatagtgagaatgcctagcaggtgaatgtgcacacgacgatagggcaggctgcatgggaaccagctggagggtccatggtaggaatcgtggcaactcccaggcccrcagagctggcttccaggtgagagcacggcagatgggaacccaaagaggacatcccaggcgagggcaggtaccagcaggaaaccaaaagggagcccccgggatggcatggtatgtagccaaccatagggcccaccaccaggctctgtagcttattgtgctcaggagagtttctaaggaggaaggaaggaaaagaaggcatttgccgcccaggaaaataaggggacatctgtcactgggaagagaaaggaaaatataactgcattaagcagttctggggttgcagaagtaagaaagagtaatagtgccaattcagagagctttgcacgattcrtggaggaaaaacgtagctgaaatattcattattgtcttgaagttctgcttgtccccatttgcacaaaagcacaagtgcaaatatagacttcagtaggggatatagattgaggcattacaccacaaagcccacagcaagatcttaaacccacacacagtgtggttcagagacctccttcctacctccattcatttaatatttatcgagaatcccctgctacttggcccttctcccaaattaccacccccactccatgtgactcttcatcttgcctagaagcacatcaaagcatttcccaacaaagatgtgtgttctttgcaaactcttatcagcagctaaaaacaagtaatgtcctccaggttgtcgcaggcatgaggaggattcaccatagaacctgtatagcctcacaaaaagcacaaagcttggaaaataatacccaggtttctaaaaaagaaataaagagcacatgaaagatgaattttggaaactatatgggttctaagggaaagaataccatcatagccttattctttttctcacccatcagaagttcaaacaatctaaaactctattagaaaagtacatatatggttgggcrcggtggctcacgcctataatcccagcactttaggaggcagaggcaggcagatctcaaggtcaggagatcgagaccagcctggccaacatggtgaaacccctccctactaaaatacaaaaaaaaaaattagcccggcatggtggcacgcgcctgtagtcccagctacttgggaggctgaggcaagggaatcgcttgaatccgggacgcggaggtttcagtgagcccagatcacgccactgcactccagcctggcaacagagtgagactcygtctcaaaaaaaaaaaaaaaaaagtacatatatgacattgatcattaaatagagaaaatccgacaagcggttatggcaggtctgagctgagcagagtgtaagaggcctcactggagaaaacagtgtctgaagccagcctgcacagccacaatgcagagttcagccactgagaaggcgttctcccaagggtgaagtgcagcgctcccaggcagagtcaggacacaggctctcaggcgggttccacgctgccttccacgtgccatccctcagggtgccctgattctcctgccccacaggaaagggaaattgctgacattgggtcaatcctatgtctgtggctcatgaggctctggggtggacagacacccttgagcaagcccaactctcagccagggactagaagcaactgatggaatggccaaggaaaactggccaaggaacattctgcccagtctcatttgtcctgggagataatttcaacatccgtggggtgggtgtgctcacaattcctacaagggctgcccttaggctgagattaattttgtgagcacaggctttatttgctgagtrttgacagatcaatatattgttgggcctgcgttctatagactactgaaaacatgagtgcaggaagagaggaatttcaggtgatggatgcactaaaagttgaagcccaagaaacgcaggagaactggctacacatggcccttgacttacaatggggctacctctcaataaacctattataaattgaaagttcaacttacgacattttcaacttacgatgggtttatgcggatgtgaccccatgggaagtggaggagcatactgaatgcgtattgctttctgccactgtaaattcgaaaaaatcattcagccagaccatcgtacgtcagggaccctctgtatttagagtgcgatagtgcagaaagatactgacatcaaagaaaagagattgtggcgaggcgcagtggctcatgcctgtaactccaccactttgggagtccgaggtgggtggatcattcgaggtcaggagttcgagactagcctggccaacgtggtgaaatcccatctctactaaaaatacaaaaattagctgggtgtggtggtgtgtgcctgtaatcccagctactcgggaggctgaggcaggagaatcactggaacccaggaggtggaggttgcagtgagctgagattgcgccactgcattccaacctgggcaacagcgggagactccatctcaaaaaagaaaagaaagaaaggattgtgtcgtgacagatactggcagttattaacaatcttccttcataaaaactaagaaaaatgtagagaaaacagaaaaagagaaagagctattttttaaaagggtataatttggtgcttaaaagaaaggagaacaaataatcaaaaaaataggaaatgcaaggacacaaaagttgaatttacaagtctttgagatatttctcgtatatactctctttattccgttgataatttatttaaaaccataaataaatgagagtggctcgaacacatacctaagcatggagcttacttaaagcgcttccaacaaagaagcagaacatctggtgggttgaagtgagaatgtgaaaaagtcatatccttttcaggggcctttaatgcttgttttgaaaatgatactacttctctgttcattaaaatggtacttgcttttttgttgttgctgttttttgagatggagtctctctctgttgcccaggctggagtgcagtggcgtgaccttggctcactgcaatctctgcctcctgggttcaagcgattctcctgcctcagcctcccgagtagctggaattacaagcctgtgccaccatgcctggacaatttttgtatttctagtagagacggggtttcaccatgttgtccaggctaggcttgaactcctgacctcaagttatcctcccatcttggcctctcaaagtgctgagattaggtacttgtttatttttaaaatttttgaaaaatgctgacaagtataaagaggataattggaatggtctataaccactaccttttgatgtttttccatctatatttgttttacatttattataaaactggggccataatgtacacttattgcttttttataacctgatatatcactgaacagtatattgtgatcatataacaaggtcaggaaatattctcctaaaatgtcatttttaatatctattttcccccgatgtacaataattaaccagtctcctatccttagacatttcagttatttccarttgtgagtctttttttatttttccttttttttgagatggaatctcactctgtcacccaggctggagtgcagtggcacgatctcggctcactgcaacctccgcctctcgggttcaagtgattctcctgcctcggcctcctgagtagctgggactacaggcgcccgccaccacacccggctaattttttgtatttttagtagagacggggtttcactgtgttacccaggatggtctcgatctcctgacttcgtgatccgcccacctcggcctcccaaagtgttgggattacaggtgtgagctaccgcaccgggccgtgagtcctattttttttttttatcatactttaagttctagggtacatgtacacaacatgcaggtttgttacatatgtatacatgtgccatatttggtgtgctgcacccattaactcgtcatttacattaggcatttctcctaatgctatccctcccccctccccccaacccttgacaggccccggtgtgtgatgttccctatcctgtgcccaagcgatattgttcaattcccacctatgagtgagaacatgcggcgtttggttttctgtccttgcgatagtttgctcagaatgatggtttccagcttcatccatgtccctacaaaggacatgaactcatccttttttatggctgcatagtattccatggtgtatatgtgccacattttcttaatccagtctatcattgatggacatttgggttggttccaagtctttgctattgtgaatagtgccacaataaacatacatgtgcatgtgttgtgagtcctacttttaaggaagcactgcagcaagcatactggtagataaaattttcatgtctgattatttctttaagataaattcctaaggactgaaaatctcttggccaaaagagagatatatactgtcaggcactacataaaaactgttttagtcagcgacagactgcatatatgacggtggtcccataagattctagtastgtatattttttgacccggcatggtggctcacgcctgtaatcccagcactttgggaggccgaggtgggtagatcacttgaggtcaggagttcaagaccagcctgggaaacatggcgaaaccctgtctctactaaacgtacaaaaattagctgggcatggtggcgcacctgtagtcccagcttctcagggggctgaggcatgagaattgcttgaacccaggagacagaggttgcagtgagctgagaacataccacctcactccagcctgggcgacagagctagactctgtctcaaaaaaaaaagaaaaaaaaaaaagagcacggtggctcatgcctgtaatcccagcactttgtgaggccaaggtgggtggatcacctgaggtcaggagtttgagaccagcctggccaagatggtgaaaccccgtctctactaagaatatgaaaattagccaggcgtggtagcgagcgcctgtaattccagctacttgggaggctgaggcaagagaatcgcttgaacccgggaggcagaggttacagtgagccgagatggtgccactgcacatcagagcgagactccatctcaaaaaaaagatatctagtactgtatttttaccttaccttttctatgtttagctgtttagatacacagatacttaccattgtgtgacagttgcctacagtattcagtacagtcacatttctgtaatcctagcactttgggaggccaaggcaggaggatcacttgagctcaggagtttgaaaccaggctgggcaacatagtgagatcctgtctctactaaaaattcaaaaaagtaagctggatgtggtgcacacctgtagtcccagctacttgggaggctgaggcaggaggattgcttgagcccaggagttgaggctgcagtgagccctgatcctgccactgcactccagyctggatgagagagtgagaccctgtctcaaaataattaattagttaattaattaacatttaaaaagtttgtagcctaggagcaataggctataccctgtaatctataggctataccctattgtgtaataggatagaccatctaggtttgtrgaagtacrctctgtgatgttcttacagtgatgaaatcatctaacaaggcatttctcagaacatatccccgtcattaagcgacacatgactgtatacacaagaaagtgtttgagtcaatatcaaatttccctatagaaagggataccaatttatatttttatcagtaatgtgtgtgttttcccacattctccccccaaacaccattcattatgccatgcaaatgtaacagatgataataatagcggccaacatttactgagtgcttaatamgcgttgttctgaacaagtcacattaaattcattcaattctcacagcagtccaatgaagtgggtactctgttatatgaaggaggaaactgaggtctatgaagattcattaacttgcctaaaattcagcagctgaaaagtgatgagagcccagggataggaaaccagggagtgtgtctccagagccttcgctctcaacctttatgtcataccatctcttgattgctgacgcctcgttattttaacatacatttcattgactgttactggggttaaactaattttgtatgttaaattcttcttttgctaattggctattcctaccgtttacccaattttctattgtagtattgtagaatattttaaggccagcacagtgactcacacctgtaattccagcactttgggaggccaaggcaggaggtttgcctgagcacaggagcttgaaaccagcytaggcaacatggcaaaaccctatctcttcaaaaaaaaaaaaaaaaggtatgtatatatatatgtgtgtgtgtgtgtgtgtgtgtatatatatatgtatacacacacacacatatatacatacatatacacacacacacacacacatatatatatataattagctggatatggtagcatgtacctagctagaggctgatgtgggaggatcacctaaacctgggaggttgaggttgcagagagccgagattgcggcgctgcactcgagcctggrtgacagagtgagaccctgtcttttaaaaatttatttagactgggtgcggtgctcatgcctgtaatcccagcactttgggaggctgagagggggagtggatcacctgaggtcaggagttcgagaccagcctgaccaacatagtgaaaccctgtctctactaaagatacaaaaattagctgggcatgatggcgggcacctgtaatcccagctactcgggaggctgaggcaggagaatcgcttgaacccgggaggcggaggttgcagtgagccaaggtcatgccattgcactctagcctgagtgacggagtgaaactccgtctcaaaaaaaaaaaaaaaaaaaaagaagaggtgaaactaacgagttggaaagggaggtggaaaagctaaggaaagaattggagggaggtgggagcaccactggaaagagtggagagtggcacacatgctgtggaaagccrcagtgatgacctggagacaggcctcaggaaggtgcacaggaaacaaaagaaacagatggagtgtcagaccgaagcaattagaagctgatagaaatccagactgacaagagcattctcacatttgtatgcgaatattcctggcagagagaataaatggaatagaaaatactcttcaggatataacataaaacagcttcattaaataaaggaagacctgaatctgcaggtccaaactgcttgccgtattccagaaaagagtgtgagagaaatgatcgacacagacacaaatacagctgagggtcttaatctcaaaaggaaagagtgatctctccatcaacaaataagtcaatagcaaaaagcaaaacaaaagcaatactaataataaagagcccattaagaatataggcagaagaggccaggcgcrgtggctcrcacctgttatcccagcactktgggaggccgaggcggacggatcacctgaggtcaggagttcgagaccagcctggccaatgtggtaaaaccctgtctactgaaaatacaaaaatgagctgggcgtagtggtgggcgcctgtaatcccagctactcgggaggctgaggtgggagaatcgcttgaacctgggaggcgttcaaacactgcttcagtaaacaaggaaagaggtcatgaggaatctagtgagccaagatcgtgccattgcactccagcctgggcaacaagagcaaaattccatcttaaaacaacaaaaaaaaaagaatataggcagaagaagcagtcagttaggacaaatacccctaactttgattacattctttttttttttttttgagacacggtctccctctgtcacccaggctggagtgcagtgtcgtgatcttggctcactgcagcttccgcctkcccggctcgagctatcctcccacttcagcctcccaaatagctaagactaggttttgccatgttgcccaggcggtctctaactcctgagctcaaacaatccactcgccttggcctcccagagtgctaggattacaggcgtgagcccccacacccagccttggtacattcttaatatgtgttaggtgcttraattttcacaccagccctgagatgttggtgctatcagtaccccatttcacagacaagaaaacaggcccaggccaggtgcagtggctcacacctgttgtcccagcactttgggaagccaaggcaggaggatcagaagaggtcagaagtttaagaccagcctggccagcatggtgaaactccatctctactaaaaatacaaaaattagccgggcttggtggtgagcacctgtagtcccagctacttgggtggctgaggcaggagaattgcttgaacctaggcggagaaggtttcagtgagccgggatcacaccactgcactccagcctggacarcagagcaagactccatctcaaaaaagagaaaagaaaagaagaaaagagaagaaaaaaagaaaaaaaaaaaaaggaaagaaaaagaaaagaggtccagagttgtcatttgatgaaggaaggatacaaacccagaaccttgggtactatcattacactacagtgcctcacccacaaaggaggaaaatatcagtctggacaacacttccccacagttctgaagatgtcagcccaaggagaaacagcatctacaatgaattctctacccaaccaagtggccatttatgtccatggcaacatagatatattctcaattatgcagaagtttaaatgtaatgcaaatatgtgctgcttttctttagcaaacttattttattttattccattgaatttcactaaaggagatacagatgtgcataattatgttaatttacacatgataatatacattaagaccataagaaagctgagaaaatgcctgctcagtcaaaaggtcttcccgagcaggggctgagggtcttgcacatggctggatccacacacaatctgagtcataggaggcattgaaggcactgaaggatgggcttgatgtacttggaacagctcagtcacctgttttgatgcagggcctgttgcaggtgtgatgactagagcggggatcatgagtgctaaaggaatttgccaaggcagtcataggtttaaaaaaaaaaaagcagatttattagaaggaaagtatgttgcaaggaagcaacgggcagcacagcagaaaagggactgtctccaaaaaggcaggggctggaaggaagctttatagggtcatgctggagggggttcgtgcagttacagtcctgctgctggggctacgtgcagagtgagggaacaggatgttgtgcaagggcctgtttgtggttagccgtctctcagaacaattgttctccccaacctgggaccccttcctcattgttgcttatttatcaggattccacagagcccaaatcaatattatagaaatgggatcgggtgagacaatccatgtatcacctatgaatagactcaaaagaattggaagtagggtcttgaagagagatctgtacatccatattaatagcagtttattcacaatagccaaggcatagaagctacctaaatgtctatcaacagataaatggataaacaaaatgtagtgtatacttaaaacagaaaattattcagccttaaacaggaaggaaactcagacatgtgggacaacatgaatgaaccttgaggacactatgctaagagaaataagccaggcacaaaaagacaaaatattgtgttccacctatatgaggtacctagaggagtcaaattcatagaaacagacaggagaatggtgttctccagggcctgggggaaggagagaatggagggttgtttaatggaaacagagtttcagttttgcaagttctggagacggatggtactgatagttgcacaagaatgtgaaaatacttaatactactgaactatatacttaaaaatagttaagacgatgcatttgatgtcatgtatgttttatagaaatacacatatatgtgtatatatgtacacatatatttgtataaacatatagtcctataattaaacatttttttatgccgggtgcagtggctcaagtctgtaatcctggcactttgggaggccaaggtgggagaattgcttgagctcaggagtttgagaccagtctgggaaacatagcgagaccacatctctactaaattttttttttttaattagctggacatggtggtatgtgcctacttaggaggctgaggtgggaggatcacttgagcccagaagacagaggctgctttgagttatgatctcaccactgcactccagccagggcaacagagcaagactttatttcaataataataataatactttaaaaaaactgctttcaagacaaagttatctccaaatccagcttccatcgctatagagcattcagaaccaacaagtcttcgtgctgttggacctgctgtgctagagggcttcatgtccatcagatgaatattagcattccctctgagtctgtatgagactgggcttgatgcatccttcatagcacttgtcaaggcaccactcacacccagatcttcagcactggtagcatccccgttctcattagatagcaccgccattttcctcagtctctcctatcttttagagcagcggtccccaccctttttggcactaggaactggtttcatgggagacagtttttccacaggtcrtgggggacggtttggggatgattcaagcattacatttattatgcactttattgctattattattacatactcaccataatgtagaatcagtggaagccctaagcttgttttcctgcaactagacaggacaggtgttgggagacagtgacagatcatcaggcattaggttctcataaggagcatgcaagctagattccttgcatgcgcagttgacaatagggttcacgctcctatgggaatctaaggcctccgctgatctgacaggaggcggagctcaggcggtaatgctcactcgctggccgctcacctcctgctgtgcagcctgcttcctaacaggccrtggactggtactggtccctggcagggggttggagacccctgtttagagcactgttgaaagacagaacactcacgatttcactcaccatggagacatcagtgtgagtcaccactctccaaaggtgatctgcctccaaagtctatcactgggattcaaatgctctctgccaagttatagtttctgggtcaatattcagtcctagaattctgctcaattctttatcagtgtgatagagtcagattctcaattctcactcttaatagccttcagatttgggtatcagacaactttcttactccattgactgaagataccaaatggtaaaagggacctctgtccctctgtgtcagctcatggaatgcacaaacatcagcagctgccccaaaaagaacactaggtcacctgtgaggctgatgatgaactccataggaacgactgggcagtctactgcctcgtatttcaaaagttccaccctgagaagctgtcaaacctaagcaaacctaagtaggcacataccaccatgtccagctaattgaaaaaaaatttaatagagacgggggtctcgctatgtttgccagactgctctcaactcctgagctcaagcaattctctcaccttgggagcctgacgaagagcttgcaccagcccattgtrgttgttctttattcccaggacctttggggatcttctagtcactgccatattgtgttttttgttgttgttgcttgtttgtttgttttttgaaacagagtctcactctgtcacaagcccaggctagagtgcwgtggcacgatctcggctcactgcagyctcctcctcctgggttcaagtgattctcctgcatcagcctcctgagtagttgggattacaggcgcccatcaccaccatgcccggctaatttttgtatttttagtagagatggggtttcaccatgttggccaggctggtttcgaactcctgacctcaggtgatccgcccacctcggcctcccaaattgctgggattacaggcatgccactgcgctgggccaactgccaccctctttctttagcctctgacttgctcagagacgaccttcctgttcaggattcttgccagcaccatggcccgagtggtctcctgcctcctctggactctgcacatacatgtgtgtaacatgggatccagccagctgactgaatcgaaataacttccacacggggatggcatggtaggaaagaagttgcagggttattcaatcaatgtaaacttagaattaagaataactggctgggcgctgtggctcacgcctgtaatcccagcattttgggaggccaaggtgggyggatcacaggtcaagagatcaagaccatcctggccaacatggtgaaaccccatctctactaagaataccaaaataagccgggcgtggaggcacacgcctgtggtcccagctactcggggggctgaggcagaagaatcgcttgaacccgggaggcagaggttgcagtgagctgagattgtgccactgcactccagcctgggcaacagagctagactctgtctaaaaaaaataataataactatgatgaccactctraaaaaaatgtaatttttatcattcttctcagaaatctrtatgatgtaaaaataaatatttgtcagtagtagactatgacaatcctagaaaatacttacattaaaataggggagggaraagagaggagagtataaatatggcaacctgtcagtccragagtctttattacaaataacagaagcttaccctggctgagtaaacataaaaggaatttagttagttggttagtttcaactttaattttagtttcaaggggtacatgtgcaagtttgttaagtgggtaaattggatgtcagtagggtttggtgcaccagtgatttcatcccccaggtagtcagcatagtacccaacaggtagtttttcagcccttaccttcctccccccatcacccctcaagtagtgtgtctctcgttcctggtgtctcctattcccatctttgtgaccatgtgtactcaatatttagctcccagttataaatgagaacgtgtggcatttggttttctgttcctgcattaattcaattaggataatggccgccagctgtattcatactgctgcaaaggacacaatttcattcatttttatagctgcattgtatttcatggtgtatatatactacattttcttatccagtccactgttggtaagcatctaggttgattataaaaggaatttattaaagggattttgaatagcttataaaattgctggaaagtctagagaagtgggcttaagattcatcttctgggaacagcactcaaaaccacactgcagaacagtctgaggaaggaactgctgcaatcaccacccagcactacatgctacagtttataccactatcactctgagccaggaactcaaccttctagtcaggaccactgccaccagaacaaaagctcctaatgtcttttccctcagatcattcaccaaagtctggcacatgtgtgtcagatagacagaaacaaagtcacatgtgccaagttgcaagattctgggaaggtgagtatttaacattttcagatctattaagagaaataattgtttccccacacgaggactcataaagtagatcattcctccaaccagagaaggggttcagttgctgggggaaaacatgcatgataattgtccagtatagccaatttcctcatatttcatagatgtgaatcaatcaatataacttcatttctgaaattgattaacattataaacatattaaggctataaagataaaacgcttttttttttttttttttttttttttttgagacagtttcactctgttgtccaggctggaatgccgtggggcgatctctgctcactgcaacctctgcctctgggttcaagcaatcccaagtagctgggactacaggtgcgcaccgctacgcccggctaatttttgtaattttagtagagatggggtttcactatgttggccaggctggtctcaaactcctgaccttaagtgacccgcccacctcagcctcccaaagtgctgggattacaggcatgagccatcacgcctggcctatacttcttaattactggagtacaagaaataaagaccatggaacatcaacagaaaacaaaagagaatgtaaaagtttcaaaagacaaaataagacagcagaaacaataccaaatacatctatcttaataataagtgttaagtgggaaaactaatttagattatcagatttaacctttaaaaagaatatattttgcattagacatagacctaaaataaagtgactcaggttgaatgtaaaaagatgggcaaaaatatatcagatatattcaatatgcacaagatctatatgaggaaaactacaaaactctgaggaaaaaatcaaacatctaaataaatggagagatagtccatgttcatggataagaagactcaatatagttaaaatagcagtttttcccaacttgatctgtagattcaatgtgatcccaatcagaatcccagcaaattttcttcttttttttttttctttttttttttttctttttttttttcttgagacagagccttgctctgttgcccaagctggagtgcagtggtgccatcttggctctctgcaacctctgcctcccagattcaagcaactctcctgcctcagcctcctgagtagttgggattacaggcccaccatgcccagcagctaatttttgtatttttagtagagatggggtttcgccatattggccaggctggtcttgaactcctgacctcaagtgatccacctgcctcgacctcccaaagtgctgggattacaggcatgagctgctgtgccccaccccaaaatcccagcaaatcttatcttgtggatattgacaaaatgattttaaagtttatatggaaagccaaaagacccagaatagccaataaaatactgaaggagaagaacaaagttggagaaccgacactacctgactgaaagacttactataaaactacagtaattaagacaatgtggtattggtgaaagagtagacgtgtaggtcagtggaacagaatagagagccccaaaatagacccatgtaaatatagccagctgatctttgacaaaggtgcaaagccaataccatgaagcaaagatagtcttttcaacaaatactgtaagaacaactgaacatccacatgcagaaaatgaatctagacacagaccttttacattttataaaaattaactcaaaataaattatagacataaatataaaagagtacactacagaacttctagaagatgacataggaaatctaagtgaccttgggtttggcaaagagtttttagatacaacagcaaaagcacaatccatcaaagaaaaaagtagacaagctagattacagtaaaatttaagacttcagtgaaaagcactgttaagggaatgaacacaagccacacgctgggagaaaatatttgtcaaacacatgcctgataaaagacttgtatccaaaatatataaagggccaagtgcggtggctctcgcctgtaatcccagcacgttgggaggctgaggcaggcagatcacctgaggtcaggagtttgaaaccagcctggccaatatggtgaaaccccatctctactaaaaatacaaaaattagctaggcatggtggcaggtgcctgcaatcccagccactcaggaagctgaggtgggagatcacttgaaccccagaggtggaggttgcaccactgcagtccagccrggtggcagagcaagactcgtctagaaaaaaaaaatgtatatatawagagagagagagcgcgagcgcgtgcaagagagcaagagagagagaacccttaaaacacaacaatgagaaaacaaccaaccacattaaaaaatgggcaaaatggccgggcgcggtggctcacacctgtaatcccarcactttgggaggccgaggtgggcggatcacgaggtcaggagatcgagaccatgctggctaacacggtgaaaccccgtctctactaaaaatacaaaaaattagccggccgtggtggcaggcgcctgtagtcccagctactcgggaggctgaggcaggagaatgtcttgaacccgtgaggtggagcttgcagtgagccgagatggcgccactgcactgcagcctggcgacagagtgagactccgtctcaaaagaaaaaagaaaagggcaaaatttctgatcagacacatcacaaaagatgacatacaaatggaaaataagcgtatgaaaacatgttcaacatcatgtcactagagaattacaaattaaaacaataagataccactacacacctattagaatggctaaaatccaaaaatctggccatattgaggaaaggttattaggatgagcagttctagaactgggatcagataaaaggggaaaatgcttcggattaaatgaaagagtagaacatgagtagtagaagaagaaaatgaaagttgcacttagaaagggatctcttctattcatggggatgatctggtcagggccattgtgggcatccaatgccctaataatttctgagaaacttcttcgtgtctgtttctcaagtatcttctctgtcctactagaaagtagccaaatgaataatggattaataaccccatgtgcttatgtttcagttggcttgtgctgctgtaacagaataccacagactgggtaatttatgatgcacagaaatttattaactcatagttctgggggctgggaaagggctacctctggtgaggggctacttgcagtgtcaccccacagcagatggcggaagggcaaggagagaggcagagagagaaaaaaggggccaaacccatccttttataaggagcccattcccatgataacagcattaatccattcatgagaacagagccctcatcacctaataacttctcattaggcctcacctcctaacatgctcgcattgtttccagaacatgcttttgggagacagcactttcaaaccacggcaatatatgatggcatccatttagccacaaaccagcaggtgttgccgttctcgtttacaggagtcaaagctgagtgcctggagtgtccatcttatccagcatggcaaacttgcaaagtgatggaattatggatttctttttggaaatttgggaaatatcaaaactgagagatagtcagtcagatgggacaaacactgacctgttgaacgggcttggttaagtcaaggtccagggtggatctaggtcaatcatattctaaacaagtgagggctttgatattcctgtgctgaaggccatgtcagaacaactcttacttaagttaatttggtgatattacaactctctttcaagcatcttagatttagctcccaatgtgcaatcaacttttgatgtggaaaaaaagcctatgctgaaagtagttaacagtggctagtctgctgctatggacatttgacttaagggttcagagacggactctgttgaattattcttttattcacacatatcacccaccctcctctctctggtttccaccttcaggtataacctaacccactctaagcttgatgttgcctgtggcctaggacccacccayagggcggaagcctctccccacacaggccatccgccaacaagtaagaattgcccacactgaccaggaatagtacgaagtagttactgggatcctctgaaagccataatatgaaagtatctagagactgcccttaggaactggtgtgtgggtctcaaatacttcccaatgttaggagaaaaaaaaaagcacaagagttcaccctgcagtgctttctgagaatttaaaggtgaggtatatacctgtaatgtccccaggatcccactgaggataagcagtatatgatatcttctagtggagtgtgcaccaaatttcaccgtgtaaaaatataccattatagaccttgtaaaatataccgttacaccatgctggctgcaacctggctgtaccattaactgtaatcctgctttgttttcttggagtaggagaaacaggcaaagccaaccaagatgcttttgattcccagtagtactgttaaatagaccagcgttgcttagaaataggtgtgggtctgtctacttcagatgcaaaggataaatgcagtgggtgtcacagccacaataataattatgtcatctgtcttgtcatggaatgtgactatagtaattgcggcattttctcccatcattgaagcttgtaattatagtgcaactaacaggattacgtgctaacttgggctgccttaatcacctcttttactctgaaatgtgatggtaaaattccacagttgttcccaagctaccaattcttttcaacatctgttgtcttgtaactctaacagttcaatactaagacggggaggcacagagatgctccaggcatttcatcacagtgaacttgagggaaagccgaattcaggcttgatgagaaaggatacacagtaaaggaatttgcaattttctaccagaataagattttctctttgaaagcaaattgtctactttatgttccaaagatggcagatgtttaatgggatctggcgttgtctgcaacccctatttggtacgtgttgaaggaaacctccaaccataaacatcaatctagggctgattaagaaaactctccctctcagcggaaggagcagactyaggttaattaatacctggatactgagctatttgttgggacgccacctttcatgtgtcaggctcatttagacggtcattacctatatttatcttttcagatcacattaacaataaacttcaggggttacccaagatactttggttataaaggttatataggactctggacgctatgtgaaaagacggggtgatgaaggtggaaaactcccttgactattttgctgtaagatgacttatgctgtattagatgcagctgtgcgtaagtgggccattcttcacagtgttacatttcagtaattctgagtgcacctaggaaattaatgtttcacggaaccaacccagatccacacattcgggcttaaactgagcacttcttgatcggcagtaatactggcttcattgtgtgtgcattcctgttgtatgggtgcacagacaggactcagcaagccagaggagtggttataactcagcaaacgcaactgtgatcttaaagcaacaaaaggaggcaatctaagaacaactcgttttcttgcaagaaaaattgtggcatcaggtacagtatcacctttgggaggtgagagaaaaattcctaggtgagacctgcttagacctggcaaggccagaccattaatagcataattgttagggtgttgcagacactgggctgtaagggaagaagttactctgctatggagtggaacatgggcccaacctgacttctcctcgactgagctgtcccccgaagccccgacattttttgagcccactcctttaatgcttggtcatgatgtacaggatgtactggttgatagtgcagcttccccagtgaggcgcccccttgaggttgctcctagagaattaaaagagtcgaactggcccatgatggatgttgataaccaccgggacaggtaaactgatcaatgggaagaragctatcgtgacagtttagccagccaacttctgaccagctggattgtatgtgtagacagaaggggattggcgggtcacagcctagaggaaggggtgtcttggagaccacagtggctgtgtccatcctgtacttctcagggccggggggaaagggggtgagtcccagctgaggacacctcctgtctctaggttaaacgaaatgacctaagacactctaggtgggagactctccttcttctggtcctgtgagctcccaggtagttgaaccacaaggatctctcctcgtgtgcactggatggatgggcaggtgagaatgttccaggccacttgagaattacgggtctcattgtcaattaacaaagcagctgctgtagtatagcggctgagtatagattctgtatacagtgtagattatagattctgtatcgagtgtagattctgtgtagtataaaasgggtccccaaccgccgggccatggaccagtaccagtctgtggcctgttaggaaccgggccgcacagcaggaagtgagcagcgggtgagcaagcaaagcttcatctgtatttacaggtgctccccattggttgcattaccgcttgagctctgcctcctgtgagatcagcagcggcattagattcttacaggagcacaaacccaattgtgaactgcgcgtktgagggatctaggttgcaagctccttatgagaatcctgtgtctgattatctgtcactgtctcccatcacctccaaatgggaccatctagttgcagaaaaacaagctcaggcctcccattgattctgcattatggtgaattgtatataattatttcattatgtattacaatgtaataacagaaataaartgtacgataaatctaatgcacttgaatyctcctgaaaccatccccccacccccagttcatggaaaaactgtcttccacgaaaccactccctcgtgccgaaaacgttggggacggctgtagtacagtacagcttagcttcaaattctggctgtctctttttttttttttttttttgagacagagtctcactctgtcgccaggctggagtgcagtggcgcgacctcagctcactgcaacctctgactccctggttcaagcaattctcctgcctcagcctcccgagtagctgggattacaggcatgggccaccacgcccagctaaattttgtatttttagtagagacggggtttcaccatgttggccaggatggtcttgagctcctgattttgtgatctgcctgcctcggccccccaaagtgctgggattacagtccgtgagccaccgtgcccggccctgtttcctctcttaatagatgggtgaccttcttaacctttgtgcctcattttcctcatctgtaaagtggctttaagataatacttatcatgtataccttgaaaattgcttgccagactcataggctcatgcctgtaatcccagcactttgagaggccgaggcgggcagatcacctgaggtcaggagttcgagaccagcctggccaacatggagaaaccccatctctaccaaaaatttaaaaattagccaggcatggtggcaggagcctgtaaccccagctactagaaggctgaggcaggaaaactgtttgaaaccaggaggcagaggttacagtgagctgagatcgccctactgcactccagtctggatggcagagtgagactccatctcaaaagaaaaaagaaaattgctaaaagagtaaattttatgtttttaaccacaaaaaaagtatgtgaggtaatagatatgtcagttagcttgatttagccattctataatgtatacacgtatcaaaacatcatgttgtacaccataaatatattccatttttatttgtcaattataaataaggaattctacttttttttttttttttttagagacagggtcttgctctgccacccaggctggtgtgcagtggtgcgatcacagctcactgcagccttgaactcccggactcaagcgatgtccctgcctcagcctcccaagtagctgggactgccggtgtgcactatcatgcctggctaattttttcattttatggtagagtcttgttatgttgcccaggctagagtcrtacgtataagaagaattaaatgacataatacatctgatgcatgtagcatagtgctggcacctgagaagcactcagtaaatgtaaatgttagcttctatttgtattatggttttatccagctgcctcctgagcttgtttaatatgggtcagccacaagagatgatctattctgagtgtgccaggaaattgtgtttctgggcccagaagtccagtgattgccctctgaagaaagggggcagattcaccaaggtgtcctctactgtctgggactggacaggttgtcagatgccccgtctcctggcctctcatcatggatccacagtggcgtgcaagtgttcttttgtgacatttcagcacacatggattattatagtgacttcatcatgtttgagatcacagtgagatcttctagagggcaaaactgttgccttattctttctcttgcatcctctgaattagctaaagggtagatagtgaatacttcctttctgaatgacataacgaggattatagagaattcagatgaaactggagcatgtccaaaaaaaatgaagtagatgggaaaagtgaaaactagaaaactggagagggcatgatagtcagacgagacgttcttttttttttttttttttttgagatggagtttcactcttgttgcccagactggagtgcagtggcacaatctcagctcattgcaacttccaactcccgagttcaagcgattctcctgcctcagcctcctgagtagctgggattacaggcacccgccaccacgcctggctaattttttgtattttttgtagagacggggtttcaccatgttggccaggctggtcttgaactcctgacctcaggcgatccacccgccttggcctcccaaagtgctgggattacaggtgtgagccactgcgtccagccgagccattcttaaacggaactcccagaagagctcactggagtcaggggcctagacttagcaaacccaagaggacagtggctcctagaggaggaatgtggttgttccaacactgcagcccttgtgtgtgctgcccaggcagcagtgaagaccactgcccaggggttgccagaggggtcaatggatgaatttagtggctgtcctaacatggtggccatgagggagaccccagacctcagcagcttctgcatctctgggcatggtgagaagccaggagtggaaactaaggaggtcatcactccagcagttggggagggcacttggctttccttagaaggtggcagcaagggagggctcaatctcccaagtccaccggctttgagttgcagcactcaccatgtgattccattctcttgtgtgtccatcgcagccctgtgggcctcagagtccatttccttaagcctgtgctcywgctccttgtgatggcttcacaggccccccacaggctcagttttcccctgagmctcacccatctgggaaattcctatatgggcgtcctgtaacccactgcaaacttcaaacactcctattcaactcaacatacacgtttttaggatcttaaatactgaccatgctattaaaggtagaatcatagacgtcttagagtaaattgggaccttagagctctccaacgctcctgaattttacaaatgagggaagtgaagctcagaaaggttgagctgcttacccaaggtcacacagctagcttacgggcgggggtagawctagaagcctgatgttcaccggaactcatttctccatgccacattcttaacaaatgtaggttttgtcaggatttagactaactcatctgctaaacttcaagttgatttatttgagtgatgtgtttagttgattcattgtatatctctgctggaattatttctagccattgctaaagcggttaggtctgaaaatcagaagaatctctgtaaaatgctgaaagatgagccaatttttaaaacccagaagggaatgtgtatggcctgtgtagctggaggcttctaaacattttttttcttcatctgtggaacatttttatcattctggggaagatttagacattgaatgtactaaaaggatttcatttgactgctatgtatttacccctgcctgtaatccgctaataaatactcgcaggcagaacagcctaattggcaggatgagttaatgcacaggccatttatctgccaagcacatgacacagaccatgaacaaaataagctggtaactgcctctccctcttagcaaatgcttgtccgcaccccgccctctcccaacctgctcttcctctggccttgagcttggggrcagtttgatgcacaactgccatgcgccagcaggcttcagataagcctggaaagaaatggaatggaaagaactttctggtcaggagcacctctctccgcagggaagtggccacyccaagttaaaacgtgtgctggctgggcacggtggctcatgcctgtaatcccagcactttgggaagccgaggtgggcagatcacctgaggtcaggagtttgagaccagcctggccaacatagtgaaaccccatctctactaaaaatacaaaaattagctgggcatggtgagtgcctgtaatctcagctacttgggagactgaggcaggagcatcacttgaacccaggagatggaggttgcagtgagcggagatcacgccaccacactctagcctgggcaacagagcgagactctgcctcaaaaaaagaaataaaaatgaaaaatgaataaaaataaaacgtgtgcttataaaatatagctaaatacaagttctgttgaggaggatgaagtgtctctctgtgttggtcacaagagtggattgcaataaaacaactaataatgataataaatatgatcacactggcttggccaggggctgccttctgctttagtcttccagaaacggtttagcaaagtcattgtgagactactgtcctggaacctccactcctcacctactcgagaatatatcaaggctgtctgggcctcctgccagccctcagtcctgtctccatgctggcctgccatgcgagggcagcctccccttcttggaggcccgcttcgaaccagtctcctagatctgcacaaaccctccctccagcctgggcatgaccatgtygtaggccgtgcacacaatacagcctaccctagggcttgtcccckctgtacgtggacaccycttccctggactcactctgcaaaggggcctttaactgagcacctstgctctgtgccctcacaggtctcycaggcagcygcggacctcctggcctactgtgaagctcacgtgcgggaagatcctctcatcattccagtgcctgcatcagaaaacccctttcgcgagaagaagttcttttgtaccattctctaactccgtgtgtgatgaaaacgcctccttttctgaccttcaaagtcccctgtagagaccatgcatgctctaagccttagggagtgagaccaacacccatccctgcccagccaacagtggccggggcttgtcttatgtttccatctgttttcttcgtggcattcaatttcatttttttyyttttcattttcatgttattttcattattggcaaagaaaatcaaaatgtttatagccaaataacaaatgtgccatgtaaaagtaagtctggacttaagagtttaaaatttttaaacatcagtttccaagtttatatcatattaatacatttcagtggataatttatttwaaaaaaaaaactatgcctaaatatcccttatttgyaatattcagtatcaaattagagcattttgaccaactgaaacatataacgttttcatctcctttcctggagaaagcagctgcagaggttctgtatttcctgcatttccatcatcctagtaaaaagacaacaacccacaggattggaatggttttcttttgtttttttkttgttgttgttgttgttttgagatggagtctcgctctgtcacccaggctggagtgcaatggcgtgacctcagctcactgcgacctccacctcctgggttcaagcgattctcctgcctcagcctcctgagtagctgggatcataggcacgcgccaccacacccagctaattttttgtatttttagtaaagacggggtttcaccatgttggtcaggctggtctcaaactcctgacctcgtgatccacccgcctcggcctcccaaagcgctgggattacaggcgtgagccaccrcrcccggccgtggaatggttttcttagcatatcctcctggggccgtggcgccccggctgtgggccgtggtggatgtcccttgtttcagtggtcctacaaaggtagatggtgggcggacaccgaagtcaacttgactgtaaaagtaccccataccgttgacgcgctgtggcagacctgtgggtgcggtctcccctctccaaatgccacctcttcctgctccctcctcttttggctcctactcagtagttccattgtgggctgcagtaatataaggacctgttctggacacagcactgggcccgctggggttttagtagggcagccccttccctgcaggagtgaggcatggtgacagcagtcccctatgtgcccccaagtcatctgagcattggtgtgcattaaggtactyaatcttccaacaataaataccataagtgcatgtctgttttattttatttatttatctttttgagacagagtcttgctctgtcgcccgggctggaatgcaatggcacaatctcagctcaccgcaacctccactcgcaggttcaagtgatcctcatgtctcagcctccctagtagctgggatgacaagcacacgccaacatgcctggctcatttttgtatttttagtagagacggggtttcaccatgtcggccaggctggtctccaactactggcctcgagtgatctgcccaccttggcctcccaaagtgctgggattgcaggtgtgagccagtgcacccggccgtatgtcttagagtgaggggaaactgaggcacaaagcgtttatgtagtttgcccaaggttacacatggtaagcagaaaaactgggatttgagggcaggcagcccggccccagagttcccttagccccctgaactgtgctaccttccaggtctacctgtttgcaggtagggagacccacaaactatcataactgcacaccgtgaagcaaacacctttgttgcagtaacccgtggcacacttcacttcccacattctccaggaggaagccgtattctggtagtttaaggaaggtgattcatggatgccccaaggaaaggctagacatcgatgaattagctcttggattgtctaagatcaacctgaaggtcctacctaaaccaaactcatatgatcccgatgaaagaggagaatacacagtgggagcagagctctttgtgtaagtttgttctattctgtttatttggaaactgcctctctccctagttctgaaagagacttgctgtgtgatagagaacaggccatttgtgcctgaaatgttctaacctgcaaattgggtttaatggtaattatcctgcctttctgtctgggaggaaacagagatgctacatagatgaaagctctgattatcatttaaaacaaataaatgtactaaatgccgtggtataatatagggaagaatggatgacttcaaagagaccatggttccgttggaggcataaaattgcctgcaaagaggcaaatgtaatttccagaccaattaatgacttgctgccctcgtaaatggatttaggacatctttgttccttgcttcttttgttaaaactcattcttagtttcattatcagctcactaataataccagtgttgttaagatgctcaaactagagcagaattgtatgctggatgtgacgctaggacctcagatcctttgatagtgcagttatgaccaggatctctttattctgtgcttcacgtcaacatcattaacccgatgaagcgaagcacaagtcataaaggcacatcagagaagccgagaaagcggggccgtacagagagcatcaaaatcaggtcagaaaaatgctgctttcctcttccaccaaaccttctccctgttgtttttacatgccccgtccctccagattcagcctccgttttgttctctctccttttccttttcctcctctcttccttaccttcccctgtgagatgcttttctgtccttttactgcacctcttccagacctatggcatttggggacgggtcacccttcctagagtgatcctgaatccagctgcctcttctttttttgtttttgtttttgtttttgagacagagtctctttctgtcgtccaggctggagtgcagtagcgcaatcttggctcactgcaacctctgcctcctgggttcaagcgattcttgtgcctcaacctcacgaggagctgggattgcaggcgcccgccaccacacccggctaatttttgtatttttagtagagacggagtttcaccatgttggccacgctggtcttgaagcccagacctcaagtgatccgcccgccttggcctcccaaagtgctgggattacaggcatgagccaccgcgcctggcctagttccctcttcttagatggagatttctgcacatgagctgtgagatccacagacatgtcactgagctcccccactctgtcagtggaagatgaatggaataaagcctgcttgcattgtggagtgcagctgtggggacagttgtcatttttgtgttttcagcttaactgtccagcatctcccctcccttcctacagcagggacatcatgccttagatataaacttagtggtgtgcagtacccaccgtggaagctgaagaagggaagtatttcctgtctctcaggcacaccccgcttccagccccataccagtcgggaagtggtcattgacctggggtggactacctggacccttgcttggggctatgagcctggagaatgtgacacaaatgaagggatgctgagactcatttcaaggaagccaccgtggtccggggttggtagtcatacagcaaggcaggtgggtagggctggcaggctgcagggatggtgtgtccactggtagcaatgtccagggatggcagcgtcctgggaatgtcatttctgctccactccttggactcgctgagctgtctccgcctccacctatcttcctacagacctcccttctagttttctgtcaattctttgagccagcaaactccatccagtacattctttcttctttcatgaaagagcttgagttggatgtaaatatatatgacctaacaattccacccctaggtgtataccctacagaaatgtgtacatgtgttcatccagagacatgctctaaatcttcacaaaaacactctccataataaccccgaacaggaaagcaccccaatgcccatgttggctggataagcacattagggtatattcacacgatggaatcccagactgcaatgggaatgagctgcaactccacccccaacttggagtgtattcaccaaccctagtgttgaacgagataaggcaaaaatgcaccataggattccatttatataaagtttaaaacccagcaaaattcatccatgcggttgcaagtagagatcagtcctaagaagacagtaaccagaagcgggcatgaggtggtgcttctggggtgttctgtttcttgatctggttgccggttacctgggtgctttccgtttgtgaacattcttggagctgtacacttttgatctgggcacttttctgtgtgtatgttatacttcaataaaaagttgggctttgtgactagcaatcaagaatcctacttttttggcactttgctcaaatttttactcctctttggatatcattaacattacattaatgataactaacatcgctagtggggcattttaagagcatgcttgacatcattttaaaatacaaactacgatcctcggctatctggatggagaataagccatcagcaccacacaggtagggccctgtgaacaagatgcgcaaatgctgtggaaattgtgtcttttgggaagacagtgaggaatcccactgcgagttcccacttgatggcagagatgttgtcctctcaggctctcctgccttctgaccatcaggaatggatggaggagatagcctgctgcaaaaccctatcatcagacaccaccgttggggagggagccgcagcacaggccccagggggctctcctatgacacctctgaatgcaagctcagatgcccaggtcgcccagcccgtaggtattaatacactggggccggaatactgatggccatgccttgctccttccactctgctcacatccctgggggctctggccctgcttctgaacctcggattgtttctgagcatctcccagggcgtctcccttgttctcagctaccaagcagcctctgccatctccctgtggcagctctgacatgttgagttccagggcaatcacagagcagcttcacgctgggaccccacgaccatgagtcaaaagggcttgcctctgatcctgagctccagcccccatggaagtcaactactaatctgtgaattgtcagcagcccccctgctgctgggagccaggggagggagcaaaccaaagggcagaaggaagtttgttctggtgactcttcagatttgagatgacaataataagagtaataacaagcaacattgatctgatgtcagaggcatgtgaaccaaaaactccatcttgaataggggctgggtaaaatgaggctgaaacctactgggctgcattcccaggcggttaaggcattctaagtcacaggatgagataggaggtcagcacaaaatacaggttgtaaagaccttgctgataaaacagtttgcagtaaagaagctggctaaatcctagcaaagccaagacggccgcaagagtgacctctctggttgtcctcagtgctacactgccgtcagcaccgtgacagtttacaaatgccatggcaacatcaggaagttaccctatatggtctaaaaaggggaagcatgaataatccaccccttgtttagcatatactcaagaaataaccataaaaatgggcaaccagcagccctcggggctgctctgtctatggagtagccattctcttattcctttactttcttaataaagcaagtttatttcactttgcactgtggactggccctgaattctctcttgcatgagatccaagaaccctctcttggggtctggattgggacctctgttcttaacactgagaagaacgtggatgatagcaatccattagacagaattattcacacttacatctcctcagctcttcggggggtaagacgccagatcatgggcgggttttttttgttttttgttttttgtttcttgagatgggatctcgccctgttgtgcaggccagagtgcagtgacgccatcacagctcactgcagcctcgagctcctgggctcaagcaatcctccagcctcagcctcctgagtagctgggactacaggtgcatgccaccatgccaggctaacttttttttatttttttgtagagacagggtctcactatgttgcctgggttagtctcgaactcctgggctcaagcaatcctcccacctctgcctcccaagcactgggattacaggtgggagccaccgtgcactgccatgggctgttttcatgaaagatcagaggatgccctctactccccagcttccagccacatctcctgggtggcgcactgctccgccgtccccaggatgtaggcccagagcagcagaggtggaggatgagctgggcgtctgcccagttttaatgcttttgttgatgtgtggacaaaacagggacacactagtaccatcctgcattccatctggtttctaggaaaaccctcacaacttgcttcagtttcagctatacataatttactaacttgtaaatgttcaaacccacatacaatcattaaccgcatgctggtattgtagccacttacttcaaagattcactagtgacccagggtggcctccaaggccctgcctgccctgactcctacttactctccagcgtcactttcacacctcactccccctgaaaaccctgtactccatccacgctggtcatgattcaaacccacctactagccatgctccctgctgccacaaggcctttgcacctgcagcttcctctgcctggcacactcttccctcctctctttgccagatggacttatttggtagatcttgactcaagcatcactgaagactcaagccttctctgacctctctgacgaggtcaaatctatctctaggttcttattcactgcgaggctctcctttgagacccgtgtcatggttgcagttgtacacttgtgtaagtgatgactcaaggaagatctgtctcccccacaatgccataaaccctctgagagccggggttctaggtgtgaaaggaaaagaaatctccccgaaatcactaagccagagggaagggtcaagctgggaactgccttgggcaaacctgcctcccactctattcctaagtaagatagctacatacccaccccaccctccaccaccaccacccccgcaagccccgcactccctcacaatttgcccatgaggaaattccttgcagacaaaggacaggcagaagtc

SEQ ID NO: 97761 - DNA, 24855 bp, Homo sapiens
  misc_feature (1)...(24855): n = A,T,C or G
gggaggtcacaagcattcagactctagcaggcctcaccgtccataattagttttaacatttgtcttatcacatttaggtgatgaatattcttagagataacaaatatcctgaatttacaagtaacaggaaaaaacatggaaaattatgaatgtctgtctttgtctgaaagtttatccttatattgaaaagaaatgtttttccctaatttgtacccttgggtataaattcaaaactattgccttttaaaatgtgatggagctcttaactaaacactgtttggtttcaaagataactttcttctcatcatatcctccagctgcctgccatttagctgaagctgtctctcagtctacatcttgtcctgtttatctcacgtggtatgtggctgttaagaacagtctgcctaacacctcattctttgttctagaacgtggttatttgttgagcatatagtatgtcatgcatcttttttttaaaagcatctcttagcttctgattgttataaacaaagaatctctccttttttctttctagaaatcttttttaatcactcgaaagaattgccataatccctgacttcaaattgcttcaagtaattgtggagataagacttatacacaaatgtcttgtctgattttaaatcctacacatgcaaatctggggatttcctgtagggacaggcggagtagtgctgccgcgcaggcgccagctcctcgtttattatgcagtgatgtacagccctctagtgggtctttaatgcaacataaaaaaacgaagctgagggcaatgaagtatggctttgttcattcatccattcatttgatgtacaagtgctgggttcctgctttgttccaggcacattttaggtgctgggaatactgcagtaaatcaaacaaacagcaacaaaatcagatacattagttactggagactaagaagatggagaggagaacaaatttgggatgaagatcaggaacttgatttttggcacattaagtctgggatgctcattaatcttcaagtagcttcttttaaacattaattaggtgccggatgcagtggctcacacctgtaatcccagtactttgggaggccgaggcgggtggttcacttgaggtcaggagtttgagaccagcctggtcaatatggtgaaaccctgtctctactaaaaatacaaaaattagccaggcatggtggcctgcacctatagtgccaactactcgggaggctgaggcaggagaatctgttgaactcgcgaggcggaggttgcagtgagccgagatggcgccactgcactccagcctgggtgacagagtgagactctatcacaaaaaaaaaaaaaaaaaaagaaaaagaaaattaaaattaaaattaatcaggccaggcgtggtggctcacgcctgaaatctcagcattttgggaggctgagaggcttgagcccgggagttcaagataagcctaggcaacttagtgagacctcatccctacaaaaagttaaaacaattggctaggcatggtgatgtgcaccggtgatcccagctaactcaggaggctgaagtgggaggattgctttaagcccaggaggttgagactgcagtgagctgtgatcgtgccactgcactccagcctgggccatagagtgataccctgtctcaaaaaataataataatagcaatcagtgtctctatggacatgtacagagtgcctgtgggagaaaatgcaagtgcaaatactctcttatttgagatttcaccaaatttaaatgaaaactgacaacatgagcacagttagcaagaaaagtgtgaagacagtgaattagaccatgggtgtggggagagtggttatcgagaagttcaagggttggccccactcttatagagttgctcatcttctttctctgtttaaatggaatcatctcagttcttcgtttgttttcttcttaattcttgccacaatttgtcacagtggagtttctctgtgtacttaggttacatccatctcttccacctacaggactatatgtctgtcctattcactgtggtatcctcagcatctggcacctgactcagcctctatttatacttgttggaggatgaattttccatttaataaggcagagaagatacatgcacatgagaagctagtaatatggcctagtataattctaaatgagtaaaaacacagttgattactcttaagagtaattagaagatagatcatagtgggttgaagtcaatcaggaaaaatttcagagaagaaattgggcatgagctgagacttaaagaatggatggaatatgaaggaaaaaggaaagaagttataggggaaaggatgttccctgtaacctgtccctgtttgactcccacatgcttctcatctcccagtgtctctttctattctggtgtctagtggtctctgctgggctgtcctgccctcactcatgatgcgggctaactctggccaacctttagggtttgtcatgtgagtgattcctatgctaccctttttttttttcttttttttgagacggagtcttgctctgtcgcccaggctggagtgcagtggcgcgatctcggctcactgcaagctccgcctcccgggttcacgccattctcctgcctcagcctccccagtaactgggactgcaggcgcctgccaccacacccagctaatttttttgtatttttagtagaggctgggtttcaccatgttagccaggatggtctcgatctcctgacctcatgatccgcccaccttggcctcccaaagtgctgggattacaggcttgagccaccgtgcccggactttttttttttttttttttttttttttgagacagggtctcggtctgttgagcaggctggagtgtggtagtgcaatcttggctcactgcaacctctgcctcccaagttcaagcgattctcctgcctcagccacccaagtagctgggactacagacgtgccaccacacccagctatttttgtatttttagtaaaggcagggtttcaccatactggccacacccagctaatttttgtatttttagtagaggcggggtttcaccttattggccacgctggtcttgaactcctgacctcaggtgatccgcctgcctcggcctcccaaaaggctgggattacaggcatgagacaccacacccagcctcctgtgctactctttattattgtctttggggctccactgtctttttttaaatgaaaagccagcatgtcaatacctatcatacctgggccatagcaagtgctcaataaatacttgttaaatgagcatatgtgcgtaggagccacattccatactcttgggatggctcctttccagatatttcgtctctgcctagagctggggcatttggcaattgagtacttgagggcccactcaaaatccttgcataattattaataaggggctttcgcagatttttatttaacgaagctttattgcatgccttctctattacaggacttatgctggctataagcagttcggagttcagctactgtgagagccatgtaaacaaataatgataagttttgatttatgtataaagtggtctatgaacactgtagatggaggattgactgtccaagtacgccagagaggcttctcagattacaggagaaaaagttggaattgaatcttgaaggacacgttatgtcctctgggcagacatgactggagtggataagggagtgggttggacagtattctggacaaatgcaatcacaggtgcaaagatggtggtggtggtgaggaactgagaaagtgtgcgtttagagcaaaagcagaagtggccagagagaaggtgcaggactggatttggggcaggataaccaaacggctcatttttttttttttttttttcttgagacggagtctcactctgttgcctaggctggagtgcagtggtgtgatctccactcactgcaacctctgccacctgggttcaagcgattcttctgcctcagcctcccgagtagctgggattacaggtgcctgccattgtgtctaatttttgtatttttagtagagacggggttcaccatgttggccgggctgatcttgaactcctgacctcgtaatccacccgccttgacctcccaacgtgctgggattacaggtgtgagccaccgtgcccggccagggctctgtcttatacagtttcatgttgctataataggatgccacagactggacaatttataaacaatagtttatttggctcacggttctggaagctaggaagtccaagatcaaggggtagcatctggcagcagccttttctctgggtcataaaatagcagaaggcatcacatggtaagagaaacagcaagggaaagccaaactcatttttataaccaaccgactctcaagataacccactcctgtgattacgttaatccattcgtgaggggtagccctcataacccaatcaatttaaaggtctcacctcttaacacttttgcattaagaataaagtttccaacacatgaactttgggggatacattcaaaccacagcaagctctatggataccaatctgtaagaggcacaaaaataaaaaaatgatgctaattaacacagccacttgcagtgccttacataacttttgaaacctaaattggtcctattcccctgaggtaagacagtgcccttgaatgttaatttaaaaattctcctggttggcaattccaattatcttatgttatattcagggcatgtaataagtcccttatttttacataaagagcttttaaattcttattaatagaaaatcaggtgtcttttaatcctttgctgaacagatatttaaagaaaactggcctgttcatgcatttccaaattattagctttctggtaatttacatattcctctaacaagccctggatggaggcctctaagtcctccttccctggtaaacatggggctgttcatttggctgggtaagctgagaacgttggtgtgtgggtgcgtaaaagagaatctgtgttcaatgaagtattgtcgatagggttaattgtgtatttggcacacataaacgggacaagacgtgtaaagtacttggtaggagagcgacagtatttctccttttttttttttttttggagactgggtgtcactctgtcgcccaggctggagtgcagtggcgcacggctcactgtaacctctgcctcccaggttcaagcaattcctcatgcctcagcctcccaagaagctgggattacaggcctgcaaccccatgctctgttacttttttttttttttttttcatttttagtagagacggggtttcgccatgttggccaggctggtcttgaactcttggcctcgagcaatccgcccgcctcggcctcccaaagtgctaggattataggcgtgagccacagcgcccggcctaattttcgtattttcagtagagacgaggtttgccctgttgcccaggctggtctgaactcctgggctcaagcgacccacccacctcggcttcccaaagtgctagggttacgggcgagcgtgagtcaccgcgcccacccgggagtctgtatttctaatttgtattcagctctcagcatatcctcaacgtgaccccacccaggttcagggtactggaacctgagcgaggaaggcgtgtgccggggagagtaggtagtgtgaggggccagagtgcaaaggtcagaaggcatctggtggaagcggtgtgcaaagaagcctgaggggaggtccttagatctcggttaccttggcgatctctatcagagggttagagttgccgagaggcgccagctgccgcttcctctctcccgccctccgtttggcttagctcgccgggttctcccacaggttaaaagcagacgccgacgcggttgcctagtgacacttttcccaaaatgcctagggtattgttgtgttcttcttagccaatgagagaggcgaagcggcccaccgcctgccaatagactgcgagatcagggcccgcgacggttaaacggggcccaaggcaggggtggcgggtcagtgctgctcgggggcttctccatccaggtccctggagttcctggtccctggagctccgcacttggcggcgcaacctgcgtgaggcagcgcgactctggcgactggccggccatgccttcccgggctgaggactatgaagtgttgtacaccattggcacaggctcctacggccgctgccagaagatccggaggaagagtgatggcaaggtgagcgtgggacctaccctgcgcctgcccctgcttaggtttcgtcgcctcggggcgagcgccctgcgccaccgaagggaaccgacagggctgaggaaatgggtgcccggaagactaaaccgtctttcctgggtctgcatctgacagcctgtcctgggtggcttaaaggatgggagaccgcttcttttgatatatgtatttccatcttttcccgtttctctccccatttctctctttctcctgctttggcttgctaaggaccttccattggtgacaggtaactaattcctgagctgtttttagagctctaagagtggccctctcaggcacaagaaaggggcaggactaccagaacccgaagctttgtatctgcagtcagactccctcaaaatatccattattaggattattggattcatatttcccaatgtatataggtagaacttttacagaaagtaacattggacaggaaactgcctggctgctgatggagggatctttaccaaggtgtctcatcctgggaaaacacgactggggtggaatggggcagggactttgaccaccttcaccccaattttgactatagtaccttttagccaacttcccactaaccaactgagggtaggggttgggggagtcctcatgtgcctcattcccgtttgtctccccacaacatacatttactgcttagaactggaggaagattatggaagtaaactcacagctccttaagttcattgaactaaattagataatgaccttgattgtaggatataattaaaagggaggtaatttgttaaatcttggaactttcattctttgtttttgagcataatgagttcattcataccttggaaattcttatttcrgatattagtttggaaagaacttgactatggctccatgacagaagctgagaaacagatgcttgtttctgaagtgaatttgcttcgtgaactgaaacatccaaacatcgttcgttactatgatcggattattgaccggaccaatacaacactgtacattgtaatggaatattgtgaaggaggggatctggctagtgtaattacaaagggaaccaaggaaaggtaagcataatcttttaaaaatgtaagctgaaattggtctagtttcatttawtttaagmatcttgttttaggatcagtaatatggaagagtgtatttgtatttgtttggtaggtccacagtactttagaaaattcctggtgaatcaacacccatattttatatcaaaataacaatttataggctgagtgtggtggctcacacctgtaatcccaacactttgggaggccgatgcgggaggatcacttgagcccaggatttcaagaccagcctgggcaacatagtgggaccctgtttctacaaaaattagccaggtatagtgacatgtgcctgtagtccaagctacttgggaggctaaggcaagaggattgcttgagcctgggaggtcgaggctgcagtgagccatgatcgtgccactgcattccagcctgggtgacagagtaagaccctgtctcaaaaaatataaataaataaataaataaattccctatttgtacactggataatttatatcatcccatcttggcaatgatttttttagaagttatatgctgtataactgctttggttttaggcaatacttagatgaagagtttgttcttcgagtgatgactcagttgactctggccctgaaggaatgccacagacgaagtgatggtggtcataccgtattgcatcgggatctkaaaccagccaatgttttcctggatggcaagcaaaacgtcaagcttggagactttgggctagctagaatattaaaccaygacacgagttttgcaaaaacatttgttggcacaccttattacatgtctcctgtaagtatttcagaatttagctactttttaaaacatcttttatttttgttttcttgtttgtttgtttttgagacagagtctcgctctgttgcccaggctggagtgcagtggtgcgatctgggctcactgcaatctctgcctcccaggttcaaaggattctcctgcatcagcctcctaagtagagtagctgggactacaggtgcatgtcactatgcctggctaatttttgtatgtttagtagagacagggtttcatcatgttgaccaggctggtctcgaactcctgacctcaagcgatctgctcacctcagtctcccaaagtgttgggattacaggcgtgagccaccatgcccagccaaaacatcttttaatgttaagcattctgaagcagggaaattgagttttctgttngtttagtaatatctagtagccaagaattgaaaatactgttatatttttccacatggaccaccagaccaataaagtctatatcagtttttgtttgctgcatgagttatgtgcattaatgtaagtatgatgaagacagattcctagtctaaggtttgcgccgtttgtcatctctcactgggttcaattttttgagcattcatgcaaattaaagcatattcagttcaagcttttatggaatgactatgatgcattaaactcaaggattacaaaaatgaaatggattttgtccttgccctcaagagttgtttcccaatgtgtaggtcctagttatctgcatcagactcacttggagtgtttgtttaaaatgcagagttctgggtcccaaacccaaacccaaatccatcgagtgaatttcgatctctgggtgggttcttgaactctgtttttttttttttttaatattttactttttattttagactttgcatttaagaggctctgtaaatgattcttgtgtatgcagaatcagagctcaggaagtttgctcacttcagatagcatgtttttacaatgttaactttttgtacattttatttttttgttgcctatccctgaaatatcttgctgagtccactcaccaattacctctattgctggatattttgtttccaacatgtttcaccattcttagaagtactgctctgcatatctttgtatgaattattctttcttcctttttggttatttccttggagtgtagctcataaaatgaaattgctggggtaaatgtttatggctgttattagatattgtctgatggcttttaaaaagtttaagtcaattgtgatagcactaatgtgttagtatataacatctgaacagataaagatgaagaaatatttgttagtattttagtagttcacctttctaggattttccaaatatttataaattatgttaacagatcttactatagtataaaactttgtaaattaatgattttggttttgactaaaaatagccagaacagtaccattttctcactgtatcaaattccaaatagaatgtttttaacataaaggacaattatccagaagtggttcttgggaaatttgaaacctattcttttgttccttttccctcctgcccttgtaattagagtggttcagctttcctaaggcactgattgtcaaaaagtggcatcagactcaccagttggactttaaaacactaaccagccactagagattgcttctattccctctgttgagaataggagctctggtaggctgttgttactgtagatgtggaagaaaggcaaacaataaaataggtaaggataatattagttactactgtgatttatggagtggwctaagacaaaatataaatggataattcaattagctatttatgtctatatccatttaaatgtggactagatacatattttgactattcttaaatttcctctagttcttttaaaatggtgtttcttaatttgccttgagagtagaagtctctcatattcacctctgtattgtcagtgcctagtctatactaagcactttcatttgtgaatggaaaatgagtgaatgaattatgtatgatggagtgtattggaacaagatcattgccttttttccattataaatttcaagataaagtataagctaaaaactttgaggttctgtttttatctcaggagtaatttaatgtgttttttaagtttcaaaacaaaataaactcttaacaccttccactttcttaccctttttccctgtataggaacaaatgaatcgcatgtcctacaatgagaaatcagatatctggtcattgggctgcttgctgtatgagttatgtgcattaatgtaagtatgatgaagacagattcctagtctaaggtttgtactgtttgtcacatttcactgggttcagttttttgagcctctgtgctaacgaaagtatattcaagtctgaaagaattgtaccctgggtaaaattaaggtagatagatgaacaggctaaaagaaactattcacaaattaaaactataagccatgaggctgggtcttgactgttcaagggtcttggctggttaggtgctttcttattagattgacacttagctcaagggagagcacataggtcaggcaggtaaggtaaagctactgtaaggatgtggaagaaatgaaacaagactcgggtagaggtctggggatctgtagagcagggaagagctccaattcttttcctttgttcttcttttcattttctttccctttgaaactattctgtagagcagtgattctcaactagggataagggaagcaaatttgcctcttatggggcatttgatgatgtttggataaatttttagttatcacagctgggsagtgcttctggcatctagagggtagagggcagrgaggctacaaaatacctataatgcacaggacagccccccacaacaaagaattatatgacctcaaatgtcaatagtgccaaggttgggaaacttacttataagaagaaaatcccagaagtagaaacttaaatacaaactggagcttaagctgtgcttttgatttagttcctattgtatattttcatttttacaatttgaaaatgtcttcgtcgtcttcttcttcttttttaaccctaggcctccatttacagcttttagccagaaagaactcgctgggaaaatcagagaaggcaaattcaggcgaattccataccgttactctgatgaattgaatgaaattattacgaggatgttaaacttaaaggtaaagatgataakatgatatattgtctgtttctagctgtcagttaagtgtcagagcatacattctctcttgtagatcaatggagactgaagaaacgttaaatatactttcttagctaaatttactgtgttaacacaagtgaaaacatatgtaaatttggcaaattgcacatccttgctggcccaccttctgcgctttctttatttctcctcccactctgtcatgctaacagatggtcggtagcaaggaaagattgcaaaaagaattcaaattctcgttccccttgtccttgcctacctcacagtggcaggtagtgagggaaggggccagaaataagagtttattactctgcctctagctctaattgagagattaaagaccasaagaaggggaggggtgatggagggcggacggaggacagctaaaaacagagggaaaatcaataaagagattatgtggaaaaactctggctatagaatggggaaggagatgttctggggaccaggctgacataagagaagaaggaaaatgccgtaggatcacagasaaggatacagatgaagtgacaggattgagagtcagtgagagagtatcttgctaaatgtagtttagaaatgcaagggcagtacttcccctaaaacagaccctagcaatgctaccaagccccagcacaagatgtgccaatcttcagggattgaaccttcttagaaaggtgaaaaggggaaaagggaaaaaaggtaagttaacatctgcattaccttgtggacccagaacctcatgagttaaaaccaccagtgaacttatttttccaagtktttaagacctagccataaaggagtcctttcttttgtcttggaaacacatttttgtccttttattttaactgctgtcttaggaggactattctgttatgcaatctgactataatactgagtattttttccccaggattaccatcgaccttctgttgaagaaattcttgagaaccctttaatagcagatttggttgcagacgagcaaagaagaaatcttgagagaagagggcgacaattaggagagccagaaaaatcgcaggattccagccctgtattgagtgagctgaaactgaaggaaattcagttacaggagcgagagcgagctctcaaagcaagagaagaaagattggagcgtaagtctgaatgggggtcaaagcaaaggagaactaccaagtgggttattttgatgtgtctgaatatctctttgagcagaatattttatacatacagatcttattagaagcttttgaaaaatacttgagaaaccaaaatatgtattttagactttttaataatcaggcttgctggcaccttcatgttggacatctttctctgagatcagttgctagttatatattattgggccttaactgtgatggccctaatacgatagccttgtattttactctagagttacttttttctttttcgtctctactgtgaataccctaatgttttcccactgtaaaggaaggtcttaaaattgctgctttccataataaaaaaccatgacttttgtcttttgaaatggccactccaacagaattccaggtctaaaaccctacagtatgtagatgagatatgttcaggcaattcttttctttttttttaactttttatttttgaaaatgagatggggtctcactatattacccaggctggtcttgaactcctgagctcaagtgatcctcccatcttacctcccaaagtgctgggattataggtgtgacctaccacacctggtctgttcaggcagttcaatagagaatctagatacaagatattttaagtctataaataatactctggtgggtattaacattgacttatgagtattaactgattagatgctaatttagttttgatattgaaagtgtgtctactccaccaagatgagagctactcgcaagcatttagggttatgcaaggtagctacagagtgaggttcttcattttaacatcaggagacgagagatggggtcgtatttgtgacctgtcaccctcatgactcacctgattttacttctgcagctttatgcccaatccaggctttaaataatgaaatattgtatagtcctgtgagatatgcttactgtataggtacaacctatacttacttggaaacctctgtaaaaaataagaaagctttttcttataactttccccagtgtttcataatttcttttcttttttttttttgagatggaatttcactcttgttgcccaggctgaagtgcagtggcaccatcttggttcattgcaacctctacctcccgggttcaagcaattctcctgcctcagcctcctgagtagctgggattacaggcgcctgccaccatgcctggctaatttttgattttttagtagagatggggttttgccatgttgacctggctggtcttgaactcctgacatcaggtgatccacctgcctcggcctcccaaagtgttgggattacaggcgtgagccactgtgaccagccataatttcatatagcaactgaaatctgaatactttctgaatttggggccatgaataaatagtaacatttgttattaatactaatcctatgaactaccacctaactgaattgtgttttttttcttttgtttgggtgtggtcattcaaccagaagaaggagatttttgtactgtgaggccagatcatgccctgaaaattagctgttgcttatcttcagtgaagagcagagatagctttagttttttgttttcccaaatgagttactcccacaaaagatgaccaaaggttgaagctaactttgtatttgtttaaacaagtcctttcaagaaaatctaagataacatacagcctactaaaacactcaattaaaaactaacataatcaggttgactgaggcatagtgagaatcctttccccaaacattgcttatcagtatcaggcatgctagtagtgataagattgccaaatgtaaattgttttttagtcaaggtcagttgttaatttttttttctttgtccattctctttttaaagagaaagaacaggagctttgtgttcgtgagagactagcagaggacaaactggctagagcagaaaatctgttgaagarctacagcttgctaaaggaacggaagttcctgtctctggcaagtaatccaggtatgagaatcaacttggtcaacagaagctggtgctacaaatgaagaaatgtgcaccagtgttgctcccaaagtggcttaggtagcccttttcatttacaaatctcaaattttaagatggatttcattgaatatatgcatttcaatggaaacaaaattctgttatagcartgatttatttcctgggttcatagacctgaggcaatgagtcatagaatttcatgtttgattttctttaccttatcaaactacatgtttagtaattgatacttatttttattatcattatttatttttttattttttttgagatggagtctcactctgtagcccaggctggagtgcagtggcacaatctcggctcactgcaagctctgcctcccgggttcacgccattcttctgcctcagcctcccaagtagctgggactacagacacccgccaccaagcccggctaatttttgtatttttagtagagacggggtttcaccgtgttagccaggatggtctcgatttcctgacctcgtgatccgcctgcctcggcctcccaatgtgctgggattacaggcatgagacaccgtgcccagccgatacttatttttaaaaattagggcatttacaaaactattgtatgtttcagatttcagagagataaactgcatttcaagtaaaaataaacattttaatattgccatgcctcatttttcatagaaagcatggcttaaaaggcatgataagccacctgcagaataggctgtcacgtttggatctttgctaacaccctttcaagttgaaagacatatttgttgaaatttgattgtttaatatctacatatgttctctgcatttccttctttatttaaagtctggtatatagatattcagctttctcagggccctgcctttgtgtggcattgtcccttcactctgccgcactgagatgtggttatygtatataccagtgaaccattgtctaacattctccattttatagaaaccctcaatctaatttaatcgactctttaagattatgtaaaatgcaaactgtgaaacatctttttgcttgatttatgacacaaactaactgttaaaagttgttggtttcaaaaatcgagcatctgaattttcaataaaattyagagtttttataactcccttattccatgtaggacagcatatatgaaagctattattcccatctttaataaattgagatgtagtgtgatcaatttagtgagcattggcagcattttgtaaatggaacagacaaaaaaccctacttaagttagattgatgatcacaataactttgtagtgaataagtgatggaaagaaatgaaactactgatagaagtaaatgaaacaaggattatatgaaactttggcttcatctctgttaaaataccttcttttttcccaatattgcagtctaccatttcaatattataaaaatatttattctggcttttcatagattccacactgtcatccataaagacaaaatagacttaaatcatgattagggtgataaaatgaggagaaaattttacctggatgaatttcatgcatcaaacccattgcagagaattacttaagaccctgttggggatggctgttcggttaaagagtttatttacatttgccctgatagtctttgagcaaaagatgaaaatagctaagtaaggatgatgtgttttactttataggatacacagataagkatgggaatctacttatatgtgaatcatggcaaatatttaaaatgagccataggaatcaagtatccactggggcaagcagacattttagggtattgagtgctgaaagtagtgaacacatcagagctataagataagcatcatagcagtggggagcgggtaccattctgaactcaggacagttggaaatattctctccccatccttgggctataaaatccacacgtgaggaagscatcacaagtatattgaaatcatcacagcaagcagcagtgtcttttttaaaagctgttcttttcgtatttgatgaaatattcattcttctatttaatggaagaattttaaaaatgtttttaaaacactttctttcttataaaactgtcccattaagagccaagtgtggtgacgcacctatagtcccagctactctggggctcaggcaggaagatcacttaagccgaggcgtccaaggctgtagtgcactacagctgcacctgtgactagccactgcactccagcctggaaaacatggcaagaccccatctcagacaaaaacaaaaacaaaataaaactatcccattagtaagacaatgttgacttacaaaygtaaaggtatttgtggtaataagaaggtggatagagttgaaacagtggagataaggtctaaaagcaatccagtttgctttgaagcagaagcgacgtatgaagcgggaagtcacaggacccttggaaggcagtgcatctgtgtgccagcctttcctatttcttctgcctggagcactcttcatccagacagccctgtggcttcttacttcagaaatrctgtatgaggctttgtatcattacacccagcacccagcacccagcatgtccctgtttccagagctatttttcctaatagcacgtattaccatcaaatattccccaccagtacttgtttgtttgtgtttggtttatctcctcctactagaatagggcctttgtttggttcacagtggcccatcctatgagctcagtaaatattcgaacatatttcctttaacacaaaaaataaaaggattctagaatctgtaagcctccagcccccagtaattctgtcagcagttaatagtgttgccactttaagtaaatatgattattatttattttttccatgtaaagaatagtttacagtttttactactcttacttgatttaccttttccacactgaatttgtttagattttttggaaacagatttctcgtccattaagatgctttgaactaagtgttcttgaacatttaaccaaaactgtaggtgttctctatttaaaaaaaaaaaaaaaacaaagacagaaaaaaacctctgcttctacacttttctgtaggtaaggtgttctgcatagaatggcacttattttcaaggacagagataaataacattgatttccaaaagttttatgttgtccataatactcagtgtgtttaagagtaaaattgattgttggttgttaagagaataaaacttatgttccttgaattttggcacattccaatattattttttcaatgctgtggattaaaaggctgatttctgcaagtcctacacccctaacctcctatcccagagaaaataaaacaggcacctagatttcaaatgtgagccataagagcaaatactttttgataagtataagtatgaaggagttgaactctgttcaagtaactcagagccctttttctttttccttctaaagaacttcttaatcttccatcctcagtaattaagaagaaagttcatttcagtggggaaagtaaagagaacatcatgaggagtgagaattctgagagtcagctcacatctaagtccaagtgcaaggacctgaagaaaaggcttcacgcygcccagctgcgggctcaagccctgtcagatattgagaaaaattaccaactgaaaagcagrcagatcctgggcatgcgctagccaggtagagagacacagagctgtgtacaggatgtaatattaccaacctttaragactgatattcaaatgctgtagtgttgaatacttggytccatgagccatgcctttctgtatagtacacatgatatttcggaattggttwtactgttcttcagcaactattgtacaaaatgttcacatttaatttttctttcttcttttaagaacatattataaaaagaatactttcttggttgggcttttaatcctgtgtgtgattactagtaggaacatgagatgtgacattctaaatcttgggagaaaaaataatgttaggaaaaaaatatttatgcaggaagagtagcactcactgaatagttttaaatgactgagtggtatgcttacaattgtcatgtctagatttaaattttaagtctgagattttaaatgtttttgagcttagaaaacccagttagatgcaatttggtcattaataccatgacatcttgcttataaatattccattgctctgtagttcaaatctgttagctttgtgaaaattcatcactgtgatgtttgtattctttttttttttctgtttaacagaatatgagctgtctgtcatttacctacttctttcccactaaataaaagaattcttcagtttccctgtagttatgtgtcttgcatttgttggtctcttagttgatgggagttgtgtttatgatttgtaggtcttcattgtagggtacagaaggaaacatggatctgatgctcaagggagtggcattccagtcctaaactgtatggcgctttacctcccatctcattaatccatgtatgtaagccagtggtccttaacagggtgattttgctcctcaagagacgtttggcaatgtctgggggcatttttgattgtcatgatttggggtagggtgctactggctgctagtgggtacaggccagggacactgtaaacattttacaatgcacaggacagccgctgacaacaaaatgtccatgggtttggatcataatcctgaatgatacaatctcaaatgcgaaaatcctgaaagaccaaaatccctaatgtcttaaatcccaaaagatcagaatccctaatgtgtgaacttccaaaatcacaatcctgaaagattaaaatcccagatgttaaaatcctgaaagccgaatttgaggttagggattagtgccgtttcagctgtatacaggataattgcatcatgttaggcagaactattaccttgttattgtcttcatttggaaattaagtatggtttaagagatgtggatggatatcgagttgataaggggtgaacttgttgatttatgtgtcaacttgactggattaaggaatccctagaaatctggtaaagcattattttagatgtgtctgtgagggtgtttccagaggaggttaatatgtgagtctcagtagactaggtggggaatatctttcctcaatgtttagtgttttgaagatcataaaagcgacttttcaggtgaaaagtacaagaaatctctcctgccaaattattcagttatgtacaaattctgctccttcatgaatagtgccacgcttgccttaaaaaaatgccctttgtcagagaataaaattcgacaagctgaacgaccttgtgaaccaaagacacttgctgatactgaggttcctccagtgttacaaaactcattaaccaaactgttcttggttagggatttgactgtcgaagaagatagactgcttatatttaccactaaatctaacagaaaaactatcgcatgttttcattttggctagtggacggcactttcaaaactatccctactggtttttatcaactatacatgattcatgcccctgttggttctgaagattctagaacttatctagtcatttaaacaattatttgaagatttgctgcactttgcagaagaaaatagctttcgattgaatccccaaaccataacaacagatttggaattaggtgtgatcaaagcttctaaaagtgaatttcaaagtgttaccaataaagtttgttttttttccattcagcccaatgcatttgatagaaaattagatgagtagataggccaggagatacagcaatgacaaaaacttcagtttagaagcaggaacccgcatccaggaatagagccctttgctcctccctcagaatgaatggagatcaaaaatcagatgcttatgcccaagaaaaacaggatttcattcagcacttctcccggattgttagggtgctgactgaggatgagatggggcacccagagacaggagatgctatcgcccagctcaaggaggtcctggagtacaatgccatcggaggcaagttatcaccggggtttgacggtgcttagcattccgggagctggtggagccaaggaaacaggatgctgatagtttccagcgggccctgatggtgggttggtgtgtggaactgctgcaagctttcttcctcgtggtagatgacatcacggattcatccctcacccactggggacagatctgctggtatcagaagctgggcgtgggtttggatgctgtcaatgatgctatgcttctggaagcatgtatctactgcctgctgaagctctgttgttgggagcagccctattacctgaacctgattgagctcttcctgcagagttcctatcagactgagattgggcagaccctggaccccatcacagcacccccagggcaatgtggatcttggcagattcaaggaaaagaattacaaattgtcaagtacaagacagttttctactctttctaccttcctatagctgcagccatgcatatggcaggcattgatggtgagaaggcacacaccaatgccaagaagatcctgctggagatgggagagttctttaagattcaggatgatcactttgacctctttggggactccactgtgactgacaaagttggcactgccatctaggacaacaaatgcagctggctggtggttcagtgtctgcaatgggccactccaaaacagtaccagatcctgaaggagaattaggggcagaaggaggccaagaaggtggtccaggagaaggcactatatgaggagctagatctgctggccgtgttcttgcagtatgaggatgacagttacagccacagccacattatgggtctcattgaacagtatgcaatgcccctgctcccagccatctttctggggctggcgtgcaaaatctacaagcggaaaaagtgacctagagactgcaagggcagggagaggaggctctcaataaattactgtgtaaccttgaaaacaaaacaaaaaacttcagtttaaaaatgcactttccagctgggcgtggtggccaaggagggaggatctcttgaacttagaaatttcataacagcctgggcaatgtagtgagacactgtctctagaaataatttttttaaaagttagccaggtgtggcgtgtgcctgtggtcccagctacttgggaggctgaggcaggaggattgtctgagcccgggaggtggaggctgcagtgagctgtgatgaagccactgtactccagcctgggagacagagagagaccctgtctcttaaagggcaggtgggtggggggtgggggaagagtgtttccttgtgtacagtatgtattaagagatggggaaaaaatgtatcattcgcctgccttggaattccttccagctgatgacattctagaaacttttaatgaattaaagccacatttgcctgaagacgtcagcaaagttactgactgttttgaaaataaatatgtacatggtaggataagaaaatacacaatggtgttgctgtttgatcaccagtactgtttctgtcaaatctgtggcctaatgagtgcatgcagaacagatttctgagtacccaaaacaacacagaagcatgacacagaaaatagggaaatttagtagggaatgctcctgtcagtgtatatggaatcatagaagaatgccaggaagaacagcaccatgtagaaaatgaatgtgaacatattctccaagtagagccatgccctaaaagagaaaaagcagctattcctcatgatgcaagactttaaaatatagttaatgattgtggaggttggccagctcttatggactatctccatgcaattgcccataatccagtcctgtaatacacttttttgtatgtcaaattatcttttttttttctgttttatgtttttttttcactatttaaaattgttggcattcttttttacaatttgctatgctatataattcatcttcaaatcatttctgatactggaggcataatttgtgtagagacttagaaagttctgtttttttgcaaatttgactccatgaaagtacattgtcacagcattgactgtgtgtaagcattgttcctgtacataaaaacattgaagcatcctcagtaagtgaagaggtgtcctttttgtacatctgcatttgtgaaaggtaaaatgtttgaacatcttggctctttaggtggctgcatatgcagtagtgacccatcctgtttttgatagatctcatcaaaagaatcttaggttgttatggtatttcagatgaccaaaggcataaaactgggtgcacacatttaccaaccatggggatatgcatttacatttcccttcttgacctatttcttttttttctttcctttttttttttttttttttttttttttttgagatagagtctcactttgttgcccaggctggaatgcagtggtgtgatcacagctcaatgtagccttggcctcgtaggctcaagtaatcctcccacttcagcctcctgtgatggagtctcactgttttgcccaggatggtcttgaactcatgggctcaagcaatcctcccaccttggctgggattacaggtatgagccattgcgcccagcccctttatgacctatttctttatgaatatggcttgtctgttcattactgatataattatgcaactttcattagtatatatgaatgtttatgcttgcacaaaaatgtatgttattattgcctattttattgcataaagtgacctatgaagtgttctgtgttttcatatgtttctcaaataaattccctttaaaaatgtaaatacatgtaaatgtaaaaaaaaaagtaaataaatatcttttaaagaatttttaaattatattttccggaattacatttttggaattctgctctttcaggattatgattttcaggttttagactttatggattttgaccttttgggacttcagcattatgacattcgggattatggcattaaaaattgtatctcctgggactatgatcggctcccaatgtcaatagtgccacttttgagaaacctgatctaagctcaaacttgttgggacatatctcagccttgaaggaaagttattttggattttgatggatatttaaatatgtatatatctgacttttagtataaattagcagtctatgctgtgccttttcctttgtgagattttcctggcaatgctagtccttttagcttaatgaaataagaccaagttttaaagggttaataataaatgagaggaaatagctcctttatatatgtaggattattacacagctggcagcatagttccatcaagtacaaatgatactatccaaacacaatcagaaactgattaccagatctttaatcctaacagaatcaccttgacatgaatgttgagtataactcctggccagctataaaatttgcaagacctagtgcaaaatggtaatgcgggactcttgttcgaaaagcaggaaacaagtaccctgaaaggtacctacaatgcttttccctttcttccaaggtttctctctctctctttctctgcttattgtgatgttatttgctatttaatattctaagtaaagaaaaattaaaaatttaaatgattagcatgaattttaccatttatgtcgtgcaatgcagattttaaatgcaaatagcagagcattcagctgagatagggaatgaatttcacaattcatattttgtgactcttctctgagggtgcctcaagttgaccagaggagacagacacaccagaccctcaggcatctgggaacccctgactctgacacctgctcagttcccctttcctccagtcaccagacctatgcaatgccaggccaggaggagcagagcctggcatcttccttttgcacaggccaacggccccagcccatggcagtttggccacctccaaggatctttaaacctccaagctgggactttatacttggaccagggtacctcgatggcccttgtcaagacatggccaccagacatgccatggggctgccatgggggagaggggaaatggcttcagaacagctgctgccatgacctgcctggggatgcattggagcctagatactcaatgctgacccttcccttgcctgtgcccaggccccttctggtcatgggaaggggaggttgggtggggcccagtgcactagagggtagggaggggtctgagaatcatcctgggagtctatggggctgatgggaggtgggatcatgcatgaggggaggccctgagccaccacgcaggctcccattgtcccactggactccacttacaaaaggcaaattcaaagacacaagtagtagccaggcgtgg

SEQ ID NO: 97762 - DNA, 41765 bp, Homo sapiens
gggagtttgagaccagcagggccaacatggtgaaaccccgtctctactaaaaatacaaaaattaggtgggtgtggtggcgcacgcctgtaatcccagctacttgggaggctgaggcaggagaatggcttaaacccaggagaaggaggttgcagtgagccaagattgtgccacggcactccagcctgggtgacagagcaagactccatctcaggaaaaaaaaaaaaaaaattaacagggtaattattcatatcacatctcatacctattcatgttactatttgtttacagatgattagttatttgaaagtccagagaatgatgaatattaacatgttagaaaccagtcacttgaagattgtttcaaaatgctgacaccattttgaaattatgcatcttttttggctctgtcgccccaggctggagtgcagtggcacgatcttggttcactgtaacctctgcctcctgggttcaagcagttctcctgactcagcctcccgatagctgggattacaggcatgcgccaccgtacctggctaatttctgtatttctagtagagacggggtttcaccatattggccaggctggtcttgaactcctgacctcagggatccgcccgcctcggcctcccaaagtgctgggattacaggcataagccacctcacctggccaaaattatgcaattttgtcaataggaaacgaatttgaactgacagaatattttttcttcatgcattttaagcatgaagtaaactgacatttcctgtgacattacatgaggtaaacaaagtaacagggtttgcttctactgttactatgcattttaaaatctcccatcaaggctgggcacggtggtgaacgtctgtaatcccagcactttgggaggctgaggcaggtaggttacttaagtccaggagctcgagaccagcctgggcaacatggcaaaacctcatctctacaaaaatacaaaaattagctgcgcatggtggcacacacctataatcccagctactagggagggtgaggcatgagaatcgcttgagctggggaggcagaggttgcggtgagccgagattgcgccactgcactccaacctgggcaacagtgcaagaccctgtctcaaaaaataaaatctcctatctgagagagaagtaaacagaacactcgataaaaactcagaccatcttagttctattcccacttcttcctcttggcgttgttcagatgacttgatctctctaaacttgtttctcagtgaaatgggaaagattaatccctatttcaaaggggaaagaactgtaaagactgaataaagtaatgatcttaaatgcttgacaacacgggcacccaagaaataccaggaagtgttacctctgatcctgtacttagacaaaagtgaaggatgaatttaagcatggagccacataccccttgaacgtcctgtatcagattaaacacttttcctgtcctcactgtgcgagaactagaagtgacaagaaagaccatctgtcaatttttattgaatattcagcatgaatcctcctactcagccaactcagggttaaccctaaagtatctgttcttttttgggggggacggagtctcactctgtcgcccaggctggagtgcagtggcaagatcttggctcactgcaacctccgcctcccagattcaagtgtttctcctgcctcagccgccagagtagctgggattacaggcgcgcgccacaacacctagctaattttttatatttttagtagagatagggtttcaccacattggccaggctggtcctgaactcctgacctcgtgatctgcctgccttggcctcccgaagtgttgggattacaggcgtgagccactgcgcccagccaagtatctgttcctgatgcttttcgggttataggaggccctagaaaattggatgaggctgggcgtggtggcttatgtctttaatcccagcactttgggaggccgaggcaggtggatcacttaaggtcagcagttcaagaccaacctggccaacttggtgaaaccccgtctctactgaaaatacgaaaattagagccaggtgcggtggctcacacctgtaatcccagcgctttgggaggtcaaggtgggtggatcagctgaggtcaggagttcgagatcagcctggccaacatcgtgaaatctcgtctctactaaaaatacaaaaaagttaggcacggtggctcacacctgtaatcccagcactttgggaggccaaagcgggtggatcacctgaggttgggacttcgagaccagcctgagcaacacggagaaaccctgtctctactaaatatacaaaattagcctgtaatatacaaaattagcgtgtggtggcgcatgcctgtaatcccagctactcaggaggctgaggcaggagaatcgcttgaacccgggaggcggaggttatggtgagctgagattgcaccattgcactccagcccgggcaacaagagtgaaactccatctcaaaaaaaaaaacaaaaacaaaacaaaacaggctaggtgtggtggctcacgcctgttaatcccagcactttaggaggccgaggcgggtggatcacgaagtcaggagatcgagaccatcctggctaacacggtgaaaccccgtctctactaaaaacacaaaaaaattagccgggcgtggttgcggcacctgtagtcccagctactcgggaggctgaggcaggagaatggtgtgaacccagaaggcagagcttgcagtgagccgagatggcgccattgcactccagcctgggcaacagagcgagactccgtctcaaaaaaaaaaaaaaaaaaaaaaaattagctgggcagggtggcgggcgcctgttatcccagatactcaggaggctgagggctgaggcactagaatcgcttgaaccttggaggcggaggttgcagtgagttgagctcttgccacactgcactccagcctgggcgacagagcaagcctccgtcaaaaaataaaatttgtatgaaactcctctcccagaaacagacataagtacacacaaaatgtagaaatgatttctgaaaatttcttttttctttttctttttcttttttttttttttgagacagaatctcgctccgtcgcccaggctggagtgcagtggcgcgatctcagctcactgcaagctccacctcccgggttcacgccattctcctgcctcagcctcccgagtagctgggactacaagcgcccgccaccacaccgactaattttttgtatttttggtagagacgaggtttcaccgtgttagccaggatggtctcgatctcctgacctcgtgatccgcccgcctccacctcccaaagtgctgggattacaggcgtgagcccccgcgcccggccaagaatttctaaaggctccttcacagaccccagctgaggaaaattatgaagtcctgcaacaaggtattcggggctccttaagggagtgtgtggtgactggaaggatggtatagtttacagcagaggtgctcaatcttgaatatgcatcagaatcaccggggttgcgggggggggggtcttgataaaccaccgtttgctgggtcccactgccaagtccccgactcagtaggtccagggaactgcatttctaaccaattataataaattccaggtgatcttgatgctgctggtccagggaccattctttgagagcctgtgtggggaaatgagagaactggatataacccacattttcagaactcgagacaaatcctattagtaaatttcactggaaaatgtttctcccacttactaggtatgtgttgttaggcaagtgtgtctttaactttcctaagtatgctttcgtatctataaaataagggtattggccgggcgcggtggcacacgcctgtaagcccagcacgttgggaggccgaggcaagtgaatcacgaggtcaggagttcgagaccaacctgggcaacatggtggaaccctgtctctactaaaaacacaaaaaattagctgcacgtggtggcaggcgcccataatcccaactactctggaggctgaggcaggagaattgcttgaacttgggaggcggaggttgcagtgagccgagaccgtgacattgtactccagcctgggcgacgagaacaagactccatctcaaaaaaataaaataagggtatggctgggcatgggtggctcatgcctgtaatcccaacactttgggaggctgaggcaggaggatcactggagcctaggagttcaagaccagcctgggcaaaacagtgagaccccatctctttttttttttttttcctttgagacagagtctccctttgtcacccaggctggagtgcgatctcagctcactgcaacctccacctcctgaattcaagcgatttttctgcctcagcctcccaagtagctgggattacaggcacctgccaccaagcctggctaatttttgtatttttagtagagacgaggtttcatcatgttggccaggctggtctggaactcttgacctcaagtgagtgatctgcccacctctacctctcaaagtgttgggattacaggcgtgagccactgcacccagccagtgagaccccatctgtacaaaaaataataataaataaaataaaataaggttaaggaatcattatgaatcttcctgtaaacatcaaatgaggccatacaccctaagaatacagctcacaggtccctactgaatgtgacagtttagtccagatgggagttccctgagggcaggaacggagtttcagcaactggtccccatggcaggttggagtatgcactaacctaacatttactgaaatttcaaaatgtgctgggtaaggctgggcgcggtggctcacgcctgcaatcccagcactttgggaggcgggggttgcagtgagcagagatcgcgccactgcactccaccctgggaaacagagcaaaaactccggctccaaaaagaaaaagaagtgggagggctaggcccggcgtggtggctcacgcctgtaatcccagcactttgggaggccgaggcaggcgggtcacgaggtcaggagatcgggaccatcctggctaatacggtgaaacccccgtctttactaaaaatacaaaaaaaaattagccgggcgtggtggcaggcgcctgtagtcccagctactcaggaggctgaggcaggagaatggcgtgaatccgggaggcggagcttgcagtgagccgagatcgcgccactgcactgcagcctgggcgacagagcgagactccgtctcaaaaaaaaaaaaaaaaagaggtaggagagcttaatatcgggctgggaggatggggtggagtagggtgagcgaggcgtcaagttcgattcctaaaaagagtaaaaggggagcctcagtgaggttggggagcaggcctcggctccaagatgaaccagcaccctcccgacccccggcagcaccccagccccaggagtcctggcagccccaccgacagagctgagctgtgaccagcggtcggagccacatggtcacagccgccaccagcatcaacatcagcatcgacttgggcttccgccgccaccactgcccctcaaccgccacggggagtcgctgcacaatccgagtacgtgcaggctgaagccctgcgcatgcgcatcaatgagtcccgggagcgggcctccgcgcactgcagcccggcgctccgcctgaatcttgagcatgcgcagacgaatcccgggaagcccgaatccgcgcaccccaaagtgcgctcagagcctgagtatgcgcacccggccacccgtggccagtctagagtctgagcatgcgcatgttgtccgcgcgcctaagcatgtgcacaggctgctcatgagttcctaaacgttgcgtttgcaacactaccagtgttttgtacgggcgctggcgcctgctcacagccttccacgtgaccggaaaaggccttcagcgcataaagtgggagaccggaagaggcggagacgatccgatgctcgaactccgccccctcttctccgcgtaggcccagctccctgaagcggctgtttcgagccacgcgcccatcgggtaccgaggcacgcgccgggmgtcacgtgcgtttcgcggcgagcggaaatgacgcgagttgtgtgagccgccagtatggccgggctatggcggcgagcactggctacgtgcgactgtggggagcggcgcggtgctgggtgctgcggcggccgatgmtggccgccgccggggggcgggttcccactgcagcaggagcgtggttgctccgaggccagcggacctgcgacgcctctcctccttgggcactgtggggccgaggcccggcaattgggggccaatggcgggggttttgggaagcgagcagccgcggcggaggcgcattctcggggggcgaggacgcctccgakggcggcgcggaggaaggagccggcggygcggggggcagcgcgggcgccggggaaggcccggtcataacggcgctcacgcccatgacgatccccgatgtgtttccgcacctgccgctcatcgccatcacccgcaacccggtgttcccgcgctttatcaagattatcgaggtaatgggagtccccgcctcggcctcaggtttcccacctgtgcaagcagcgggctgaaccgtgggatcacttgagcgcccttgtgtttcgcaactttttcagacatgaagtttctcgaagggtgcagttcgaatccttgtctgctcaccactagcttgggaaccttgagccaaagtcctctccctttcggatttcttaggatccgttagatgagaggagttgaacccgatgagcctaggattatccactttagaacgccggtcatagaaatccggggccgggagggacctgagtagtgttacggcgctgttagttttctccttacttggcacgagttttgtaatacctcctcgccccaggcgctctgccgtctggttacgagcctcactgggatcagaattcattcctttcttagacaaatacttcttgattgcttattatttgccagagagtgttctaggttctggggatatggcagtgaacaaaacagacaaaaatttctgcctttgaagctgggcatggtggcgcgcgctgtactcccagctactctggcggctgaggtggaaggattgttggaaacctggagtccagcctggtcaacatggcgagaccctgtctcttaaaaaataaatctgccttggagcttacattttggcaggatgagacaggcaataaagatgtttagtaacgatattgtattagaaggcaataattacgagaaatagtagagcatggatgggacaggaggcttaggagggtgggaagaggtgggttattcagtgtgttcttgacctcctaccacgtagcaagttctgagaatactgtagagaacaagtcattccggtggtagaaattagatcatttcagactaagagccttgggggtggggagggagcaggatgatgtaatagagagaaagcagtgagtgtaaggaacttgagcttttacagtaggaaggccccaaaagccttctcccccagctccccttcccttaaaaaaaaaaactactgatgtggaaagtggcatctatgggaaggttatctcctaactggcagagcaaggtcacgcagtgagtcagcctctgcgctcactctccagactcttctaaacaaatctcaaggatctgttgggaagggaaaggccatttcagaggggcagcagccagtagagaggggacagagggagcttctccaacgctgctccaagatttttttttttttttttttgagaccaagttgcactctgtcatctaggctaaagtgcagtggcgcgatttcagctcactgcaacctctgcctcccgggttcaagtgattctcctgcctcagccccctgagtagctgggattacaggcgcccgccaccgtggctggctaatttttctatttttagaagagacagggtttcaccatgttgcccacgctcgtctcgaactcctgacctcaagtgattcacccgcctcagcctcccaaagtgctgggattgcaggtgcgagtcactgcgcccggccccaaggcctttccttgatgttgagtactggttactgatgcaggcccccagagcaagaccttgtggggtcctatcctagctccataaccttcagcaagttattcctttggcttccctcttctcatctgtgacctggacataytagtgtcttattagagttgttgtgggatttaaatgaggccatgtgggctgggcacggtgtctcacatgtttaatcccagcactttgggaggctgaggcaggagcataatttgaaaccagtatggtcaacatagaccctgtctctacaaaaaaaaaaaaaaaaagaaagaaagaaaagccgggcacagtggcatgcacctgtcttcccagctacttggaaggctgaggcaggaggatcacttgaaactgggagatcaaggctgcagtgagccatggtgtcaccactgcactgcagcctgggcaacagaatgaggccctgcctcagcaataacgtgatgctgtttcctctttggtgtacttctgacatttcaggactctgccccggaggcctttttcccatccttgacttcacccctggcagttctctttaccctcccaggtttctgggcccaggatggtgttcatcaggcctggtcccctccgttctgcagagcgacagatgccccttgctcccggtgcctgagcagagagatgattcttctaagagagttcagacggcccacgtggagctagccaggagagttaaatgagtggctgcagatagtatttgggagactggcaggtggttctcattgtatttctggttgatgatgcattgtaaatcataaaaatggatcctgccaaggccaggaggcagatgccaaggatgcagctatcagctgttggcagaggggaaattgggaggcaacttctttgggacccaataaatgtttctgaaattgttagcaaagcttgatttactcttcagtttgtacttgacttgtctggccaacttgctctagaagcttctctcctattagcaacttttgagtaaggaacaatggctcttaatttttggtgggtattaaagaataaatcataagtgttagaagtattagtttcttttaaaaactaacttcgtgggctgggcgcggtggctcacgcctgcaatcccagcactttgggaggctgaggtgggcggatcacgaggtcaggagatcgagaccatactggctaacaaggtgaaaccccgtctctactaaaaatacaaaaaaattagcctggagtggtggtgggcgcccgtagtcccagctactcgggaggctgaggcaggagaatggtgtgaacccaggaggcggagcttgcagtgagctgagatcgctccactgcgctctagcctgggcgacagagcaagactctgtcttaaaaaaaaattgcttccctcctttgttcaggtgtgctctgctctcgccattgttccatctgcgaggagcaccctttcttcagaaagtaaaattgtcttgctaagaaaactttttgtccaaatgctaatttttccttacagtacagaggtacaagcgttctgtctctaaacaaacattttacttataacagtgggtcacacaccctcctgtcagatgttactgacttttttttttctgggaacagaaaaaaaaaaattatgtatctatagtgtcaggaatttctggaccacaagttaagagcctgtgttagggagtgagtcaaaacactggctctcaaaggatggttgtggaccagcagcatcggcatcatgtgatgctcttttgtttgaaatgcagatttttggacccaccctagaactgaatcaaaaactccaagggtggggcccagcagtgagctgcttaaagtccttcaggtcatcctggtgcctgcaaaagtttgagggccattactatatatatatatatatatatatatatatatatatatatatratattttaactttattatataataaagaattaaaaacttcaaaaagaaaatagagatggggtctcactgtgttacccaggctggtctcaaactcctgggctcaagcgatcctcccacctcagccccgcaaagtgctgggattacaggcatgagctaccattaccaggctagccaggccattacctttaatcagggtctgtccagtgaattaacaaaggcttgaaagaaatcaggtgagctccttgcgccttcaaatgcttcttagaagacatcattagccctgaacctgccgttgagaatgtgctgtgatcctgggggtcttgatcattaatgaacagcatatgatgtgataaggaagtaactgtcaatgaaaattggaggaaccaggcatggtggctcatggcgaaactccgtctctactaataatacaaaaattagcgagtgcagtggcgtgtgcttgtaaccccagctatgtggtaggatgagttggaagaatcgcttgaacctgggaggtggaggttgcagtgagccgagattgcaccagtgcactccagcctgggtggcagagtgaaactttcttttttttttttttttttttttttttttttttttttatgagacagagtctcactctgtcgcccaggctggagtgcagtggcgtgatcttggctcactgcatgctccgcctcccgggttcacgccattctcctgcctcagcctcccgagtagctgggactacaggtgcccgccaccacgcccggctaatttttgtatttttagtagagacggggtttcaccgtgttagccaggatggtctcgatctcctgaccttgtgatctgcccgcctcggcctcccaaagtgctgggattacaggcgtgagccaccgcgcccagcctgaaactttattaaaaaaaaaaaaaaaaggaagttatcaatctctggagtgggtcacatttaaattacttatgtttattctgacattaataaaagcagaatggttttgattttcaaaccaagacagtttgccctggacatcccctttgaagctggatgttaaatcaatttctgggttctgaccattcgtctactttgaatttcctttgggagtggggaaaccgctaagaagaatccagctggtcagttctgctcactgtattcaccaccacagcctcctggcctccagcacttttttttttttttttttttttttgtttaggcgttcccaaaccatgttgattagtatccaggatgcggatcagcatgtccccagagaataatctacacagcgttagagcggctctgctgtcaaaaaatgtcagctacaaaagctaccctgggaggccgggcgtggtagtttacgcctataatcccagcactttgggaggctgaggtgggtggatcacgaggtcaggagttaaagaccatcctggccaagatggtgaaaccccatctctactaaaaatacaaaacaatcagccggacctggtggcgggcgcctgtaatcccagctactcaggaggctgaggcagagaattgcttgatcccgggaggcggaggttgcagtgagctgagatcatgccactgcactccagcctgggtgacagagcgagactccgtctcagaaaaaaaaaaaaaaaagaaaagctaccctgtgctgcgtttggtggctcacgcctataatcccggcattttgggaggctgaggtgggtggatcacctgaggtcaggagttcgagaccaacctggccaatatggtgaaaccccatctctactaaaaataaaaaaattagccaggtgtggtggtgcatgcctgtaatcccagctactcaggaggctgaggcaggagaatcccttgaactcagtgggggtggaggttgcagtgagctgagatcacgccattacattccagccagggcaacagaatgagactctgtctcaaaaaaaaaatctactctgcatttcactttggggtcattgtcatgctaggttaaaaataagaagttggttgagctgctgagaaggaaagttcgtctcgcccagccttatgtcggcgtctttctaaagagagatgacaggtaagtgtgatttttccttcattcccttgttgacggtgccctagagtccagctcaccacaagtcctactctgtactttgcacctttgacccctgaccccgaggaaaccagggaagacctccagaataaaggccagaagccacgcaggctaccttttcagcctgggctgagaactcagcttgtagtactaaacttcatgcattgttaagatacgggggaaattaacttcagggactcttagtgatgaaatgctccatgaggctacctgaaagtcgagctagctgctcggagatgtggctccatgtagaaatgagttccatgggccgggcgtggggtcgcacacctgtaatcccagcactttgggaggctgaggcatgtggatcacctgaggtcaggagttccaaagcagtctggctgacatgatgaaacctcgtctttactaaaaatacaaaacattagccaggcgtggtggcaggtacctgtaatcccagctactcaggaggctgaggaaggagaatcggttgaacctagtaagtggaggttgcagtgagctgagattacaccattgctctccagcctgggcaacaagagcgaaactccatctcaagaaaaaaagagttccatgcatgcattcgaagcaggctctgtgatagcatagaagagactcatcaaagtcccacctggaccatgtctttgtggctgacttagcgaggagccacccacccggtcctgtgaccactggggcagccctggcctggcagaagctcccctaggctctggagctcctgcgggagccaaggaggccgctcttggttttcagtagcatttggtaggggcgtttcttttctctccctcctccatctcagccagagacatcctgcctagcatgaaagccatgttccaacattcctctgtgctcttctcccacagcaatgagtcggatgtggtcgagagcctggatgaaatctaccacacggggacgtttgcccagatccatgagatgcaggaccttggggacaagctgcgcatgatcgtcatgggacacagaaggtgggtggctggcgggggacagtgggaggtgggggcagagtaccacgcgggagaccagccaggatgccttatgccccagcatcagcctctgccctgtccgtcagcccagcggctttctcactagcactgaggccagagctgggggtgagagtgagacatgtcacctctggacccctcctgtctcagaaaggggtgagctgcagggccaggcatggtgactcctgcctggaattccagcactttgggatgtcaaggcaattggatcgcttgagcccggagtttgagtccagcctgggcaacgtagcgagatcccatctctgcaaaaaatgtagaaawattagctggatgtggtggctcatgcctgtggtcacagctacgcaagaggctgaggtgggaggatcgcttaagcccaggagtttgagaccagcctgggcaacacagcaagaccctgtttctataaaaaataataaaaagttagatgtgacggcgtgttcctgtagtcccagctacttgggaggctgaggcaggaggattgcttgagcccaggaggtaaaggctgcagtgagctatgatcacaccactgcactccagcctgggcaacagagcgagaccstgagttcaggtggtgccaggtgctctgaggggagacgcagacagcgtgagaggtggaggtgggtagcttttgtgaagtgcttggggacagtctttgcgatggtgtccttgaaatcgagacctgaacaacaggaaggagctgctatgagctgagtccagggcacagagtcttggagaccagcctgtgcccggccaggctgacaccgttttcgacaggaggccctggggcttgtcactgcagcttatccacgatacttaggatggggacagtgatgcattggcgtgggatgcagggaatgcctgaatctggctggagtctaaggggtggaggggacactggttgggaggccccgagaaagcggctcacgtctccagcttgaggaccctgtagccaccctgtggctccagaggtctgggctcagcgrgacccttggaccacctgtgccaccagggaggcctcagccgggtccagctcccagcctcagcggctgattcacacctgccttgctcccgtgtcagagtccatatcagcagacagctggaggtggagcccgaggagccggaggcggagaacaagcacaagccccgcaggaagtcaaagcrgggcaagaaggaggcggaggacgagctgagcgccaggcacccggcggagctggcgatggagcccacccctgagctcccggctgaggtgctcatggtggaggtagagaacgttgtccacgaggacttccaggtcacggaggaggtgaaagtgagtycgtgcgtcacgcagggcggccacagctgcctcccccacgggctcccytgagccgttcctgcggcctctccgaagagtcatctcccaccctgagccccttaggaagggtctggcctgtctggaactcaattctaatggaacatagagggtgcttttcctcccagaggtcttcggaagactctgggatgggagaggcacaggaaattcgctggagcctgtagctgctcaggaaggagacagggttggaacccaggtccagccccagcccgtgtcccctgtgccaaagcctccagcggttaccaagacaccttccagccctggcttcttcccaccaagcctgggaggttggtaccagtggttgcaggacaggaaacagcctgttggccaccctgatcccccaacctaggccgtcctgcctgcctggtggcacaaggagtcagcttccgaggtgggcaggctcttggcggtgccacctgccctcccgctgtagggacagtcagcgaagctaaccaaaggcctgaagcgtgtcagctccttacctgtgtgcctggtgtcatcrgcctcttccccaggctgctgcagggcctagggggaagtgctgtgagcaactggtgatgtctgctgtgggcgctggcaggggtggaaagtcctgtccacaggcccacctgggttcttgaggtcagcacttctatcctgccccactacccctgcgaggtttttttttttctttctttttttgagacagagtctggctctgtcaacccaggctggagtgcaatggaacgatctcagctcactgcaatttccacctcccaggttcaagtgattctcatgcctcagcctcccaagtaactgggattgcaggcacgtgccaccacacacggctaatttttgtatttttagtagagacgaggttttaccatgttggccgggctagtctcaaactcctgacctcgggtgatccgcccacctcagcctcccaaaatgctgggattatagtcgtgagccactgtgcccggccacctgtgagtattgagcacttgaagtagagctgctgtggccaaggaacagaatggaacattttattggctgggtacagtgtctcatgcctgtcatcccaacacttttggaggccaaggaaggaggatcacttgagccctggagttcaaaaccagcctgggcaatattgagacccctgtctccacaaaaaaaataaaatccctgggcatggtcgcacacaccagtggtctaacctgtgggaggatcgcttgagcccaggagattgaggctgcagtgagctgtgatcgcatcactgcactccagcctgggcaacagagtgagaccctgtatctaaaaattaaaataaaaaaattcaggccgggcacggtgggctcacgcctgtaatcccagcactttgggaggccgaggtgggcggatcacctgaggtcaggagtttgagaccagcctgaccaacatggagaaaccccgtgtctactaaaaatacaaaaaaaaattagccaggtgtggtggcttatgcctgtaatcccagctactcgggattactgaggcgggagaattgcttgaacctgggaggcagaggttgcggtgagccgagattgcactattgcattccagcctgggcaacaagagcaaaactctgtctcaaaaaaaaaaaaaaaaaattcagacagccaccagcggctacactgtcctgggcagctcagcattggggcattccctgtgagaatcttgcaacagggggaagacagcgaccaaacttacaaatgtgattagaactggcaagaccccttaggggcagcgaacttgttcttttttttttttttttttttttttttgagatggagcctctgtcgcccaggctggagtgcagtggcgtgatctcggctcaccgcaagctccacctcccgggttcacaccattctcctgcctcagcctccccagtagctgggactacaggtgcccgccaccacacccggctaattttttgtgtattttttagtagagacggggtttcaccgtgttagccaggatggtctggatctcctgacctcgtgatccgcccgccttagcatcccaaagtgctggggttacaggcgtgagccactgtgcccagctgaacttattcttaaagcaagtgccccggacctccagtgggcctgttctggtgccttctaccagggtcagctcagacagttcagcgtcaaagccaaagactagagaccaggtgattacggtttctttggagacagagtctcaccctgtcactcagactggagtgcactggcgcaatcttggctcatggcaacctccgcctcctgggttcaagtgattctcctgcctcrgcctccttagtagctgggattacagtcacccaccaaagtacctggctaattttttttttttttttggtatttttagtggagatggggtttcaccgtgttggccaggctggtcttgagctcctggcctcaagtgacccacctaactctgcctcccaaagtgttggtgttacaggtgtgagccaccgcgcccggccaagaccaggtgattaaaatttggttgtaggcaggtgcagttgcttatgcccgtggtcccagctactccggaaaatgagcggggaggatcgcttgagcccaagaattcaaggctgcagtgagtcatgattgcagccctgcacgccagcctgggtgacagagcaagacttggtcttttttttttttttttttttttgagacagagtctcgctctttcgcccaggttggagtgcagtggcgcgatctcggctcactgcaagctccatctcctgggttcacgccattctcctgcctcagcctcccgagtagctgggactacaggcgcccgccatcacgcccgcctaatttttgtattttttggtagagacggggtttcactgtgttagccaggagggtctcgatctcctgacctcatgatccacccgcctcggcctcccaaagtgcttggattacaggcgtgagccaccacgcccggccaagacttggtctcttaaaaaatrgaggaaagaaaacacagtctctttttttcccctgagatagcttatcctaaggacaaggctctgaggggtaaggagacagggtttggttttagttttgactctcttggtcctgtgtccctgggactggtgagtccaccagggactgcactcctccatctcccaggccgtccgtggccagggccagttggcggaggggagggagttgatggagctggtgggtggggctcccagggccatgctcccacccagcccaccccctgctggagcactgctgggccccagcgaccctgccccatacttggcaggccctgactgcagagatcgtgaagaccatccgggacatcattgccttgaaccctctctacaggtgggcctctgtgcgggcagctggccaggcgggggcatctctgcagctctttctgcagctgggtgggtagggggcttcctcagcgtcctcctgggaggaaaccttgcctgccccaaggagtggcctgtgtggaggagcccgttgcccactggggcatggggcaggtgggaggcccggggccgactcagcaggcccagtttctttgtccccttctgctgaggccggaagctgttggtggcattggctgggggagtggggagcagactgctgaggtgaggtcactgcacggctcccgtggtggctgcacgtgaggatgctgcatgcctttccagcccaggacgggtgggccctgaactctggagaacaagcagcagagctggctcccagcgagcacccctagaccgtgcccatagctacaggggacagggaccctgaggaccgggtccccgtttgggggctgcactgcagcagagcgtgaggccctggccaccgaggcagctccctttgtcccccagggagtcagtgctgcagatgatgcaggctggccagcgggtggtggacaaccccatctacctgagcgacatgggcgccgcgctcaccggggccgagtcccatgagctgcaggacgtcctggaagagaccaatgtgagtgctcgtcacctccacagccccccacgcctggctgcaccccacctccamtatgctccgcccacgcccggctgccyccgttcctcctcagctcccccatgcctggctgcccttgtccctccaccgtgcaccatccacacccagctgtgtgtccctggctctgtttttgagatgatttcccgctgcgtgtcttggtccacatccatccgcctttcggtggcttcatagccttcggttgggagtcaccgttgcgggttcagtgggatcctctgggccrtgtacccggggcgttgccagtcttttgctgttgtgagcagcactcctgagcgcgtccccatgcacgcagctggagggcctgtgaagtatccgtaggatgcgtttccagcacgggatttgttggggcagagggcacacatgcctctgtgctgggtacagcayggccaggtcctcccggcagcatctctcagggtgcrcattttcccccaacctcggccctacacrcacagatgccgacttctgctcatcctttctgtcctccctgtctcggcagattcctaagcggctgtacaaggccctctccctgctgaagaaggaatttgaactgagcaagctgcagcagcgcctggggcgggaggtgagcccgcggctgaggcgcagccactcttgggggccttcccctcgggccacgtgacatcagtcaggctctggagcacacggagggaccggtggcatcggccagggcaagccaagaaggcctgtctgggttttgagggcttcgtgccatcatctgctctgtcgtcctgggctgtggaactctccgcgttgaacagggaagcttaaagctggtcccagtgtaatgagcccagggtggagcagtctcaggaccgtccaacattaagggaagaattcctttgcctttgtaatcttggggacagtgttggaaattggaaagcagcctgggaaaagtgaagatgctgtttcttaagacccagccattgaggctcgctgtcatgattttcggcagatcacagcctgcctgatggccggtcacctcacggtcgtagcatttttcagaattttttactttaagacagggtctcagtcggccacctaggctggagtgcaatggcgcaatctcagctcactacagcctccacctccagggctcaagtgatcctcccacctcagcctcccgagtagctgggattacaggcgtgcaataccacaccggctaatttttgtattttagtagagacagggtttcaccatgttggccaggctggtcttgaactcctggcctcaagtgatccgcccgcttcagcctcccaaagtgctaggattacaggcgtgagccaccgcgcctggccccatctctacaaaaaattttaaaattagagccaggtgtggcaggtgcctgtggtcccagttactcaggaggctaaggcaggaggatcgcttgagcccaggaggtggaggctacggtgagctatgatggtgcctttgcactccagcctgggtaacacaggtagaccctgtctcaaaaacaaaagaagatggaaggaaccaaaggcttcgtgctctgggtttcgtttcttttctctctgagtcctgggggagcagagggtcccccttcgtctggggacgcacccacccacccagcttcccggagccagggcctgatggcagcacctcaccccacaggtggaggagaagatcaagcagacccaccgtaagtacctgctgcaggagcagctaaagatcatcaagaaggagctgggcctggagaaggacgacaaggatgccatcgaggagaagttccgggagcgcctgaaggagctcgtggtccccaagcacgtcatggatgttgtggacgaggagctgagcaagctgggcctgctggacaaccactcctcggagttcaagtgagtgccaggcccggggcggcccagccctcaggtgacccctcctcagcccccatcttaggcaggccaggggacccagcggggagccccgtggcaccttcttggtgtggcaggtgcgggctgggaggcatccagygagtatcagccctgttctgggcaggacacrtcatcaccatctccattctacaaggaaatcgaggctcggggctgttgagctggtggccagggcctgtgaattggcaggtggtgccacggatttgagcccagggacgcctggctctaagccagggctgctttttttttttttttttttgaaatggagtctcgctcagttgtccagactggagtgcagtggcacaatcttggctcactgcaacttccgctttgcgggttcaagcaattctcctgcttcagtcccccaagtatctgggactataggcatgcaccaccacgcctggttaattttttgtatttttaggagacatggggtttcaccatgttgttcaggctggtctcgaactcctgacctcaaatgatccggctgccttgacctgccaaagtgctaggattacaggcgcgagccaccatgcctggcttttttttttttttaagacagagtcttgctctgttgtccaggctggagtacagtggtgcaatgttggttcactgcaacctccacctcccaggttgaaacgattctactgcctcaacttcctgagtagctgggattacaggcatgtgccaccacacccagctaatttttagtatttttagtagagatggggttttgccatgttggccaggttggtctcaaactcctgacctcaagggatccgcccaccttgccctcccaaagtgctgggattacaggcatgagccaccacgcctggcctaagccaggccttctcgccaggaccaggagtccccatggctgtctttgcaaggctacccctggcttctgttgccccttcgagagtcagccaggaagtgaccatgccttcccgcagcactggmcttgcccgggggccactgtcctgagcatgccatgagtcagggtggccgccccaggtttgagggcctcaggtacctckgagatcctttcagccatgcccatgtccagccaggacagaacccacctggccacttcccatgcagcatgctctgttttcagcccaggaaccagttgtcacgccagggcagcttctaggcagaagtccccrgggcagggctgggcaggccgtaggacagcgcttagagggaaggcatgagtttctttcctggctgctggcccaggaccccgcctcagatttgaatgtcacggtcgccggagtctctcccccagggccctgagaggcactggttgcgcgcgaaggctgtggcttcccctcccagcacgccccgatttcggtgagtggcctgtgagctcccrtggctgctccgacggtgccacaacttagtgccttacacaatgccgagccctgagatcccgctgtgggccgggcccgtccctcccagaggctccagaggagaatccgtttcctgcctttcccagtatctggaggcgcccgcatccctcggctcggggccccttcctccttcacagccacagcgcagcctcttccagtcagtctctcacctcccaccgcctgtcgtgaggacctggtgaggaacctgggccccctgggtcacccagaatgctctcctgtctcggggaccttcactcagccccatctgcagttccctgctgccatgtgagaggcctgtgccgccgcctcctgtggggggagaacgtagatgttttcggggttcttctgtctcccagcgagtgcctcagctgcccttgggctggtggaagtacctgctcagaccgggccttgtcctgcagaagcagatagctccttcccccaggagctgagggggtctgtaaggcgggttctgtcctcaggtcctgggaagtcacgggggacaagccctcagtacctgcgtgtcaccaagatgcctgcagcaggctgccagctacctctcccacccagaatgctctccgcaaagtgtcactgcctgtgtcacttccacagtgacttcatgtgtctctaaactccagcatccgtgtggcccagctggcctgtcccggtgcgtctcgtatgcccgttgggtggcagtgcgccctgacggtgtctgctcgtggggccgcctggcccttcctcggaagccgtcctcctcttcatcctcttccccaatcctgccgtgtgctcttgcagccctcactgacttgctcctggcccatagtggccgctgctcactgctgcacggctcccaacttggggaccaatatggagttgccctcccaaccttcagcgtcactctcccggcaggggacctggcctccatttccccacctgccctgggtcaggccttgtcccattttctaagcctcgtcccctctgtggttctgctcactcagccctgggcagaagccagtgccgtcttggctctcctgatgagtcagcagtggacctccggccatctcctccttcctgcactgggtgctttggacagggcagtttgtaaatttttttttttttttttttttgagatggagtctcactctgttgcccaggctggagtgcagtggcacgatctcggctcactgcaagctccgcctctcgggttcatgccattctcctgcctcagcctcccgagtagctggaactacaggtgtccgctgccacgcccagctaatttttttttttttttttattgatcattcttgggtgtttctcgcagagggggatttggcagggtcayaggacaatagtggagggagggtcagcagataaacaagtgaacaagggtctctggttttcctaggcagaggaccctgcggccttccgcagtgtttgtgtccctgggtacttgagattagggagtggtgatgactcttaaccagcatgctgccttcaagcatctgtttaacaaagcacatcttgcaccgcccttaatccatttaaccctgagtggacacagcacatgtttcagagagcacagggttgggggtaaggtcaccgatcaacaggatcccaaggcagaagaatttttcttagtacagaacaaaatgaaaagtctctcatgtctacttctttctacacagacacggcaaccatccgatttctcaatcctttcccccttttctattccacaaaactgccattgtcatcatggcccgttctcaatgagctgttgggtacacctcccagatggggcggctggccgggcggggggctgacccccactcctccctcccagagggggcggctggccaggcagaggggctcctcacttcccagtaggggcggccgggcagaggcgcccctcacctcccggacggggcggctggccgggcggggggctgacccccccacctccctcccggacggggcggctggctgggcggggggctgacgcctccacctccctcccggatggggcagctggcctggtggggggctgaccccccccccaacctccctcccagacggggcggctagccgggcggggggctgacccccactcctccctcccggagggggcggctggccgggcagaggggctcctcacttcccagtaggggcggccgggcagaggcgcccctcacctcccggacggggcggctggccgggtggggggctgacccccccacctccctcccggacggggtggctgctgggcggagacgctcctcacttctcagacgggtcggttgccaggcagagggtctcctcacttctcagggctgccgggcagagacgctcttcccctcccagacggggtcgcggccgggcagaggcgctcctcatatcccagacrgggcggcggggcagaggcgctccccacatctcagatgatgggcggccgggcagagacgctcctcaccttccagactgggcagccaggcagaggggctcctcacatcccagacgatgggcggccaggcagagacgctcctcacttcccagacagggtggcggccgggcagaggctgcaatctcggcactttgggaggctaaggcaggcggctgggaggtggaggttgtagcgagccgagatcacgccactgcactccagcctgggcaccattgagcactgagtgaacgagactccgtctgcaatcccggcacctcgggaggccgaggccggcggaccactcgcggttaggacctggagaccagcccggccaacacagtgaaaccccgtctccaccaaaaaaataggaaaaccagtcaggcgtggcggcgcgcgcctgcaatcgcaggcactcggcaggctcaggcaggagaaccaggcagggaggttgcagtgagccaagatggcagcacacagtccagcctcggctcggcatcagagggagaccatggaaagagggaaaggggagaccgtggaaaggggagaggcagagggcagaggcagaggcagaagcattttttgtatttttagtagagacagggtttcaccgtgctagccaggatggtctcgatctcctgaccttgtgatccgcctgcctcggcctcccaaaattctgggattacaggcgtgagccactgtgcctggcctgtaaattgttttatagagatggggtcttgctgagttgctcaggctggtcttgaactcctgggctcaagtgatcctcccacctgggcctcccaaagagctgggattacaggcgtgagccaccgcrctcagccccacacatgggtttcaagccccttgcaaccacccagccaagtccagcagagagacaggcagctcgtgagctccactcagcatctctccatctgtcccctggcagtgtcacccgcaactacctagactggctcacgtccatcccttggggcaagtacagcaacgagaacctggacctggcgcgggcacaggcagtgctggaggaagaccactacggcatggaggacgtcaagaaacgcatcctggtgagcccagtgtctggcctgttgtggatttgcatgtgggtgccygggcccaggactcttgtgtgctgtgggttgagatttcaaaggagccccctggtgaattcrtaggcctgggggtgctggtcggggggatcccggcggaggtagcatcctgccctgcccccgagggctcgaggatttcccaggtggactgaagtcatgcctgacgggccgggcatggtggggctgcttgtagtcccagttactcaggaggctgaggcgggaggatcacttgagcccaggaagttgaggctgtggtgagctgtgatcatgccactgcacatcaggttgggtgacagagtgagacccccatctctacaaaaaattttaaaattgcggctgggcgctgtggctcatgcctgtaatcccagcactttgggaggctgaggcatgcagatcacctgaggtcgggagttgaagaccagcctgaccaacatggagaaaccccatctatactaaaaatacaaaattagttaggcgtggtggcgcatgcctgtaatcccagctacttgggaggctgaggcaggagaatcgcttgaacccaggagccagaggttgcagtgagcccagatcgtgccattgcactccagcctgggcaacaagagtgaaactccgtctcaaaaaggaaaaaaaattttttttaattagcctggtgtgatgttgcgtgtctgcagtcccagctacttgggaggctgaggtgggaggactgcttgagcccgggaggtggaggctgcagtgagctgtgatgcaccactacactccagcctgggtgacagagcgagaccttgtctgaaaattaattaattttaaattaatttttaaaatatcactcctgagacattggaaaccaggcaggcaggtgggagtcaaaggttaaaaaacaggagtcagagcctgggcatggtggctcacacctgtaatcccagcacttggggaggccgaggcgggtggatcacaaggtcaggagttcgagaccagcctgaccaacatggtgaaacctcgcctctactaaaaatacaaaaaaagtagccaggcatggtgactcacacctgtaatyccagctactcaggaggctgaggcaggagaattgcttgaacccaggaggctgaggttgcagtgagatgagatcgcaccagtacactctagcctgggccacagagcaagactccatctcaaaaaaaaaaaaaaaaaaaacaggagccagaggcattggtggactgcttctctgggttggaccggagagagtggagcatttgcggtcttcagggtcccgggaactgctgaacgggcctggcactgccgggtggccgcggtctcctagcacctagttgtcctttggtgttaaattgttaaatggagcccttgtcacaggctgcccctccccgtggccagtggcagctctgatgtgctcagcctcccggacaatcctggtcccttctcgcagccctcagacgtctgaaaggcagtgtgcaggtggcgagagtcatgcgcgggtccccggcttccccagctcacgtgcccactgaacctgcctctgtctgcaggagttcattgcygttagccagctccgcggctccacccagggcaagatcctctgcttctatggcccccctggcgtgggtaagaccagcattgctcgctccatcgcccgcgccctgaaccgagagtacttccgcttcagcgtcgggggcatgactgacgtggctgagatcaagggccacaggtaggcctggcctgacagctctccccacgcactcccctcagctgtgctgccgggcttcgtcttctccggtcaccctttaacatctggtagagcaatccgggttgtgggcaaccgattccactcatgctggagtaactgaaaagtccagccatgtggcggacttcaggcccagctgattccaggtgctcaaacagcgctggcaggaacctccatggcttgacccctgggagagagacttctcgggccggccctcagcagacacccccggtagttccagcataggacctgcaatgcccgggccagagctgcagggccggcgtttgccgtgcagatgctggtctatgtgggctgtggctgatgccccaggactaggggtggggtcggctccaccccccaccccgaagcctgtgggctggagtcaggagagacggtctccagtgaggaccgggccgcgcacaccagagaaacctyggcgcctctgtgggctcactcgtcccggccagcctcaggcccagaagcaggggccacggccctcagagttcagcgccctcccacctgaccctttgggtgggcagccgggcgcggcttttctggggcttccctcctcgccagcctctgtagacagcggttctttggaaaccgtagcctcagtgagagccgagtgtgaggcatctgctgagtccaccacgtgtttccatcctgcaaggcattcacttgagtccaggtttaaagtgaacatttctgccttctctaaaaacatccccagctcccgacctcccggctcaggccttcctagcatctgcccgcccgctgcaagggtgacagcatgctggcccgcgcagtgtccagtccccagggggcggccactctgaccagccgggagttgggaggagctggaggaggtggggccagtgcagctttggggagtcccagattgactagggggtggggggtgtgagggggaggacaggggacctgttctgcaggcccttggttgggctggggtctgagcaggaaggagcagctgggtgaacgtggacgggtgcgggtccggggcacccagtccttcctgggcaagcggtttgaagtggtcgcgaagcctcttggagcctggttcagggatggctggaggtgcgggccggaggagagaccctggcggggttctgaacaagcctgggtcacctctggccttgggagggagtcaccaggtagcggggctgcggggagggcaggcgtctgctgacgtctctgggttcctgagacaaggacaaggacaggagactggctgcggggcgatggatcgttgttattaacagcagcaaaaccctcctttgcccccagctctccagggctcccacgttcctcggtcaaagcccaagttctcactgcagcccacaggaccccgcatgacctgccccaccccctcctctctctccctctcttcttcctccccctccctctacccccttccctctccatctcctccctcttccccctctcctccctcttctctccccccctcctccctctgcctcagcctcatggcctcctcactgttcttctaacacaccaggcgtggtcctgtttcagggcctttgcacgggctgtgtcctgggcctggaacacatctctcagaccctcacgtggctctctcctcacgtgcgttgctcggggcctctccctaagacactccttacccccctgcacacttaaagtgtcacacacatcccagtggcatctcagtccctccatccctgcctccctgtgtcttcatcccacagacagagccttcctcactgtctctcgtggggcctgggattcttctgtccctgtcgcgggccgggcccctgtgctggggcagagcacagagcttgcaggaagccctcctgagagccagtgctggccatggctagtatcaccccagcccttgagggctgaggcgtgcctggcgtccctcagtgaggagtgggggccttctgctgccagcgcctgtctggctttcaccatggtgtcagctgagggatgggactgagggagatctggctttgaatcagtgaccccagaatctgagctggygagtcagggcaagtgaccagcgtgcctgcaggtgccacacatccggcggctgccagcatttccgcctcccacatcatggccacatcttgtggggctccaggtggcctctcccctgtggccctggagggtgcatggtgtcgttgtggccgagccaggctaccaagtgacctctgaccccgctgtgcacccacaggcggacctacgtgggcgccatgcccgggaagatcatccagtgtttgaagaagaccaagacggagaaccccctgatcctcatcgacgaggtgcgtgcggagaggcccggagaccccctaacccggcaatgccgtgtgcaagatgaagccgagccttccgggtcctaggatccccgagccaactcaggggccatcgccgtgatgctggccctgatggcasggacgggtccctcccacscayagccacgcccagcaggctgcccgtccaaggcagggtgtgggtgccgctctcactcggggtctccccagccctgacccyggggtctccccactgggcgggctggccaggggcacggcraggggcaccacctgctgtctgctgccccaggtggacaagatyggccgaggctaccagggggacccgtcgtcggcactgctggagctgctggacccagagcagaatgccaacttcctggaccactacctggacgtgcccgtggacttgtccaaggtggggggcctgtcyggggcctgggcttgctggggagggtaagcggccagtcccccagcaccttgccgccgcccccaggtgctgttcatctgcacggccaacgtcacggacacyatccccgagccgctgcgagaccgtatggagatgatcaacgtgtcrggctacgtggcccaggagaagctggccattgcggaggtaagcccagcccctccccactgctgtccccttcccagagcagggggcgccccccagagcctgcagaggccgtgcctctgggagctcctgggcccgggagagacaggtgggacctgcggccgaggagcagatggggccgtgagagacacaccagacgcttgcgagcagctgcaggtggcgcgagygggcgcagggtttagggcctgggactgtccaaaacaccgcccaccaccgtcaggccacacactctgtctcccggggcctccaggctgccccatggtggggcccccacctggcccagagtgtagggaaggtttctggcagccggaagcagtggggcctgtggctcccacccagaatgaggcttggaggagaagtggtttcagtgaggagcatgcaggggcccatatttctcatgtgtttttttttctgcaaaggtgctgagtgcatttctcccctaggagccctttgacagccagtggtgggcactggtccctgcccttgaggccctcccagcatcctcgtgtcccctgggggcttcaatgcccactgctgggcccagttcccagcctgacttctccaagggacgggcctgtagttcctggggacaggactggggggcatggggacccctcagggcatcaggagtgccccccagtatcagtggcagatgtagagtggcttgcatggctctgtccgtctcacagatgccctcccccatgccattagagctcagaactgtggcaagaattgtgtggggctgtgggtgaccctggagcccctgacccagtccccttcctcatgtgctgagggcagcagccacgtaaccagtcagccaccctacaggccctgggtctgtgtatggggccagcccatggggcaaccaggaggccttcctggaggaagcggcatctaagataccattgggggataggaagtggatccaagcagaggacgcagcacaagcaaaggcctggggcctctgggcatggtgggtggcagggcggggtgtccaggccctggtttcaccatcagggacctcgttcccaggccagggtctgggggccatgggagaggcattggctcccaggttctagactgagctggtgggcaaggtccctccagacccaaccctgacggttgcccttgcagcgctacctggtgccccaggctcgcgccctgtgtggcttggatgagagcaaggccaagctgtcatcggacgtgctgacgctgctcatcaagcagtactgccgcgagagcggtgtccgcaacctgcagaagcaagtggagaaggtgagcggccagcccgccctcctggcacctgccgcccacctcaccatcccacgctgatcaycccacctttccatgcccatcaycccactttcctgcgcccatcaccccaccaccccgcgcccgtcacacctttctgtgcccrtcaccccaccaccccgcacctgtcaccccaccttcccgtgcccattgtgttgccctgaccgcccaggtgttacggaaatcggcctacaagattgtcagcggcgaggccgagtccgtggaggtgacgcccgagaacctgcaggacttcgtggggaagcccgtgttcaccgtggagcgcatgtatgacgtgacaccgcccggcgtggtcatggggctggcctggaccgcaatgggtgagcgtggtggcgggagaagaccccaaagccattcccatttctaccygagaacaagcaggtcccaccttgtacacctgtgcagtgggcctcaggtggctctgaacggcctctggcggggggtggtgtgctgggagcccagggggtctgggctgagggaggggaasgctgtgacacatgggggtggcagcacaccatgggccttatggatttgggtgccactttgataggcttacaggtaaggacaagctcatccagatgggccttggggccaccacgcacaaaggaggcgagagggcaaaggggatggtgcgggaggggctggagaagggcttgtgtctgtctgcagggcagcggcagctgggccttgtagccctgggcgtgtcctctgtggctggcagctgctgggggctgccctgtggggcgtacagagccaggaacccgcaacgcagcaaacgtagaggccagcgttggctcacgatgggacaccaacccctgcccaggggcaccaagatgctaaactggggcaggagcggtcagagtggccccgaggggtggagtgagcaccggcctgggctccgaggcctcccgtgttcacagctccacacctgtttcaggaggctccacgctgtttgtggagacatccctgagacggccacaggacaaggatgccaagggtgacaaggatggcagcctggaggtgacaggccagctgggggaggtgatgaaggagagcgcccgcatagcctacaccttcgccagagccttcctcatgcagcacrcccccgccaatgactacctggtgacctcacacatccacctgcatgtgcccgaggtgaccgcgccatccgctcccacctgctcccgcccagtycctgggctgctggccacctgctcacccactatccccacatgcctccacagggcgccacccccaaggacggcccaagcgcaggctgcaccatcgtcacggccctgctgtccctggccatgggcaggcctgtccggcagaatctggccatgactggcgaagtctccctcacgggcaagatcctgcctgttggtggcatcaaggagaagaccattgcggtgagtgtccctgtacccaccccacagcactggcagggcccacaccaccacgggacaggcccagtccccgccatgcaacctctgcctgggcsaaggagagggaagccctgggctttggaagcaggtctctctggcctggagctggccttaagctcaccgccctagctgccttctccacagcaagtcttgtggagaacattctgagcctccactggcttccccagtaggattgggggggtggctcctgcttctcttcccaggcagcccagcgccaagggagaggctagagatggggacgacgtttaggattactggtggcgggggtgtttggagcccctggccaggggctggcctcttccaagggtgctgagcaggttggagcgccactgtccccactcttccctcccatccctgcctgtccccagactggaccacacttgccatgtgtctaggaagcctggtgcagtcagtcaggagatgccaccacgagggaggcatggtcaagtggctgtgaccaccttgaattggacaccaggcacagacttcctagatgataaaatggtggaggcaaattgggaggctcactgtccatggagtcagtgtgcggtgacagtgggaactgctgtcctttcaaggggctgtggtggggctgtgcctggcatctactccagatatgtgtagcctccggaggtgaggggggtgacgcagggcctgggggcagagatgcagatgctcacaggaaccctgttcaggccccagacactgcctgacctctggatgtgaggccgtgggtgtgtggctcatccagagccctgagactgctcccaccgcacggccagacttcctagataagggggtggggaggccctggctcctgctctcaggctgttggagccaaggccagtggttttgccttgagcctgtttccccgtgggagacggggaccctggtgggttttgggacttactgcttagaacccggcatcactgtgtatcgcsggtccccaggaagccctttcgttcctggaggttagcacacctgctgccctcccacaggcccaggcagggctgaccctgactctgcccccaggccaagcgcgcaggggtgacgtgcrtcrtcctgccagccgagaacaagaaggacttctacgacctggcagccttcatcaccgagggcctggaggtgcacttcgtggaacactaccgggagatcttcgacatcgccttmccggacgagcaggcagaggcgctggccgtggaacggtgacggccaccccgggastgcaggckgcggatgtcaggccctgtctgggccagaactgagcgctgtggggagcgcgcccggacctggcagtggagccaccgagcgagcagctcggtccagtgacccagatcccagggacctcagtcggcttaatcagagtgtggcatagaagctatttaatgattaaagtcatttgcagtacggcggcttcctcacctgctgccccgggaagggtgggcgggccacggcttttgattcacgaccaggcagcacccggagagggtgtggctcagagcgggcaccagacaggggactgcgggcccccgacacacccacacccacccacggacagcaggagagccagggcttctgtcaagctgttctttatttcagggagagggcaggggaggggctcagtctttcttggcagcagctttcctcatggcggccagtacgttgctcagctcctcccgcttcctcttggcgcggatgtgcgtccccacctgccarggacraggccgccgtcagcccggccctgactcccatcccaccccgcccctcggccggcagcgcccacctacccttttcttgataaatttgagggcccgtttgtccttggagaccttcagtaactccatggcgcgccgctcgtacggggcaaagccacacacctcccgaatcatgtcccgcacgaacttggtgtgtttggtcagacgctaggggggaaaggggcggccgtcagggtagggggatccctgcattctagttaagcagcttctctcgcgctgccgcgatttccctggctacttcctcccctctgtgggtagctgtgagaaccaaggtattaacgcctagcgcttttcgccgcgcccggagcagctcccatcctccctaagtcccagtctccgcaacactggcaggacgcacctggagtctgggctgcctgctgaataaaggcgcccaatacactgacacacctgaaatccctcaacctcacacaccgcaacctcgggccagctccatgagcgaactccttactcctgcgtcagaaccccaaacccgctgcccgcttaataaaggcgcccaatacactgacacacctgaaatccctcaacctcacacaccgcaacctcgggccagctccatgagcgaactcctactcctgcgtcagaaccccaaacccgctgccccgcgccgctctcaaggtgctccctctgccccagcgtggattgcacggttgggaaaaacccagatgggtgcccgccttcgagcamcaggcaggaagtcccactcccccaccccatctcttccattcaagccccccttagttctgcgcccgaacgcgcgttctttcaggtcgagagcctttgcccaagccatgccctccgccctccaagaaacccccgacaacctccgcgcggcacccgcactcaccccgcggcgtcggctgtgcctgggcttgctcacgttcttggtcactttgtggcccttgttgaggcccacggccatagggtagcgtagggccatggctgcggacagcgacggggagaaggggcggaggtgagtaccggctcagttcccgaggcccagagccccgcgtcccggctccttcagcctcgctcgccacaaccaaccatcctccaacctgcacagaggacccgggagtccggatggcggcggataccggcagtgcgggaaaccacttacctgctgctctccagagacggccgtggcggaagggctggcgccgcgcggaactccgggatatctactcggctcaggaggcgcaggccagagaggcaagaacggcacgcgctccccctggcggctggagtcttccccgccgttgcgctgagcatgcgcgaccgagctccctgagcatgcgcgtttactcctgcgagcccgggagctggagtcggaaccagtggaggtggctatggctgctctcctccctctgcctgtgaaatgagttcgaatcccaactccgcctatttcgggccgaccctgcatcgacgacatcacctctcagaatttcttcacttgtagagcgggaataataataccaaactgtatgaactgttaaaacgcccattaggccgggcgcggtggctcacgcctgtaatctcagcactttgggaggtcgaggcatgtggatcacgaggtcaggagctcgagaccagcctaatacggtgaaaccccgtctctactaaaaatacaaaaaattagccaggcgtggtggtgggcacctgtagtcccagctactcgggaggccgaggcaggagaatggcgtgaacccaggaggcagagcttgcagtgagccgagatcgtgccactgcactccagcctgggcgacagagcaagactccgtctcaataaataaataaataaataaataaataaataaataaatagccaggcgtggtggcatgctcctgtaatcccagctacgcaggaggctgaggcaggagaattgcttgagcccaagaggcagaggttgcagtgagccgagatcgcaccactgcactccagcctgggcgacagagcgaaactccatttaaaaaaaaaggtattggttttgttatcaattggtcaagctctagactaggtctgaatacagcaacgtgtaatagtgccccttgcggacatctgatgtaatttaggtggtgtagggacgggacgctaaataactgaatcgggtggcagaaacacacaagtttccagtttttctcctttaatgctactaatatacaagaagagagtctcaatttagggctgctctaattagggttagcgctttcatgttttttccagacagggtcttgctctgtcgcccaggctagagtgcactgctgtaatcatagcttattgtagccttgacttccagggctcaagtgatcctcctgccttagcctccttagctgggaccacaggcacatgccaccacgcctggctaattttttaattaaaatatttgtttgtggccgggtgcagtggctgacacctgtaatcccagcactttgagaggccgagacagggggatcacctaaggctaggagttcgagaccagcctggccgacatggtaaaaccccgtctctactaaaaatacaaaaagtcaggcgttgtgacccacacctgtaatctgaactatttgggaggctgaggcacaagaatcgcttgaaccccggaggcagaggttgcagtgagcctagatcgcaccactgcactccagcctgggcgatagagtgagactccgtctaataaataaataaataaagacagggtttcaccatgttggccaggctggtctcaaactcctgacctcaagtgatctgcccaccttgacctctcaaagtgctgggattataggcgtgagccactgctcctggccctctcagcctccatttccccacctgtgaaatgggattgagagtcaaggcccctgatacacacaccccctcccgctgcccgctggctgctagcaaattggaattaccaaggaatttgaacaacagatatgcaagagaagaagagtttttattctcgaacaagaggctgggtccagctcagaacacactctttccctcctcctcccgctcagaccctgccaccaggtagacgaacagtgtagacgcccctgcaggtgtgaagagtaccagagaccccagctaggggaagctggcaggagttgggggggttcctcccagatggaatgaatggaaagaataaatcagggacttaaaggcgcaggcaggagatggagaggggtccatgggtggctcaagggtggcgtggcctctctgagccttagtttcctcatctgcaaaatggaagcagtcacgtcatcaatcatggccaaacaggtgaggccttgcaagtccccgacaaaggcgcctaacacggggcacctgcacctcccaagccgtgactggttccaggtgcccgtcgtttttctcggttttgcttttctgtcttgatgacttcatcttgggctgtggccaccctctcaggggtgtctctgtgagtgttctggctccagggacagttggagggaggaacattgccgtctgggactggaggggcaccccccggtgctcaggctgccgcggccgtgacgttgagctcctggcggataaaccaggcccgcgggcgcggtagccagcgccggagcaagcacagcaggcggaaacgccacgggtagaagacgccggccgcgcgcgtggcgccgccgcggatcacggccagggctgccttgggccccggggccgccttgaccctcgtgactcccctggggacaggagggcacggtggggactgcggctggggctgggccatggcccccagcccagcccccagcttgtccgggcctcacctgactgcctcggcggcggaggcgcgatctcggaggcccaggacgcacatggtgatggccacgttcacgtcctgcacgtccagctcccgccgcagggagccgaagaagccgtccagcgcaaacttggccgccgagtagggagtggagaacgacgtgggcacgcggcctgggggcgcggacggcagcggctgagtggctccccctcgtccgggaagcctgcccagaccctccaggctcacccgcatcgagctccccactccccgtcccgcagagccggggccgggtgcacgcaccgagcagcgaggacaccaccaccagggagcccttgctgtccgtcaggctgggcagcgcccgcgacgtcagttgcacgtagctcacaaagtttacctgcaggcggcactcgcgagtcaccggcagaggcggagcccaggggcagggcggggccagaaacccagagggcggggccagggccgggtcagagacggggccagaaacccggaaggcgggtccgagggcggggtcaaggccggagcaggggcttgggctaggaggggcgtggctggggcgggacgggtggagagccctccctggagaaggcagaacccggaccgcgaagggaacggaccaccggtccctgagatagaggggcgggccggggccgcggaggagcggagcacctgcatgagccagcgagttgcctgggggctgcgggctcgcgtgccggccggggcgccgccgatgtggttcagcacgaggtagtccagcccgcctggcccagaaacgccggtcagccccggaggcccctccccaaggaaacgatcaaaccccgcccccgagcttagctccacccagagcgctggtccagcgagctccgccccaggtaactcccactacgatcaaagacacccagccttggccttacaccctggatctagcaaggtttggttcccattcaacgaggccccgttcagagctcttcccccagacgcaatgagactccaccccgcccacgcccccagtccccatttgtctccgccctgagacacctgttactgtggccacacccacagcccaattctggtcctgtccctaaggcctaggccacggtcccggactccaggcttcaggcccagcccctcacccagcttgtccagcgcaaactgcaccacgctctcgggcgcctcaggggaggccatgtccgccgcgatgtagaagaccttgggggcgcccagcttccggcagttccctaccacctggggggggccagagctgcccgtgggcctctcctctacagcagcgcttccccctccaccgcacctgctggccatagggaggcccccgcctgaaaacccccccctactctgagcctcgggacccattcaacatcattcccaaaaatttaccactgcttgaggggcgcaaagtggaggcccgcgggccagaatgctggccaatttggtggttagtcaatcaccaacatctaaaacaggacatttcatctacaatttcctgattgctagcttctcttgaaatattgaaaggtttgtgcccaagagccatacccttccttgaagtagcaatggactgcttgttgctaagaagtgcccatccttcccttcgagtttaagaaccctggctatcagcacaggcctggacactcaatactctcatttgttaagaaacactgcatcttctagtcaccgtctcactgcattggcacaacatcctaacccatgagaaggtgggtttttttgtttgtttgtttgagacagagtctcactttgttgcccaggctggagtgcagtagtgcgatctcggctcactgcaacctctgcctccggggttcaagtgattctcctgactcagcctcccatgtagctgggactacatgctcgcgccaccatgccctaatttttttttttcttttttttgagatggagtatcgctctgtcacccaggctggagtgcagtggcgcgatctcagctcactgcaacctccacctcccgggttccagcaattctcccgcctcagcctccccagtagctgggattacaggtgcctgacaccacgccggctaattttttatttatttattttatttttattttttgtatttttagtagagacagggtttcaccatgttggccaggctggttttgaactcctgacctcaagtgatccatccgccttggcctcccaaagtgctaggattacaggcatgagccaccatgcctggcctaatttttgtcttcttagtagagaccaggtttcgccatgttggccaggctggtcttgaactcctgacctcaggtgatccactttcctcggcctcccaaagtgctgactacaagcgtgagccaccgtgcctggccagaaagtggttttattgtccccgttttgcaaatgaggaaactgagaggctcagagaggttaggcgacttgcccaaggtcacacgggaagcctggatcattgcagggattaaacccaggctctcttcccaccccccatgagcacccccaccattcatctagacatggggtggctcaccttctgcaggagagcctcagtgtgggcagtgagcaccaggtgggagcccagacgcgcgtagtgataggccagctcctcaccaacaccagcgttggcccctgtcagcagcactcgcgctccctggaggctggctggccatagccggggtggtcactctgggcggaggacaggacagctggcccggtttctccctccctcaaccccaggtgctcacctgggtcgaagttgtcatcccaataataggcgaagaacagggcccccagccctgtgaggagaagcaccttcatggtcctgtgtgggcctgcagagggacaggggacagaggtggccggcacaggcctggcccacagccacccgtgtttggtgggtgtttggtgatgccaccgccttggatccacgccttcctatccacctccacagccaccacctgtccaggccaccacggtggctccatgaaccaccgcggctccatgaaccaccgcacctgcaccctccccctccacccttctcagccctctccatctgcacaccttgcctctcctggactgaaaatccttcctgttccagttagaataaaaaccagactccttggtgg

SEQ ID NO: 97763 - DNA, 22770 bp, Homo sapiens
aggtcttgctctgtccactgggctggagtgcaatggttgcactggtttttaaatgcttctacaaggagcatttaaagtgttctacatccaacacttctacttacattttattggccaaagtaagtcagataactcctgagttcagcagatcctgggagatggcggagggcattagtaatgcttgccctactgtctcactgctggtgctgaaaatccaatgagaaaatacacacaaaacatattcattcattcaacaaatgtttactgggcacctatgatgtgccaaccactgttctaggaactggatacatacctctgagtgagtacatagcagtgaacaagacatatagaaatcccagtccagccgggtgcagtggctcacacatgtaatcccagcactttgggaggccaagcggatggatcacctgaggtcaggagttcaagacaagcttggccaagatggtgaaacaccatctctactaaaaatacaaaaattagctgggcgtggtggcgggtgcctgtaatcccagctactcgagaggctgaggcagagaattgcttgaacccaggaggtggaggttgcagtgagccgagatcgagccactgcactccagcctaggcaacagagtgagactccgtctcaaaaaaaaaaaaaaatagaagtcccagtccgtggcaagctcacatactagcggaggagacagaaatctggatcaatatgtaaagtacacagggctgggcgtggtggctcatgcctgtaatctaagcactttgggaggctgaggtgggtggatcacctgaggtcaggagttcgagaccagcctggccaacatgatgaaaccttgtctctactaaaaatacaaacaaattagccgggtgtggtggtggacacctgtcatcccagctacttgggaggctgaggcaggagaatcgcttgaacccaggaggtggaggttgtagtgagctaagaccgtgccattgcactccagcctgagcaacaaaaatgaaactccatctcaataataataataataataataaaacaaaaaaaaaagtacacagtacgtgagcgggtgataaaagacaggaccttcccgtgatcactagatgtgtagacatgaaagatctgcttcccagacctggggctggagaaggtcttggtaagggagtggtggcctcatgtcttcatgtctgccctgagagaggctgtttggatgttgctgtgcttgcagggcctccatgctgagttttgtctctgttcagctgggaacatgcaggtgaccttgccaggcaggcatcttctcactttctccagggcgaagagatgagggcagggaggtgacaggacagatcactaggggtggctgtcatgagaactttaggctggagtgcagtggtgcaatcaaggctcactgcagcctctacctcctgggctcaagtgatcctcccacctcagcctcccgagtagctgggactacaggcacatgccaccatgcctggctagtttttggtattttttgtagagatggggtcttgccatgttgcccaggctggtctcaaactcctaggttcaagcgatcctcctgcctcagtctcccaaagtgctgggattccaggcatgagccaccgcacctggccctgttgtgagaacttctgactctttcctggagtggggtgcagccagggcagggctctgagcctacagggccctgacctgactcaggtggtctcaggcttcctctggctccacaagaggagcagacagcagggagcagacagaagggagcaggctgtggggtgtccaggtgggaaaggatggaggctgtggcagggtggggacagtggaggggaagagtttagtttctgtaggtggagccaataatatctgctgacaggttggagtgggtgtgaaggagagaggtgaaggaccaccccggagtgtttggcctcagtcactggaaggacagagctgccactgacctaggtggggaaggtagtgagggagcaggttctggaggaaggtcagaagctcagtttaggatatgtaaagcttaaaatgcctctaagggccaggtgcattggctcacacctgcaatcccagcactttgggaggctgaggcgggtggatcacgaggtcaagggattgggaccatcctggccaacatggtgaaaccccgtctctactaaaaaatacaaaaattagctgggcatggttgcgcatgcctgtagtcccagctactagggaggctgaggcaggagaactgcttgaacctcagaggtggaggatgcagtgagccgagatcgcgccactgcactccagcctggtgacagagcaagactccgtctcaaaaaaagaaaagaaaaagaaaaaggaaaaaaaaagcctctgagatcttccatcctttcccatggaaatggtgaatatgatgcaggatgtaggagcctggagttcgcaggaggtgtctgggctggagatagaaatttgggggttagggttagggccaggtgcagtggctcacgcctgtaatcctagcactttgggaggctgaggtgggaggatcacttgagctcagagttcaagaccagcctgggcaacacagtaagacctcatctctacaaataattaaaaaagaaaaaagataaaggaaatttggatgtttgccgggcgtggtagcttgtgcctgtagcagtagctattcaggaggttgaggcaggaggaggattccttgaggccgggagttacaggctgcagtgagctacatcacatcactgcattccagtctgggtgacagaacccctgtctctaagaacaacacaaaaaactgggcgttggccgggtgctgtggctcatgcctgtaatcccagcactttgggaggccaaggcgggtggatcacaaggtcaggagatcgagaacatcctggttaacacggtgaaaccccgtctctactaaaaatacaaaaaattagccagcgtggtggcaggtgcctgtagtcccagctactctggaggctgaggcaggagaatggcgtgaacccgggaggcggagcttgcagcgagcagagatcgcgccactgcactccagcctgggcgacagagtgagactccatctcgaaagcaaaacaaaacaaaaaactgggcgttgatagcctagagacaggatttaagctgtgcatgtaggggaggcaccccatggcatgagtggtacagagaggaggatagagacctaacacctggggctgccgggaataaggggttgggggccagaactagatgacaatatggttacgattggcagtgagtgccatgagaaagtacaagtcattttgaaagcatataactggaagcctcacctagtctcaggttgggtggagacagggaggtctttctggaagagatgactcctgaggtgacacctgcagcctgagtagctacacaatcaggccagaaaaaaaaaggcagcaggggagttcctggccgagggcatgagggctggcagcaagtgagcctcgggagagggcagagagctggagcagtcagtctggcagggaggggtgtggtgagaagggaatctggattagtcatcaccaaaagatctgtgccaagcccgggttcagatctggttctgccaccctccgtgaccctgcctttcagaatctccattctctctcctgccctgcagacaaggcttgtgtagcagttaccttggcctggccccagcaaggcctcaggaaacatcagctgcaactagttttgtctgttgtgatgttgttatttgacctattatattaattatattattaacgcataagggtagtggttaaggatacaggctagggagagtgactgcttgggtttaacctcagagtcggtttacttatctgtaaaatggggataataaatagcatctatgtcacagggctgttaggagaacaagggaactgatggacgtcaagcacttggaggagtggttgatggttacttgtttttgtatcttttttttttttttgagacagtttcgctcttgttgcccaagctagagtgcaatggcacgatctcgagtcactgcaacctctgcctcccgggttcaagcgattctcctgcctcagcctcccgagtagctgggattacaggcacacgccaccacgcctggctgattttttgtatttttagtagaaacaggatttcaccatgttagtcagggtggtcccaaactcctgacctcagtgatctgcccacctcggcctcccaaagtgctgggattacaggcgtgagccaccacacctggcctgtttttgtactatttaaggaagactaagagtctaccagctgaggaatacagctggcctcgaggctgagggaacagcatgagcacagacacagagctaatgggggcatttacaaagcatttatcaccaatttatttatttatttattggagacggagtttcactcttgttgcccaggctggagtgcaatggtgcaatcttggctcactgaaacctctgcctactgggttcaagcgattctcctgtctcagcctcccgagtagctgggattacaggtatgcaccaccacatccggctaattttgtattttttagtagagacagggtttctccatgttagtcagactggtctcgaactcccgacctcaggtgatctgcccgcctcagcatcccaaagtcctggggttattggcatgagccactgtgcccagtatttatttgagacagagtctcgctctgtcacccagattgtagtgcagtggcatgatctcggctcactgcaacccccgcctcctgggctctggtgatccccccacctcagtctctagagtagctgggactaggcgcatgccaccacattcagctaatttctgtattatttgtagagacaaggtctcactatattgcccaggctggagtcaaactcctgggctcaagagatcctcctgcctcagcctcccaaaatgcagggaatacaggcatgaaccacttcacccagccaccacttaagttttttttttaataatcagtattgctgcagatatcatttaattttgatagggggcctagtggtatggagcaacccatgttcccattttacagatgagaaaatcgctgctcaggaatatcaagccactcttttggggttgtgcagttattacagggcacagccaggattcaactcaagcctagccagcctgcagggtaggggataagagccagccagcctgcctgggggccagatttagctccccccgatgagtcctgaaaaagtactggactcccgtggctcatgcctgtaatcctagcactttggcaggccgaggcaggtggatcacctaagatcaggagtttgagaccagcctggccaacatggtgaaaccccgtctctactaaaaatacaaaaattagctgggtgtggtggtgcatgcctgtaatcccagctactcgggaggctgaggcaggagaatcgcttgaacctgggaggcagagactgcagtgagctgagatggcgccactgcaccccagcctgggcaacagagcaagacgctgtctcaaaacaaaaaaaaaaaaaaagaaaagaaaagaaaagaaaccaggctatgtaaaaatattattgtaaaaaattaaattaaatcaaaaaaaggccggtagcccatacctgtaatcccagtacctcacagtactttgggaggctgaggcaggaggacggcttgaggcccggagttcaagagcagcctgggcaacatagcgagacctccgtctctattatgtaaaaacaataatattttttaagtaaataaagaaaccaggccgtggccaaaggaatcttcctgtgtctggggccttctttagaggctagcatactgaggacactctttgggccagtccaggaaggaatgattctggtggcccctgactggggcgggggcgtggtaaggttcgcctgggaggcggcgcaggcgctgcctgcggtttgactgccatccgggctgctgcaggcactgggaaaggcaatccagcctcaatcctcgccacagacacgggcgactgtcccccagcgtgtgagtcaaaccatactccaggcctccaggaggtgtttgtcgcgacaacacctgcagagggcccgtgcggagtcccttagtgagcggaccgwaaaccgccaccctggaaggatattggcatgccctagggtgaaaattcacactacgacactcggggggtgggtcccctccgagttctcgtccgcgggtgcctccacccagacctgaggggtgtcgggaagaccccmgcctaccgagtcagggcgggattaagacctccggcgctggaaacgcgtagggcggggcccagacctggatccagctagccgggcggtgtggggtgcgcatgcgcaatgtccgcttcggctctaggaccgcgcgggcgacagcagggccgcggtgcagtgtccgacccgagagttgcggcctgagtcaccggccccgccctccggagccggacgctgcgggaggcccgggagcggcagtggaaccgactcccagaactccggacgtgtgcggcggtaagcgcccggcccgtaccccctccgcaccccgcaactccgactttggcggcccccagacccggcgaaaccgtgaagtctcggcctcaggagccccccagatccatggtctcagattcgaaccctcagacctgttcgatctccttttatgccgtcccggggacccttctccaccctctgtctcatgatccaaaatacaggcccataggtttcagagataccctgtgaattcttccttggggtgtcctgaaccgcgatcgtagatctgtgcccccagttccagcggggaaccccattgtccgggaacccagagctcacagccacgatcttagacccgagcccacagagccagaggtgacactggaatcctgccgctgggaatacctaaattctcaagcccacatttgggatttcctaaaccccgccctggggccctttaggccgtggatgtttgctccgcgcccatgacctgccaaggacctctacattcaggctgggctctggatctcacattctagcgcccagacatgtcgggaacgccttacgccaacttggggtccccaccaagagaacccccaccagatctgcaccctccccttcacgcgtgcacccagtccaggctccctcaagccccacgggtgccttttagacctgaggaggttgcaaacctgatcccccatacctgccccacccatccgcggacaacccgccctcgcaaactcagacccccacccggaggcttcagattcctcccaggtccagctgccggaaatgcgtgtttgaagggagggtgtgggctcaggggcgaagcacccactggtccccttttttccccccagcagtgagtcgcagccatgttcctggttaactcgttcttgaagggcggcggcggcggcggcgggggaggcgggggcctgggtgggggcctgggaaatgtgcttggaggcctgatcagcggggccgggggcggcggcggcggcggcggcggcggcggcggtggtggaggcggcggtggcggtggaacggccatgcgcatcctaggcggagtcatcagcgccatcaggtaaggcggagactatcagaggggcggggcctgggaatgggaggagcctcagtgaggcgtggtctgggaggggcgtggtctaaaaatagaataggattaacctggagkctaacctgggtacatgaattaggccggggaggcctggtttgagagttctgctgtaagggggtggaccccagtgaggcggatatcagtcattgggggcggtgcttgatatgggagtagtctgattgtgtgggaccaggacaatgtggtcctgaggggactgatgtggagttttggcgggtggggcttatgggtctgggctcagcctgcattggctaacctggagatgaacgttaaaggtgcggagccaatgcgtctgagtgacattttacggaaggggcttgacttatgagtgtggtcagaggttttaggtgggttaatgaggaggtgagcccaggaggaagcaagacctaatggggtagggtaaatggcccagaatgggctgggcttgctgggaactggctggattaatggagaaaaatgccctggtagggatagggcaggttggcttaattagccacggccacttagcagtgatcccttgaaggggcggggaccaatggctggggtaggatgttgggaagacgggcatttaggaagcgggccatggagtagggtcttgggcagatggcacctgaggaggataaggccttgggaagctggggcagagcctctatgaagtgagccctccaaggggcggggtcttttgattctacgtgggattttttaggtttagggtggccaagatgactgaaatctgccactgggtaggtgtgcctggcaggaggggagcctcccaggggaccggtctctgggtttcctcgagggtggggttggcctgaggaagggagaagaggggcacgaccagggcagtgtggattgggacagatgaggacaagaacaaatgaaaggcacagcaaccaagtaaggaagataacggctggggtctggagcgttggggctgatggttctgtagtgctgcccgttggaggccccgcccctggcactaacccctcccccttatctcttcgcagcgaggcggctgcgcagtacaacccggagcccccggtaagccccctctgcaaccagacccccttctcctgccaaggsctcttcgaggtcccatccctgttcctgtagagaagccccaccttcctccccttcttgtgaaattcctctgccagttcctcccatgccgtgtctgcagcttcgccatgggtcttagccatgccccacatacgtgcaccccattcactaccacccctcattcttttcctcatcaagctgcccagcccactctgacttccccacccagggtacctgggtttggggagccgtcctggccgggttcccctccccctgctctgagctctcctccctttgcagcccccacgcacacattactccaacattgaggccaacgagagtgaggaggtccggcagttccggagactctttgcccagctggctggagatgtaagtaacctggggtccctggccccgtcctaaccgttccatcccttcccttgtggctgcccttgcacacacacccttgaccatgacaaycccagtgttcccattctccatgacattctcagacccctttcagtcacccctgacctgcccctaacttccgcccgcaggacatggaggtcagcgccacagaactcatgaacattctcaataaggttgtgacacgacgtaagtgaccggggttaaggaatagggtagattcagaggcagaggggtcagagaggatttgacctctggcctctgactttcaacctgttacccacagaccctgatctgaagactgatggttttggcattgacacatgtcgcagcatggtggccgtgatggatgtatccttgggggcagtgtgggagaggccctgggtggacagagagttttttgagagtatgtttgggaagccaacatgtagctttcatatccacagatgtggaaatgcattcatcagaacacagtcacctgcagacatgtggcggtaaatcataacaatgccagctgtcacagctggcactttaattatataaagtgaccgaaccgtcataaccaccctgttggacaggcacaattattatattccattttacagaagaggaaactgaggctcagtttcctgaaagaagcagtcatttgtctcaagttatagataaaggtcaggcatggtggctcatgcctgtaatcccaacactttgggaggctaaggtgggcagatcacctgaggtcaggagtttgagaccagcctggccaacatggtgaaaccccatctctattaaaaatacaaaaattggccaggcacggtggctcacacctgtaatcccagcactttgggaggccgaggcgggcggatcacgagrtcaggagattgagaccatcctggctaacacagtgaaaccctgtctctaccaaaaaaaaaaaaaaaattagccgggcgtagtggcgggcgcctgtagtcccagctattcgggaggctgaagcaggagaatggcgtgaacccgagaggaggagcttgcagtgagccgagatcgcgccactgcactccagcctgggcgacagagccagactctgtctcaaaaaataaaataaaaataaaaataaaaataggccgggcgccgtggctcacgcctgtaatcccagcactttgggaggccgaggcgggcggatcacgaggtcaggagatcgagaccatcctggctaacacggtgaaaccctgtctctactaaaaatacaaaaaaattagccgggtgcagtggtgagcgcctgtagtcccagctactcgggaggctgaggcaggagaatggcgtgaacctgggaggcggagctttgcagtgagccgagatcgcgccactgcactccagcctaggcgacagagagagactccgtctcaaaaaaaaaaaaaaagaaaaaaaaagaaaaataacaataacaaaaattagctgggcgtggtggtgcacgcctgtagtcccagctactcgggagtcccagctactcaagcaggagaattgcttgaacccgggaggcggaggttgcagtgagcagaggtttcgtcactgcactccagtctgtggactcaggtcttttgggcttgagaacccacgtttataacagccacatgcgcatatacacacacacacacctaagagcacacccacatacgtgaaggtgtatgaggcagtgtgcacagggacacacgtgttatctgtacatgggccagccattagctgatcttggatacatgcatatttttatttatttttgttttaaaaaatattttatagagaaaagctttcactatattgacctggcaagtctcaaactccagaccttaagcaatccttccgccttggcctcccaaagtgttgggattacaagcttgagacactgcgcctggcctcatgcacatttaacacatagggcaaacagacacatacataatatacatgtcatgtaatcacagacatattgcatagagcaaagcaatcccaactctacctcttaaccaggttattgaaccgctctgtgcctcagtttctctctctgtaaaatgggtgagtgataatggtgataccgaatcggaactacatccaaaaggtttagcacagtgtatagcgcatagtatgtggtctgtacacattagctcttaactatgatcttgggtagagttttcagctttgaatgttttcttctctggaaatagtcctggtagaactggtgtcccaaggatttagtgagaaagtgatgttcctgagtggacatcaggtggatcctgagttcaagcgatccacctgccttggcttcccaaagtgctgggattacaggcatgaaccaccatgcctggtcacacacttgtttttcacatatcctaacatttttatgaaattgagttactgtcaagaattttcttttctttctctttttttttttttttttttgagacagagtctcactctgtttcccaggctgaagtgcggtggtgccatcttggctcactgctaactccacctcctaggttcaagcagttctcctccctcagcctcctgaatagctgggattacaggtgtgcgctactacagctggccaatttttgtatttttagtagagacgggatttcatcatgttggccaggctggtctcgaactcctgacctcaagtgaaccgcctgcttyggcctcccaaagtgctggattgcaggcgggagccaccgtgcgtggcctattaagaattttctgaatgagcaattaacaactcttcaggcaaggaatttgtactttagagtagttgaatataattcctcatggttatgtttaaagagaatccctatttagaaatgtaagtgacaatatgtatggataaaatgaaaaataaaaccgcacaccaggtgatatgactaggaccaagcgggagctggagtttcagccctggctgccctgcttgctgtatcaccatcgtgtccacagtgcatgtgatgcatgcatctgggtgtagctgtcactcttcttaacaccctcccaccagagcgacaccacaggcaagctgggctttgaggaattcaagtacttgtggaacaacatcaaaaggtggcaggtgtgtagaaacctctgaaatccctggcacccagacccccaagccatggagacactatgccccacaatgctcacttggacccaatgtctctgtcctcacaggccatatacaaacagttcgacactgaccgatcagggaccatttgcagtagtgaactcccaggtgcctttgaggcagcaggtatggctggcagggacatgctggggctgggagtgggatgggtgagaaaacctctactcagctggtctgggcctgactcctgggcatgggagtgggttgggccatgtggcccccgcacctgaaggactacatccatcttagggttccacctgaatgagcatctctataacatgatcatccgacgctactcagatgaaagtgggaacatggattttgacaacttcatcagctgcttggtcaggctggacgccatgttccgtgagtgacaacccagctgtcttcctgggtggggattcctatgacctctatggaccaaggtctcctctaagcctgactttgaggtgggcgatgctaggggcacagtggtgattgaatcagttccagtttctgccctcatgsagctcacagtctggtggaggagacacaagtycccagayagtgacagttcagactggtgatggctgggagaggggaagctcagggcagagtgatgggttgtgatgggggcagcacaggccgagggtctagggctctggtgaggggaagagtgagcagagcgtgctcagattgtgcttggggaagcctagagggcaaatccaatccaggaggaacctgatgcagcccaaggggtcagggagggctcactggagagggaacgttgagacctgaggggatgaggagagaacttagtgagaaggtagggaatactgttgcaggctgagggaacagcctgtgcaaaggcctagaagggaaagaagatggggcttctgatgctttttgttagatttctttctttctatttttttgagacagagtctgctgctcttgttgcccaggctggagtgcagtggcatgatcatggctgactgcagcctcaactcctaggctccagcagtcctcctgcctcagcttaccgaatacctgggagtacaggcacacaccgccatgcctggctaatttttaaaattttttgtagagacagggtcttgctatgttgcccaggctggtcttgaactcctgggctccagcaatcctcctacctcagcctcccaaagctttggtgttacaggcatgagccatygcatgtggccttctgagtgttagtgtactgaatgctgaagacatggctgggaagtggggattactgtccttattttgtgaaggaggaacttaggattcaaggaggcaaattttcatgctcatagtcacccagctaggaagttgtaaagccagaatttgaacttggatctatctgagatctgagctaagtaagagaaggtaggagcagtgagcatgattaggtcatgcaggattgtgggtgccaagtttgggggtgctcaaactctaccagagacattggggagccatggcaggttctaggcagagggaggacagggtcaggtttggctttagaaagatcccttggcctcggctgggcacggtggctcacgcctgtaatcccagcactttgggaggccgaggagggcggatcacgaggtcaggagttcgagaccatcctggctaacacagtgaaaccccatctctactaaaaatacaaaaaattagccaggtgtggtggcgggcgcctgtagtcccagctacttgggaggctgaggcgggagaatggcatgaacccaggaggcggagcttgcagtgagctgagatctgccactgcactccagcctgggtgacagatcgagactccgtcttaaaaaaaaaaaatcccttggcctccaggccgggtgcagtggcttatgcctgtaatcccagcactctgggaggctgaggtgggcgtaaaacctgaggtcaggagttcaagaccagcctggccaacatggcgaaaccccgcatctactaacgatacaaaagttagccaggcgtgggggcgtgtctgtagtcccagctactcaggaggtttasggagggagaattgcttgaacccaggaagcggaggttgcagtgagcagaggtcatgccattgcactccagcctccaacctgggtgacaagagcgagattccatctcaaaaaaaaaaaaagaaaaaaagatcccttggcctccagagagcccacaatgcatgaaaagtaacagaggaaaagaagcaggtatgtgagatagcagggaggtgaagggagtggacagacaaggttgatgccacaagtcacataagaggggccaggaaatagccactggatctaccagcaagaaggctgatagtcgggaggatcatttgagtccaggagtttgagaccagcctgggcaatgtagtaggactccatctctacaaaaaaaaaaaaatawatgtatatagacatagccgggcatggtggcacatgcctgtggtctcagttgctcgggaggctgaggtaggagaatcacttgagcccgggagggtgaggctgcagtgagctatgatcttgccactggactccagcctgggccacagagacaccgtctaaaaaaaaaaaaaaaagggctgggcatggtggctcactcctgtaatcccagcactttgggaggccgaggtgggcggatcacctgatgtcaggagtttgagaccagcctggccaacatagtgaaaccccgtctctactaaaaatacaaaaaaattagccaggcgtggtggtgcacgcctgtagtcccagctactcaggaggctgaggcaggagaatcacttgaacctgggaggcaaaggttgcagtgagccaagatcgtgccactgcactccagcctgggcaacagagtgggactctgtctcaaaaaaaaaaagaaagaaaggcagccagggtgtgcaggacgctgtgggtatggacacctgagggtggtggtaactgagcggagatagtgtagtcatcatgtctagattccctgtgggtggggaacatggagtcaagtttcagggcaggcgtggggacctacctgtaagactctaggggcaggaagtagagtgtgcagagcctccctctagtagcctgttaggcttagaactggagaggatggagcatagatgtcagtaggaggctggggctgggcagaggtgatatcagtacacagaggccattattgaggagggtaacagmttggattccaatcctgatttcttcactttcttgctatgtgacctggggcatggcccctcccttcctgcctcatttctttttttcctgtttttaatttttagtttttttaaaaagcagagatgaggtctctgttgcccaggttggtctcgaactcctgggcggctcaagtgatcctcccatcttggccttccaaagtgttgggattataggtgtgagccaccacgcccagcctgtgcctcattttaaaatgacacttatctcacagagttggattaaatcagccaatacctggaaagcactttaccccatgcttggcacacagtaaatactcagtgaagtgccagctgctatgattgtcatcccatgtatttgtgtaatgttattatgccaaaaaccagtctccttccttccctgccgccaaacctctgcatctcctcctccaggtgccttcaaatctcttgacaaagatggcactggacaaatccaggtgaacatccaggaggtaaggacccccatattggggtatgggtgcctgggaggaccccacccctcagcccttcataccagctctgagctgcagtccccttcctcctattttgccagccrtccctgggtgagggcaaaggggctggtgctcttggggttccctgtcctcactctccaccctcctctccccagtggctgcagctgactatgtattcctgaactggagccccagacccgccccytcacygccttgctataggagtcacctggagcctcggtctctcccagggccgatcctgtctgcagtcacatctttstggggcctgctgacccacaagcttttgttctctcagtacttgttacccagcttctcaacatccagggcccaatttgccctgcctggagttccccctggctctaggacactctaacaagctctgtccacgggtctccccattcccaccaggccctgcacacacccactccgtaacctytcccctgtacctgtgccaagcctagcacttgtgatgcctccatgccccgagggccctytytcagttytgggaggatgactccagtccctgcacgccctggcacacccttcacggttgctacccaggcggccaagctccagaccgtgccagacccaggtgccccagtgcctttgtctatattytgctcccagcctgccaggcccaggaggaaataaacatgccccagttgctgatctctatgggatctgcctcctgatctgacccgagagaggaggggtggctcgggctctgggtcctggggagcaggggaggtagtagattcgtccccagggctggatccgtggatttcctcgtctttttctcgtcggcattttttgtctcatcctgagctgtggaggctgagacaggacccagaagccccagtgatctctgcttctgcttccagagtctgggctggagggaggtctcaatgccactcctggccctgtcccccaaggccatgtttgcccctcttgcagcttctccatccacacttggcctctgcctctgttgtgtcatggaccatgctcagtgtcttccttcccacttgaggacaccaccccacgtccccgggtcccgagggggagcctatgggtgctgtttggggtactcagcagagggctgagaggtagcaacatcctaggagtatccctggtccagcatgaggcaccgagggctgggggcagtgggcagtccacagggcagagatccctggctggtgggaggatgggcttggtggggaggggtggacacaaacacagacacacacagaggccagcgtttattgacacttgttcaagtctctcaggccccccaggcttcttggtcttaattcctggggaaggaggcccagccaagggagtacaagctgtagacagtgcctagaaaggggaagcgttggagacagaatgagacctaatcccctccctggacatcccaggcttttaaggccttcaggctccctggttcccagcctggaccccagctctagttcggactccagctcccttcccagattggactcctattgtaaagccccctggctttgatctagaccgggctgggagctttctccccgactcctccctgggcctcagccccaccactaacccagcccccgtcctgggacaagagcccaaaccctagttactcccctccctgcaggcctgactccagctcagtactcgacccccttcctaaacgccaacccccaacccagatcctggtcagtcctgcccagaaaccagccacctcctactctgggtccagccccgcctcccccgcagcccagacgggccctgcgctcaccgcccagacacagcgtcattgtcactcggtacaggatgttgtcaacgatgccgcccttcaggtacaacgggatgtcattgtcctcctggatgtgggggtgtctgatgagaaaggggtgctggctgctccttagagcgcgccccgcctgccccggctcggcgcgctcccggctggcgcgtcggatccccaccccccccgaccccccacctggaagagcttctgtttctcgcgcactcggttctgaaagcggttccgggcggtggagctgaaggagcggatcagcgcctgggacacctgcggggtgggaggtgggcgggtattggaggcacctggaggggtgtcctgaagtgggaccccgctctctgaggcctggacgtggggacagccccatccctagcgagcgtcccaaaggcgaggagggtaatagcttggattctgttacccgcgaactgccagctgggttgggaggggactcgccctggagtctggcctgggggtgaccgggctgcctagagggtcctggaagggagaggacccagaaggactttgttctggggggcctaagtcctgagatttttgttgggggagggtttcctggattaaagggaggaaaccaggtcccgggaacgtggggaccggaatggaggtccccgggagcgtccaggctgcctgagaaggcccgggtgaggccagtgttaagggttcccgagatgtcaagttcaaacccggggctttgggccggggtgggggtccccagttgtctccgaagagtggattgtgggggaagggacccaggctgtttagcggggagtcccaggccctgaaggtggctcacgttccaaggccctagatgcgggggcacttggagagtcgcgtattagggcggggttttctgggtggggggctccggcccagcccatgggggcctcacccgaagggcctgcattctgccttgtcctcttccgccggagtcacctcccttctccgcccaaggacacgcgtagtcctcctctgtccaggaaccccaggccccacccgctgcgcgcagcgtgacagctggggacgcggcggggctggggctggggctggggctgggttgcggggagtcctgctcctcggattcgtccaccacggaggaggcggtccagacccgcaccctgggccgcagcgcgcatccgtttcggtctcggaatttcgcttggtcccaccggagcccaaagcggtaccagggaatacatttttgcagatttttggagatttccgccgggggcaagtgcaactcctccccggatctctccctgcccgctggtatgtgagagtgaggaaacgcataaggccgtgttccaactccctgttctgtctacacagccagagattgcacctccgagcctgtttccgtatctgtaacgtgagggctaaggcaggatctttctcagagatttgttgagacattaaatgaccttgtttttaggaaacacaagctaaagtctttgggagtaaaacggtattttatgttaccctaagaaacacatcatatctatttatagctctctaattctggcagtcaacggggtgcagcacagttgtcctaatggttttagcaaccaggaaagatcctggcctagtctacaaggttttctttttcttttcttttttttcttttttttttagacagggttttgctctgttgcacaggctggagtgcagtggtgcggtcatagctcactgcagcctcgacctcctgggttcagcgatcctcctgcctcagcctcctgagtggctgggactacaggcgcccaccaccatgctcgaactaattttcgtattttttgtagaggctgggtttcaccatgttgcccaggctggtgtcgaactcctgagctcaagaaatttgccggcctcatcgtgagccacgcacccagccagcagacaatgtttgtttgtttgtttttgaggcagtgtcttgctatgttgcccagggtggtctccaactcctccaagtaatgttcctacctctatcacccaaagtgctagaattagaggcatgagccactatacccagcttgtaaaaggttttaacaatctcttttatttatttatttaatttatatttttagacagagtcttgctctgttgtacacgttggagtgcagtggtgtgatctcggctcactgaaaccttctgcctcctgggtttaggcaattcttgtacctcagcctcctgagcagctgggattacaggcacccgccaccacacccagctcatttttgtattttttagtagagatggggttacaccatgttggccaggctggtctcaagctcccaacctcaggtgatccgcccactttggccttccaaagtgctggaattacaggcctgagccaccgcttccagccacggtctcttttaaagagggcttttatgattattaaattcccctaacactttcaaactatgcttgtaaatttaatgttaggtttttccatttaagagccacaagtagggctgggcgtggtggctcacacctgtaatcccggcactttgggaggccaaggcaggtggatcacttgaggctgggagtttgagaccagcctggtcaacatgacaaaaccctgtctctactaaaaatactaaaattaaccaggtgtggtcatgggcgcctacaatcccagctgcttgtgaggctgaggcacaaaaatcgtttgaacccaagaggcacggaggctgcagtgagccaagattgcaccactgcactccagcttgggtgacagaacgagattctgtctcagaaaaaaaaaaaaaaaaagctgacttaccagataaacagatgactctttcttcaattcttaaataacttttatgaataaaaaattcataaactgtacataaacagatttcaagtaagtcttagtcaccagctgaattccacattttacaatggaattacaagattgacctgttatttgaataggccagtttaccttaaatattacaaattcttaaaataccaagtattcacagattctctaacacaaagttaataccatgggggccaggcactgtggctcacgccagtaattccaacactttgggaggccgaggtgggtggatcacctgggtcaggagttcgagaccagcctggccagcatggtgaaaccccgtctctactaaaaatacaaaaattagccaggcgtggtggtgggtgcctgtaatcccagatactccggaggctgaggcaggagaatcacttgaacctgggaggcggaggttgcactgagcagagattacgccattacactccagcccgggcaagagagcgagactccatctcaaaacaaaacaaaacaaacaagttaatactatggttttgactgtcttaattttcttttttcttttttgagacggagtcttgctcagtcacccaggctggagtgcagtggcgccatctcggctcactgcaagctccgcctcccaggttcacgccattctcctgcctcaggctccccagtagctgggactacaggcgcccgccaccacgtccagctaagttttttttttgtatttttagtagagacagggtttcaccgtgttagccaggatggtctcaatctcctgacctcgtgatccacccgcctcggcctcccaaagtgctgggattacaggcgtgagccaccacgcccagcctcttttttttctatttgagatgaagtctcgctctgtcacccaggctggagtgcaatggcgcaatctctgctcactgcagtctccgcctcccgggttcaagtgattcccctgcctcagcctcccaagtagctgggactaggtgcacgacaccacgcctggctaattttttgtattttagtagagacgaggtttcaccatgttggccaggatggtcacgaactcctgacctcaggtgatccatctgtctcggcctcccaaagtgctgggattacaggcgtgacccactgtgcctgtcctgtttttctttcattttctttatttgtttatttcatgcgcgtccgtgtgaagagaccaccaaacaggctttgtgtgagcaacatggctgtttatttcacctgggtgcaggcgggctgagtcagaaaagagagtcagcgaagggagatagggatggggccattttataggatttgggaaggtaatggaaaattactgtcaaagggggttgtgctctggtgggcaggggcgaaggggtcacaaagtgctcagtgggggagcttctgagccaggagaaggaaattcacagggttaatcactcagttaaggtggggcaggaacaaatcacaatggtggaatgtcatcagttaatgcggggcagggccttttcacttttgtgattcttcagttacttcaggccatctgggtgtatacgtgcaagtcacaggagatgcgatggcttggcttgggctcagaggcctgacattcctgccttatgttaataagaaaaataaaatagtgtcgaagtgttggggtggcgaaaatttttggggggtggtatgaagagagaatgggcgatgtttctcagggctgcttcaagcgggattaggggcggcgtgggaacctagagtgggagagattaagctgaagggaggtcttgtggaaaggggtgatattgtggggatgttagaagaaacatttgtcgtatagaatgattggtgatcgcctggatacggttttgtatgaattgaaaaactaaatggaataagaaaaggagcaaaacaggtataaaaggactaagaattgggaggacctaggacatctgattagagagtgcctaaggagattcagcatagtcctgccagcaaagattatttatttacttcaagagttaagagtggcagtttggggatagcatgaggagatatcagctgtg

SEQ ID NO: 97764 - DNA, 13927 bp, Homo sapiens
cctgtctgggcccaggcagggtctgcagcctccccagcgcccctccccacagatctaatctcagcccttctccttgtacttactgggggtagggtgagtgataaaggggcagggatgggtgcaggaagtttgtgggcagggggcagagactggagagtcagtgaaaattgaagaaagctgcttaacccaagtttgaaatcatgacactagaaacaactccagcaccatagttatcacgcagacttcaacgtggccaccaccattaccgccacttggagtcatccctcttccccacctagctgccccctccgtccacggtcccgactcaggtcttgccttctctggtcacttgtgcaatgcagttccccgcccctccagccccctctccatccccgcactgttgggctgcacaagccaggctgtgtgcctgcactctgccctgcacctccgctagctagctgggtgaccttgggcaaggaaccaaacttgcctgagcctcagttccccgctgtatctgatggggatgatgagcaaacccaccacagcggtagctgggagcacgaatggagtgaacatgtgtttgtggacacttaaacgggcacttcccacaaggccatggccttgcacggagggctctgtcaactggtaccaccactgttgctctggcattagcaggtacaggccctgatagccattcagaacttcctttgaatgaatgaatggaatcctcaaaacagcctggtgggcaggaggctggggcccatgacagccttggggagggcctggggtcttctgggggcacagtctttgcctcaggccaactcagcaattgttgcagaggaatcgcaagtgtccctaatttggaaggcaggaaatggggggtatctgagaagagctcgttgggccagatgatggaaagtggactgacagagcaggagacaggaagaggataaccatgcatgtgtgatggctttgcagggcagcccattcattcattcattcaggcagtggaaacaggagtgcagacccgaggtgggaccagccacctgcactccagcaggctctccctctcactcccctcccctctgccctgacagcagtaaaaaaatgcaaaaaatgacagcggtagcacttcctcatcgggttgtgaaggttacatgagtttaatgcaggtaaggcacttagaatatgggcacaggacaggtgttcagtaaacacgtataaaatggctaactaaaaaaaaaacacgaggccaggtgcagaggctcatgcctgtcatcccagcactttgggaggctgaagtggggatcacctgaggtcaggagtttgagaccagcctggccaacagagcaaaccccgtcaccactaaaaatacaaaaaacaacaacaataaaaaactagccaggtgtggtagcgcatgcctgtaaccccaactactcgggaggcggaggcaggagaatcgcttgaacccggaaggtggaggttgcagtgagccaaaatcgtgccactgcactccagcctgagtgacagagtgagactctgtctcaaaaacaaaacaaaacaaaacaaagaaaacccatgaggccaggcacggtggctcacacctgtaatcccagcactgtgggaggtcaaggatcacttgagcccaggggttctaaagcaccctgggcaacaaaagtgagaccccatctctacaaaaaaatttaaaaattagcttggcatggtggtgtgcgcctgtagtcccagctactcgggaggccaaggcaggaggatggccggagccaggaagatcaaggctgcagtgagctctgattgcaccactgcactccagcctgggcgacagaggaagaccctgtctcaaaacaaacaaaccccacaaacattgattgaaccccccattgaggggagcaggctcaatggcaaaggaaacagaccgacactggccaagaatcacagaagcaaagcacccggttactcatgataaacctgggaaggaagaaagtggaacagtttattcacttaatgcttgtttgctaaagccaagtagaaaacggcaatactagatgtttagtgtgcttcaaatacaaatgtttgtcaaaataccaagtaaaaacataaatttataaaacaggaaaccagaaacctcccttacctttccaatgtaaaccatgagccactgctgccccaaggctgcctcaggcttcaggagtcctccaggagctttttctttaatgcagtgtctgttttcagggaccctcctggcctttggcagccagcttcctattgcaggagctgagggtctaggagggttcatggcgaggttgtcagagctgggaagcagaaagcagccgggcaggcctcacagtcacagagtccacgtcccgggcagcatatggagaaagggtctgggctggctgacagcagtcagcattggcgcctctgaggaggttgagggctgagttggggaggtcaccacctgtacccaggcataacaggggtggtgcaatcagcaaagggaaagtggtctgaagtggggcagtggtgaaaagctaggccagcggggtggagcccatctggaacaagtaggtgtgtggggtaggggacgcaggtggttgcaggtgggccggtacctgctcagcctgtcaaatggtgaaagccatggactatgaaggtggggctcaagcaggggagactgactcagccctgccacttccccacagcaaagagcccaaacagatcccctggagggctgtcgggagcccctacgtggtggagtccacaggcgtgtacctctccatacaggcagcttcggtaagctggggagaggtgcccagggctagctggggggatgatggtgccagaagcccctgacacctgcgcttcctccccaggaccacatctctgcaggtgctcaacgtgtggtcatctccgcgccctcaccggatgcaccaatgttcgtcatgggtgtcaatgaaaatgactataaccctggctccatgaacattgtgaggtaatgtgggcagtgacatcctgcaatgtgtggaagggagggtagactcgtcctccccaccctcagccccactggattcctggtcgcttggcttctgcttctccttcccgaaactatctgctaaaaacgcatgacttccagaggacaagcttggggagcctccccagctgcacctcagtgcctccttcagtctgacagtgtccccacagatccctctcaccctcatcctgacgtttcataaaaccaagtctgcgtgcataccccaagaggggtaagggtggaggggtggctctgcgactcacctcacagtgtccgtgcacaccttggctgtttcagcaacgcgtcctgcaccaccaactgtttggctcccctcgccaaagtcatccacgagcgatttgggatcgtggaagggttgatggtgagttgaggatgaggggctggggcaggaaggatggcagggaaacccaacttcttcccgggccttgcttactgtatggagttaagagggagagactggtttcgggaggagaggcccaccagtgcagaagtcacttaaaacactgtgcaaccctcaggcaaggctggaccctggcctgcacacatcccctcctgtggtctgtggtggtggccccaccagcctccacacctaggccaccaacttagtcctggaaaaaagaggcatgggagcttaggagcatgaaggcctcatcttggtccttctcttccccaagaccacagtccattcctacacggccacccagaagacagtggacgggccatcaaggaaggcctggcgagatgggcggggtgcccaccagaacatcatcccagcctccactggggctgcgaaagctgtgaccaaagtcatcccagagctcaaagggtatgaggacaagaagctgcaaccagggtgggggcatacgccaggaggactggactggcccggccctcagtccttaagaggaaagcaggggcctggcccagccacagggaaagggggaatggagggcaacgtccctaagttctgactcctgttcctcatgggggattctccaggaagctgacagggatggcgttccgggtaccaaccccggatgtgtctgtcgtggacctgacctgccgcctcgcccagcctgccccctactcagccatcaaggaggctgtaaaagcagcagccaaggggcccatggctggcatccttgcctacaccgaggatgaggtaggggctgaggagaggagaccctgggaggagccctctgggaagggacatgatttccacttgccagggagctgctctcaatgtgccaagtcagaaactgcagggcaggaagggagatctccctgcctcagggcctttgcacttgctgttcctttagtctggaatgcttcccttgccaggtgaccatacagtctgtccttacttcctccaagtctctggaggaacctccctcttcagcaaggcaccccctcaaaatatgttctttttgtggccatattcctcacctgaaatttcatttcatagtcactgttggccccagtggtgtgtgcactccaagaaaacagggatttaggggctgccttttcacttttgtggctccaacctggcatacagcaggtgactaatacatgcttagtgaacaaaagacaacagctcccatttttttcaatacttgctcagggccaggccatggccagatgccttctctgtgaggagtggatgccatggtcatggtggacccctgtacatccaccttggtgctgtctccctgcattaactcctgcaggtccactttcccacagtcactgggatcttttgttttaatggaatcacattgcatcacccgttttcaggattgaaaacactcctgtggcctttcatgacactagggctaaaaccctcaggtcctcccttcctgcagctccttctacctcagacactgtgctgagggccccagccggtcagatctttctagtcatctagacccaggctcatggccacccctcagagaggccctccatgctggcccattccaaacgcttgcattattcctaggaaagggatgtactggtacagcatgagggtgtttgtgacctgtgccctttggccagaccctgacacagtgccttggtcataccctgcacttggtcataccctccagtccagagactggacacagtagggctacatcaaatattatagatgaatgcatggatgggcgatagagttaagagtcggggcctcagctcctggaggtccttgctctgccggacacacttatctttgaaattctgacttccaggtcgtctctacggacttcctcggtgatacccactcgtccatcttcgatgctaaggccggcattgcgctcaatgacaatttcgtgaagctcatttcatggtaagggggaaggagctggagacttagagggaggggaactaaggggtggtcggaaggaacccccttgaacctcccgacccctcctccacaggtacgacaacgaatatggctacagtcaccgggtggtcgacctcctccgctacatgttcagccgagacaagtgaaacgggaaggtcctttctttccttcccaggggccggggccggaacatgtgcctcccgttccagcatctggctgcccgggggaggaaggacacccggggcgggcgccccacgccgatgggtccatggtgaaataaaaaacagtgctcacggctgcgtcccgtatctctgcgccggtcagggcgggttctgatccgggtttgaggcccgccccacccttactcgatcgcctgcgcccacgggcgaggggtcgcgctcgactccaagccgggttccacttcaggagaccgggaccgcgatggcagcggtagaggccccgcatggccggaagtcactccccaaagcgctgggccggcagcggtgggacccagggccggccacgggctctctgacgtcactgggcgcgacgccccgcgccgggactactgctcccagaaggtcgcgcgcgggcccccgccagtcaggtgggtgccaggccctggccgtggcgaaagagccggcggagccggagacccgctcccggagacgccgcctcgcgatccccgcgcgggcgggaccgggcggccggcatcatgaccctgtttcacttcgggaactgcttcgctcttgcctacttcccctacttcatcacctacaagtgcagcggcctgtgagtgcgggaagggcgcggggcggagagggcgcggggcccgggccgaccctcacctcccgcttctccaggtccgagtacaacgccttctggaaatgcgtccaggctggagtcacctacctctttgtccaactctgcaaggtgagggccaccgggaagccacgtgttctggcccccaggctctgcagacccagggacccgcccccgttgcctatccgcgcccccgccgccccacggtgggaccgccctcgggactccgcactgggaggcgtcaggatacctagagaggatggactttaaagagggcacgacctgagaagagacctagaagcaacttttgcgtagcacttagtaaaactgagaaaacctcagtagtgtggttggctaacaggttttttttggtgcggttaagagtgatcactgattccgtacgtgctgctaacactgcccaaggagcagcaccttcagacctgactcagatgccctgtgatcacccagaactcaaacttccagccccctcggggacccggggacctatcctctatctccccgattcctgtaattttgccaccatctggtggttcctcttccagatgggcccccagaacctgtcctgccctcttcctacccacgaacttcccacaaatcccacgtggtttatcttgatcccctcaccttgaagtgacctctttctgctttctgttctcagatgctgttcttggccactttctttcccacctgggaaggcggcatctatgacttcattggggtgagaggggccagggaagggaagggagytcaggaatggggctccctgtccccctgtgcttacttaagcctcaacctgacccgcaggagttcatgaaggccagcgtggatgtggcagacctgataggtctaaaccttgtcatgtcccggaatgccggcaagggagagtacaagatcatggttgctgccctgggctgggccactgctgagcttattatgtcccggtgcgtacagcagcctggagcccagacccctgagaagggacacctgggttccacgggggtgctggagggcaggggctcaaagcctggtgctgaaggtgtctgagtactggagaatcccatcctttgccttcctcagctgcattcccctrtgggtcggagcccggggcattgagtttgactggaagyacatccagatgagcatagactccaacatcagtctggtaggcagtcgtgctctcccacatacacatttctgctggcggccatactcctccccaaggcctggccccgactttctgcctccctctaggtccattacatcgtcgcgtctgctcaggtctggatgataacacgctatgatctgtaccacaccttccggccagctgtcctcctgctgatgttcctcagtgtctacaaggcctttgttatggagtgagttgggtggggtttagggctgggtccaaagtggggtgggttatctagtctcccttccttaytgtgacattttccygcaggaccttcgtccacctctgctcgctgggcagttggrcagctytactggcccgagcagtggtaacggggctgctggccctcagcactttggccctgtatgtcgccgttgtcaatgtgcactcctaggcttggtgtctcagacattgatgtaccttttccctgcctcrctccaggttttagtgaagtaaacagtatttggaaagttgttgctgcctccatttctctctcttgggaactgtctcccaataccgtgtccacctgggtctcagaggccctggttctgtctcaggagccaggtagacaagctggaagctagccagtcactgacttgtcccatgtcttgttcctcaggctcctggtttgccaggagtagacagaaggtttggatgatctttgagcagtggcagaggccagggccctcagggaacagatgatagaggggagctagaatccaagagaaggcccttggggggctcttcctcctcacagccccaacctgggcctcctcacatgggcccttcccgggctggttgcctctgaggctcctggccccagtgtccccctccaatccatcctctgtatggcagccaggggatctatctgaaacccgtctaaccaggtcatcctcccacttgcagccacttgcggccccttgttacacagtggacagtccaattgcttggcctttggttttacccaaccagcaaaaccagcttttctgaaactgctccctagaataatttgtccagccagattcttaacatcgttcaagccatggggtcagcatggggctggggggagagttgtgactgtgagctcctcagttctatggccctcagatcagatcccagcctgagccttctcagggtggagtggagagacagctgcagccaagaagcagagcagtggggcccccagcttggacattgtcctggatgcccccctccaccctcagccttccttggtccactgaagccggctccccgcctttctctgagggggatgtgtcagaagttttgaatgtcatgtttaagctccactttgatgtacaccctccccactcaggaagatgctccccatccttggtgttcccagtggggtaccccagggagtaggatagcaccattgcccctcctcctccaccaggccgttgaagttccacctgattttttttaagcttaggcctaggaaagctcactatgaccatctcgatgtttccagagggagcatttgccttcagacggcagctgccatctaggccactcttcctcattgtttggagtaaagacagggtccatgggtctcttgggagctggaagtgattgatcaccttgactttgatgtagaaaggaagtagatggggcagtctatctgggtggacttgtgacaaggtcactttctcccacacttccatgccccacatagctcttcacacatattgagacaagtgtaggatgcaaaattaccaactggaataatcccagcttacatggggttcagggagagagactggagtggctgggcctgagttggcagaggacggtgaagcctgggcggttggactgtggggagccaggcttcaggtgatcggggttatgatgggaaaaccccgggttatggggacccagaggagccgcctggcctgccgtggaagcagtgcgggctcccctgagcagaggacatgtgagctgagacctaaagaatgagtgattggggcaaggcagaggtaatggtcttgaggtcagagagggggcctgtttttcccaagggaacataactggttggaatgagttcaaggggacttgtaagactacagaagctggcaggggtcagatcacaggaggctttgggaaccaaggagagctctaggcagaggaaggacagggtcagatttggctttaggaagctctgcatggctgttgtctgaaatgggaaagctgaggccacgaggccagggctggaccagggcagggctttgtggggttaggagagtgactagaagccaagcccaggtgttggtgatcagtggctgtgtgtatttatttaccggcagggggcgctaacaggtaagggaggagcaaagagttccaggataactggagtttggggcttgtaagcccgagggctcaccacgtttccaagggagaagggaccacactgatgggacagtgggactatcagattgggtcagtgcatgggtacaggcatggggggtgatgaagaggccagtgtaggtcaccaacactgggggaagctggggacagaggtgggtctcactgcagaaacaactgaagccatgggggactggggggctgtggtcacaaggaaggagaagcccaggccctagccagagaaagccacataagaaagaggaagagaggtgaacagaggggctgggaaaggagcggcagagatgggaggtagggggatggggttaacctttcaggtgaggggtgtgaggaggggacctccaggagttgttcaggaactggccattgccgggacagaggagtaagcaggtaggctcagaaaggagacaccgctggggggtgggggatgcttgatgtggaaatgacttgggcccccttgtgtctgggagcctccaggagggagaagggtgctgagaacagagaaagcccagaggtggtagggggtgcctatcgccacggcccagcttgcgtttagatgccatgaccctgggcaaaggaataggaatcatttccccaaggcaggtttattgaggacctactatgtgccaggctgtgtactaggcactggaggtgcagccctggataaacagcccccatgtacaggactgtgggagatcacaagcactaatgagagacgctgaggacagtgcctggcaccagatacagcacagtcagcatgagctggttttattaccatcgcccaggacacaagcgtgtctttaacgaagggccctcaggcagccgtccagcctggactggagtcctaagaacagaaacaccctccagaagcggtcagctgtactccctgtcagagccccaccgccaccacaggtggcggctttcccgaggccagcccagaggactgcccaggcgctgctgctccaggaggtgcgaaccttgggaatgggggaggggagtgggcaggtccctccaagtttggggtgccgtgggctacagaagcagatactggtggggctgggactcttggttgctcagatatcttggtggctgtccagagggtcccacgagccctgcccccacctgctgtggcagttgcagggatgcttgaaggcagtcgtccctctaatagtagagttcctggtcccaccagcctgggagagagagggagaaaggagactcagtgctgggggtgccacttaggcagggccaggggctcagaggtcagtgctggttgctatggagggtcaagggcttagaggccaagtgttgaggatcaaaggtgggtgcagctgctcaaacgtttcagtcccctgcccccaggctcccagtctccacactcactccctgggcaacagcgaactccaagcttccggatctcatcatagacgaagatgaggatgccgtagggcagggggaccagccaccactggaacctgaaggcacatggcaaggtgaaggccatcccaggcctgtgccctacagccccctccctgtccttgcccctcacagcctctcaccgaatgggcatgaagttgaagatgttgggcatgccggggcagtagcacaggaagcagccgatgcagacctggaacacgatggcgatcaccaggatcttattcctgggggtgggcagaatgggacaggccattaggaattggggacgtgatggaaatcaggatactgtgggtcaaagtaggtcagatgtcagcagcagcagggaggtgttctacacactgaacactggagtggcccgggcctctcagcaccacccctttagtgaaatgtggagggggccgtggggggagttattggccagttagaaaggtttttttggcatgtcaccatctggcactggcacccgctggcatttgccggctgttctaaaccacagtcaggatctgatgggagttgggaccaggggttggagggcaggaagagggccagccagggacacctgaagaagccttgctggaaggcagagagacggcgcgtcttgcggatgaggacatcggcgatctggcacacctcaatgctgatgaagaacacggtgtagcaggtgtactgctggtacaggcgctgcccgaatgtctgcaggccaggggcaaacggaaacagcctgagtccagcctgagtcccggcggagagcctctgcagcccaccgggcatagggtcccagggccgtgaacccctaaatgctctctctgccttgcatcagagtgtgggggtggggggaaggagagaggcagggtctgccaggtgtgcaggaccccagaacgtggggcccagaaacctcagcctagcagagcttggatgacagtggccgggaaaactgtaggctgggccgactgctttcatagtgaaaggggggaggcacccaaaagaaagggcctgggaaaggggaattgaaatcctcagatgggatttgcaaagtccagtgactccaggggccaggcagatggcaaaaataggtgaggcagtcaccgcgggcctttgggaaaagagggcagatgccccatttaaagggggcagccactatgcagcccatttcttcaacacagctacttttttttttgagatggaatctcgctctgtcacccaggctggagtgcagtggtgcaatctcagctcactgcaacttccgaatcccaggttcaggagattctcctgccttagcctcccaagtagctggaattacaagcatgcgccaccatgcctggcaacacaactcctaataccagctaactgtggggatcactgactgctccaggtgccgagtgttgcacgtgcattagctcatttaatccgctgggtaaccctaggaggtaaatcagtggtgctggaacttgaacatgcatgagaatcccagcaagggctcccagagggctgggatagagcctgagaatttgcactgcaaacatgttcccaggagatggtgatgctgctggtctgggagcaaactgaaaaccactgaggtagactttgatattctctccactttgcaggtgagaaaacaggcacagagaggcaaagcaacctgcccagggttacacagcttgtgagaagcagtaccagaccataagtccaggcagtctggcttcagtgtctaccttaaccatgatagtaaatgtttaagggaagtatcctcgtctgtatgtaactctacaggtgaactaaacacatctgctggccagatctagcctcactgtgctccaaaccttcattaaaatagaccacatgtgcaaataccctgtgggagtgatgctgtagggaaaatagcagaataggggcctggttccacatctgagatgatgcattagtgtcagggcagagacacccatctgcagttgcgatcatcagaagcaggagtttggagctggagatggtgggaaaggcccttgcccccccgaactggcagggagtctgggggtccgggatgctctggctgaactcagtcacacgtggaggaacaagtgggccgcacacaaggcaagttgccctgggaaggagggagcccagggatgggatggggcggggcagggctcacccactcctggccgtagctgtcctgcagatcttgtaggtggtggtcctcccactgcgcccgcagccccacgcacagcagtgggaaccagccctcctgggccattgccgtgaagtagtcagtgaagccagcaaaggactgaatggcacctggagagagacaaggggacacagggagacagagatggacacagagacagggacacaggaagagagggacatggagagacagggacacagatacacaaaggtcaaggacacacagacagggacacgggaagagagacagggacacagatacacaaggtcaaggacacacagagccagggacacagaaacagtgacagagacacagaggcagagagagaagcagggacagagagacagaggcagggacagagagaaaaagacacatccaggacccaaaaagacagaaataggcaacaactcagagacagggtcatggagagcaaggtcagagagagagcaggga

SEQ ID NO: 97765 - DNA, 14443 bp, Homo sapiens
gtgcttggctcacttagccttttaagcctcatattcctcatcccctcccttgtggggacagggattcattgggacagagcatgttcagtggaagcacaggcccaactcagaggcagcatgagaatgtcagctgggtgcagccatggcggaggagcaggcagcatgtccaggtctcaagggggagttagggcaggccttgccaaggaagcagggctgaggaaagatgaagcccatgttcctgaggtgccatgacgggcagccagtgggtgacaggggtccaggggaccaagggacaccaaggctcagaggaaaggccagggctagggcagagttaagggtgttactacaggaatgagtgaggtggccctggggtggggagggcagtgcagttcaaggttaaaagtaaggactggagccagatgcctgagctcttgtcttagctctgccgcttcctgcttgtgtcactgtgggcagtgacttcacctctctgtgcctcagtgtaaaagcatggttgggagtgccagaaatggaaacacccctccaggtgccagcagagctcctggcgcagggtcagtaggtgttgaccattattactaagaggtccctaggcagagactagatacctccgaaaaggtgggatcgttcagacaaggtagacactgggcaaggcctctgcatcctctgatgtcatctcttccccatccccagatgacttccggatcttctgtggggatctgggcaatgaggtgaacgatgacatcttggcacgcgccttcagccgcttcccatccttccttaaggccaaggtgatccgtgacaagcgcacaggcaagaccaagggctacggcttcgtcagcttcaaggaccccagcgactacgtgcgcgccatgcgtgagatgaatggtgggtgcggcctcccctgggaactgcaggcgcggcaggcgctggcctaagcctgacccgagcctgccttgaaccctctgtctccacagggaagtatgtgggctcgcgccccatcaagcttcgcaagagcatgtggaaggaccggaatctggacgtggtccgcaagaagcagaaggaaaagaagaagctgggcctgagatagggtctgtggccaggcacccgctcccacctggccgggcgctggctcctccctcagttctctttggaaaacccccagctgtccacccatcccctgccccaaaaccagtttcaataaatttacgttcatttccacccctggctgggcatggaagcacgctgtggggagcagggcttggcttccccacagctggaaatggcggggagccttgagagtttacccaggcaaacacccaggcgggggcttctgagcccttcctgcgcacccattccctcttcaaacctcttccacacatgctgagtgctgcttattccagaggagaaaggggggccaatggcaagggtgaagccaagctgaggcccatccccgtgtcctggctacttcctgtgttctcagcaccaaggtaggagatctaggcccttcccttctggagctcacaggcttctaggccctcttccatccagcagactctcaccaagggtctgaacagtgcttgaggacacaatggtgactaaaagtcctgggccctgcaccgttagagctcaaggtccagtggcagaaaataggcccggtgccctgacgataagagcccagagtggtcagggcaggatgggggcgctgacctgtgggtgagggggcccttcctgaaggaaccgtccacccccaagtctcctctggggctttccagcttctccagtctgccatgcccagccagctcaccatgctctaagtctcggtgggcacctctatctctgtctctgtgggtacccctccatttcttgtctctaagcttctatatccctgttggtctctgttctctcccttggagctgggaaatgaaaaaggaggagagacccacagatagagagaacagagacttggggtctgttcccctctcttcccagctccaagctggcctctgcctgtctgaagaggtgtctgtgcagggccttgaatgccaggctgagggcttaagctttacgcagaaggcagcagcaagccccaaaaagctgagaaaattcaagcagcagcaaggtcctgggcagcacagatgtgcgctgtagaaagggccctgtgaccggctgggtgcggtggcgcacgcctgtaatcccagcactttgggaggcaggcagatcacttgaggtcacgagttcgagaccagcctggccaacatagtgaaaccctgtgcctactgaaaaatacaaaaattagttgggcgtggtggcgggcacatgtagtcccagctacttgggagggctgaggcaggagaatcgcttgaacctggtaaaaggaggttgcagtgagctgagatcgcgccactgcactccagccttagcgacagagtgagattctgtctcaaaaaaaaaaaaaaaaaaaaaaaaaaaaaaaacgccctgcgaccaccactgtggctggaagtctaaaagaaggttggggcagggactgggccagaggagggagatggcaggtttgagtatggggaggagtggagggtctcccagggacacagccatcggaaccctccattaggagggagcaggttgggcaggactttgtggggcataagtcgggggatggacaataccaaggcctctcagggaccgaggtcccccaggagaggtgtcgaatttctcctgttcctgtcttccccgccttactgccccctctctgacgtcacattttccagtctggtcagagggtgagagcctccctggcaggaagtgccctttagccccctgccacctgggccagaccacccagccccaggatcctcaaagccccttccccccatcactagtcttttctacccctgaccccccttgtactgacagcaagcatagggtcacgggaggagatgggaagagaggatggctccagaaaggacgcttccaaatgcatgtgattctcacttccaagtgggagcagaacagcaggtacacgtggacatgcagagtggggtaacaggcactgcagactccaaaaggtgggagcgtgggggaagctgaacagttaccagttgggtacgttgctcaccattcgggtgcactaaaggcccaggccagtatactggatatactgacatatatccagtaaggaatctgcacttgtaccccctaaatgtttatctttttttttaatgcacacaagtcttcctgagaacaagaagagacacacacacatagaatgtggcaagcagaggtagagatggcgctgtgagcaggaggctcagaggcagagatgagaaccatcagagactgtgcagtgggaagggggacggggagaaaaccaagagacagatggagtcggacaaggagatgagataggaacactcaaagacagatggggagggacagagatgtcagaagagaccaggtgacaaagcctcactggagtcaggcccgtggcaacagagacccagctttagatatgccaacctgaagaaagagggcagagagacatggagagacagacaagaggccagcttcaaggatgggaagccaggactcccttcaggcctccgcgctggacggatagagggaccagtgatgctccagggctctgtggcttaccccacactgattccaatcccagtcccactcccactccatgggacccccggtttactttactgtaaaatggaaggaggagcaatgccacccgctctccagaacggcaagtagttaatgatcaagaggctgggctggggactggaagatgccgatatgcaaaagttatttttaatggtaaatattacatacttattaaaatacagcaggatggctgggcacggtggtggctcatgcttctaattacagcactaaggctaaggcaggtggatagcttgaggccaggagtttgagaccagcctggccaacatggcaaaaccccatctctactaaaaatgcaaaaattagcctaggcatggtggctcacgcctgtaatcccagcactttgggagaccgaggcaagtggatcacttgaggtcaggagttcgagaccagcctggccaacatggcaaaaccccatctctactaaaaatgcaaaaaattagccgggcatggtggtgcttgcctgtaatcccagctacttggaaggctgaggcaccagaattgcttgaacccgggaggcagaggttgcagtgagctgagatcgcaccactgcactccagcctgggcgacagagtgagactccatctcgaaaaatattttatatatatataggacacccagttattgaattttacgtgaacaattttatagtttaggtatgtcctaaatatttcatgtatgtatgtatatgttacatgtatagctgtggttttttgttgttttttgctgaattatttgagcaagttacagactttttttttgttgtttctttttttgagatgaagtttcgctcttgttccccaggctggagtgcaatggcatgatcttggctcactgcaacctccatctccctggttcaagcaattctcctgcctcagcctcccgagtagctgggattacaagcacccgccaccacgcctggctaattttttgtatttttagtagagacagggtttcaccatgttggacaggctgatctagaactcctgacctcagatgatccacccgcctcagcctcccaaagtgctgggattacaggcgtgaatcaccgcgcccaaccacaagttacagacattataacatttcatctctgagttcattttctaaatgatatctttcctcctgaataccattatcaaatctaagaaaagaattctatgatatttcatattcagttcatactccagtttccccaattgtcctaaactattacagcgcggaagggcatggggtctggagaaggagagcagtgggaggatgcctgccttaccttcccccttcatcaaatgagagtatgtattgtacttgcctcatagaaggattcaatgaaggggtatggcacagttggtttcacacaatgagccctcatttaatgttggccgttattgctactattgttattgttgaaattgttgatgtcaatattgctatgattggcactcctgggaagcagccccaggacgccctccctactgggcctggtggaggattgggtgggccttcactcctgctccacgcccccgcagttactctgccgattgtgacgtcagctgacgctgggggcgggtgggggaatctggccggaaatccctcttcctgttgcagataagcccagcttagcccagctgaccccagaccctctcccctcactccccccatgtcgcaggatcgagaccctgaggcagacagcccgttcaccaagccccccgccccgcccccatcaccccgtaaacttctcccagcctccgccctgccctcacccagcccgctgttccccaagcctcgctccaagcccacgccacccctgcagcagggcagccccagaggccagcacctatccccgaggctggggtcgaggctcggccccgcccctgcctctgcaacttgagcctggctgcgacccctgctctgacgtctcggaaaattcccccttgcccaggcccttgggggagggggtgcatggtatgaaatggggctgagacccccggctgggggcagaggaacccgccagaggtgagcgatgaactgaggactagatgcctgggtgtctgggttaggaaggacctgggggactagactcccaagaagccgggggcctggactcctgggtctaacagaggaagagagctggggtccctcactcccaggaccaagattttaggctcctggggaaggagggagcggaggcctggactcctggctctgagggaagctagggctggggcccagactccagggcctccaagtgtcaccagctcacccattgccatctggacttttcccgacccagaacattcagaaggccttcatcgcatccatggacctgtggaactgggatgaggcatccccacaggaagtgcctccagggaacaagctggcagggcttggtaggctgccgaggctgccacaacgtgtgtggggagggtgtccaggtggggcctctgctgaccctaaccccttatcgcctgcagaaggagccaaaktaggcttctgtttccctgatctggcactccaaggggacacgccgacagcgacagcagagacatgctggaaaggtggctgcgggctgggacccctaagtgctggagaagaagcggggaggctgggatcctagggcaaagggaggaggggggcgtgcctaggttcctgggactgggtggggaggggccgcgtgcttgacccctgagggtgaaggaaaagggggcgcggggtgctgaaatacgggctggggggccataactcccagtccctgacaagtagagactagagagtgggtagttgaggggtctctttcattgctcacagtcctccctaaactcaggtacaagctcatccctggcaagcttcccacagctggactggggctccgcgttactgcacccagaagttccatggggggcgggtgagtgtggggagaggcggtgggaggtggggactggggtcccgaggcaccggggctagaggtgtagactccctgatctttgaggactgagaacacctgcgccctcaaggtggcatgacctggatccgggtcagccgggccccaagtgccagggttgagagcttagaccctagagtttttgagggggcacctgggctcccctcactcgggatccgttactcctcacagagcccgactctcaggctcttccgtggtccgggractggacagacatggcgtgcacagcctgggactcttggagcggcgcctcgcagaccctgggccccgcccctctcggcccgggccccatccccgccgccggctccgaaggcgccgcgggccagaactgcgtccccgtggcgggagaggccacctcgtggtcgcgcgcccaggccgccgggagcaacaccagctgggactgttctgtggggcccgacggcgatacctactggggcagtggcctgggcggggagccgcgcacggactgtaccatttcgtggggcgggcccgcgggcccggactgtaccacctcctggaacccggggctgcatgcgggtggcaccacctctttgaagcggtaccagagctcagctctcaccgtttgctccgaaccgagcccgcagtcggaccgtgccagtttggctcgatgccccaaaactaaccaccgaggtgagagggccgcaaagactgcggggagggcgaagctggagtcctgagccgggacccaggcacctaagggggcggggcccgggagactgacagtgagggggcgggggcttagggaccaggggctcgaaggaggggccggtggcccgcactccaggtccttggggaggagagggctaagaaactggtagtcttatagggaccaaggggatgaggacccaggctcctggattatataaaacgaaagcgataaaggcccagattcctgggtctccgagatggggaggccaaactcctaaatctctgagactggggccctggacgcttgagtctccaaggctgactgttggatctcagagaagggggggcggatccccttctcgggtcctgggtcccgagttgggaggacccggacctctagatcattgaagtggtgtgatctagggccgggaagactgagtgtgcccctcccttcatcccgcaggtcccattcagctgtggcagttcctcctggagctgctccacgacggggcgcgtagcagctgcatccgttggactggcaacagccgcgagttccagctgtgcgaccccaaagaggtggggcagctcccctgcccagccaaatcctgccccgtctcttctagttcaatttagctccgcccaagggctaggttcaaccgcgtagccctcggccccgccgctccccggcccactcgaggccccgcccaacccttctcaaacccaatctcccgcctgtactcctgcctcaaccaacccagtctccaccgggctctgcgaggcctcgcccaggtctgcactgcacaccgcccccaggcccggccctccccactatcgccaagccccgccccttcccactccgaccgagcgggcctctgtcctaggtggctcggctgtggggcgagcgcaagagaaagccgggcatgaattacgagaagctgagccggggccttcgctactactatcgccgcgacatcgtgcgcaagagcggggggcgaaagtacacgtaccgcttcgggggccgcgtgcccagcctagcctatccggactgtgcgggaggcggacggggagcagagacacaataaaaattcccggtcaaacctcttcgcgcgtgctcctctgcagcattcttcccgctgatactgactacagcagctagggagcctaagtgtgcagctccacatgttggaatttggcctccccacctcggagacccaggcgtctgggccttcatctctttcctctcacatgatccagaggcctggatccttgctcgctaaaagactgcagtgtcttagtcctcttctccctgaagaccctgaagtgcgggccaccagccccaagtcccttaagctcccaggtccctaagccccgccccacgctgtcagtttccccggtcccgcccccttaggccccgcctctcgactccgccttcactccctccgcaatcttcgcggacctccctcctcggtggttagttttgggatgaggaaccacccacctccagtgctgcgcaatgatcaaaggagacccagactcagggagcctgccatgtgcccgccctgtgatgagagaggcaaagaaactaaacccaaagcccatagggcctactgtgtccctgccctgtgtcgggatttgtaaaggaatcagacccaatcatgagagtatatctgctgtgtccccttgaagagaagactcagaccctgaaaagggcttactgtgctgtgtgtcctcccagtgcaagggatcatcaaagaattaaaactagtgcttgcaccccaacaccactcactctttccccactccaagctggaggacacaggactcagacctacactgtaaagagagcctacgccattctgagagccactgagcccctaaagagagcctgctgtctgtgagcgatgcgggggatacagcagggaccaagacagccctggaccctccccttaaggagctcacagtccagtgggaagacagacccatcatcagagtgttttgacctgggatgagaagactccaggggactgagggaggccaaaaggagagacctgatctagcccaggaggagaagggtcaggggagactccctggaggaggagacagctgatttgagaagtcaggtaggcaaagaatgtttcaggcagaaggaacaacaagatcaaaggcccagaggcagacgatctcataccactgctcaaaactatcagtgtgggccaggcatagtggctcacacctgtaatctcagcactttggaaggctgaggcaggaggatgccttgaggccaggagttccagaccagcctgagcaacataggggagacccccatctctatttaaaaaattaaaaataaacgtggctacagcagcaacagggaccaattcataaaggatctgtgggccgtggtgaggagcctggactttgtctccagggctcctggggagccatcaagggttttgtttgtttgtttgttttttgagatggagtctcactctgtcactctggctggagtgcagtgatgcaatttcagctcactgcaacctccgactcccaggttcaagcaattctcctgcctcagcctcccaaatagctgggattacaggtgcacaccaccacgcacagctaatttttgtatttttagtaaagatggggttgcaccgtgttggtcaggctggtcttgaactcctgacctcaggtgatccgcctgccttggccacccaaagtgctgggattataggagtgagccaccgtgcctggcccccatcaaggggttttaagcagggaaagggatttggattttaggaagatctcattgcaggggatgaatacatgcatgtaaacaggtaattccacaaataatcacaatgttgatggacacagaatgtgtaagaagaggtccctgacccaattccatctggacactgcaccccagatggtatgtgagaggctttagaggccagatgggggaggaaggaaagcagttctctttcatagctccctctcctagtccctagatgcttccttcatttccacaagaaattcttgcattcagcaaatatttatagaccacttcctgtgtgccaggcactgctttagatacaatggtgaatgaataaggcagacaaaaattcttcctttatgataattcttttctgttgagggaggcaaaaagaggtaaacataatgtaaaagaacagatatagccgggcacggtggctcacgcctgtaatcccagcactttggaaggccaaggcgggcagatcacctgaggtcaaaagttcaagaccagcctgaccaacatggacaaaccgcatctctactaaaaatacaaaattagccaggtgtggtggcgcatgcctgtaatcccagctactggggaggctgaggcagaagaatcgctctagctcgggaggtggaggttgcagtgagccaagatcacaccactgcactccagcctgggcaacaagagcaaaactctgtctgaaaaaaaaaaaaaaaaaaagccaaattggccaggtagggcagctcacgcctgtaatcccagcattttgggaggccgaggtgggcagatcacctgaggtcaggagttcaagaccaacctgaccaacatggtgaaatcccatctctaccaaaaataccaaaattagccgggagtggtggcgtgcgcttgtaatcgcacctactcgggaggctgaggcaggagaatcgcttgaaccgagtagacgcaggttgcagtgagccaagttcgtgccactgcactccagcctgggcgacagagtgagactccgtctctctctctatatatatattttaagggtagggatttttgtgttttgtgcagcgtgctttctcaacccgtaaagtgcctgatggctggatacggtgggtcacgccggtaatcctaacgctttggaaggccgaggcgggaggatcgcttagagaccaggagttcgagtccagcctgggtaacacagcaagaccccatctctataaaatgcatatatatatccaggagtagcggtgcgcatctgtaatcccagctactcgggaggatgaggcgggagaatcgcttgaacccaggaggcggaggttgcagtgagctgagatcgcgctactgcactccagcctgggccatagagtaagaccctgtctcaaaaatttaaaaaaaagaaaaaaaaaatttaaagaaaagaaatacctgacacagaaaaagcgttcaataaatatttcttgcatgaataaaagtactttcgctgggacatttttctccacacctaccctccagccagccccgggatctataacactctctccgagtgaagacacagaggtgatgagatcgggtaacccacgggcgcccgagccccagccgcgcaagctcacgattgggccagaagtgaggatgaacaagcatttagcccaatagaaagtcgtagttctcttgctgggcgtggcttgaatgacttcagtggcctcctcctgggagggagctgaagccgctcgcaagactcccgtagtccccacctctctcagcttccggctggtagtagttccgcttcctgtccgactgtggtgtctttgctgagggtcacattgagctgcaggttgaatccggggtgcctttaggtgagtgtggagggttctgtaacctgggaccccagtctagcgggctgaggagccggaccccagcttccctgagaacgggttgaggcttccggctggcggcgtccggcctccctggaccccggggccctgttctgttcatcgtaagagctaacaatgatacggttcttccttgatgccaggcaacatcccaaacaactttaattaatttatttaactctcccaccagccctatgagatagggcctgcgattatccccttttgtcagtaaacaggctcagagataccaagcgacctagctgaacctacacagcgaccaggatttggcccaggagtttgtcctccagggctcttcatggctaattcacaggcgtggcctctcgcggcttgcctgggccgcagcctggctcccgggtgtccagtccatcctcccttttggacgttggaggggccgcagcgtcatctccgatgcaccctcatcctcagataccgggtagagatctcgccggtaacgatccttcctactgcgtctgtgccccagcagctggtgttttacaccccacttccccaccgaaagactgttttagtgctccagacccccaccaccaccttgcgtcgcttgaatttgacactgctctgcaagtctctgtatagccccacgactcctaggattccctggaatatagatacttttctctcaggctcccgacgaacactgtcacttcttcagagacattatattaaaggtgtttaaccctgggtccgcagagttggtagaattcaaggaatgctagtacttgaattggggtggggggtggaattgcatctgtgtttttactaaccttttgaggcagcaacctcggtagtactagcagcagcggtgattttgttagcaatgaaaatcatagacattccttttttttgtttttctccttttttgagacagggtcactgtgtcacccaggctggcgtgcagtggagaaatcttggctcactgcaacctctgcttccctgtgcaagcgatcctgcctcagtagctgggaccacaggcacgcgccaccacacctggctaattttaatttttttttttttttttgagacaagatcttgctgtatcgcccaggctggagtacaatggcacaatctcggctcactgcaacctccgcctcttgggttcaagtgattctcctgccccagcctccctggtagctgggattacaggtgcacgccaccatgcccagctaattttttgtatttttagtagagatggggtttcaccatattggccaagctggtcttgaactcctgacctcaggtgatccacccacctcggcttcccaaagtgctgggattacaggcgtgagccacctcttccggccaattttaatattttttttgtagagatgagatggggtttcaccatgttgcccaggctggtcttgaactcctgggctcaagcgatcctcccacctcagcattccaaagtgctgggattacaggtgtgaaccattgtgctccacccaaaatcacaggtattcttataccacattataacagcaaatgtcacaaaatactatattcattcatgattacttcaaaattgtatttttttttttttttgagacagtgtttttgctctgttgcccaggttggagtgcactggcacaatctcggctcactacaacctccgcctcctgggtttaagcgattcttttgcctcaacatccagagtagctgggattataggcacctgccaccacacccagctgatttttatatttttagtagagccagggtttcaccatgttggccaggctggtcttgaactcctgacctcaggtgatccacccccctggcctcccaaagtgctaggattacaggcgtgagccaccgcacccggcgaaaattgtattccttaatgaatcctcagctggatataactgcttttctttgtgatgctgtgcaggtttttttcacttcatgtactcatggagcctatgcaatttttaaatacatttaaacatattcaggccgggtttggtgtctccgttctgtaatctcaacattttgggaggccaagccgggcagatcatttgaggtcagaagttggagagcagtctgaccaacatggtaaaaccttgtctaaaatacaaaaaaattagcagggcatggtggcaggcgcctgtaatctcagctgttcgggaggctgaggcaacagaattgcttgaatcttggaggcggagtttgcagtgagcctaggtcgtaccagtgagcctgggtgacagagcaagactctgtcttaaaaaaagaaaaaaaaaaacattcagcgagaggtttctgggattcatcagactgctgaggagtttgtggcaccaaaaagattaagaatctttgcagtgtagattatgccaacaacggaggcagcccaccagttatttttatgccgtttaaccgtaggaagtcacttagacaccctgttccttc

SEQ ID NO: 97766 - DNA, 16860 bp, Homo sapiens
gggaacagtgtgggaatggaggcagcccaccggaagacctggttcctccggctagagtgagtgagtgagtgtgtgtgtgtgtgtgtgcgcgcgcgcgggcgcgccgcccttgttgagagactaaggaagtagtttgccctctcttaacctctgttggccgctctgtaaactgcgggcacactctggccttctcaggtggtggtgaggcttccctgagctctcgcctgcgaagtggtcagcacgtccccggcaaggttccaagtgtccttgttttgtgcatcacagggagggcaaagctcacctcacgcgaagcgccatgaacatcacttttacatggaagcccagcacccctgggttctccctaagcccctcctaagcccgcccacttcccgccactttcaggctgcagcctccgatggccctcgtttctgctctttctaccgcgtgatagcggcgcgaagcccacccagccctgggggcggaggcccggtctccccgccatggcagtaaaccccactctgccagcacactggcgggtgtggagggagggagagcggctgatcccctggtccctagatggtgcacacgccaggaagggcggtagggatacggcacaggtgtgagggtgcagacgctccccactaccctttccacccctcccccgcgccctccgctgcctccctcacccgggcacggctgtcgcagcaactggacaacggtgacattggtgaggacgatgtcgcgcttcgacatggcctcttataaggttatcattggcctggacctgctgtgatgttaccgaggtgcgtgcggagcgccagggctgtgggtcctgggctaattgccctgatgtcacagcacccagtgacgtcacagtacccagtgacgtcgccgaggggcggcgcccaagccagaggcctgacaccatcgcatcccatccccgtagaggcatgggacgtcagcacgctatgcatcaccgttccacggccacgcactgccgtctggaatggaatcccactttttaaaattatcatttgtttatttattttgagacggggtgtcactctttctcctaggctggagtgcagtggtgcaatcatggctcactgcagccttgaactcctgggctcaagcgatcctcccgcctcggcctcctgagtagctgggactacatgtgcagccaccactgcaggctatttttactttttatttttttgtagagagagggtctcactcttttgctcaggctggtctagaacccttgggctcaagcgatcctcccacctcggccttccaaaatgctgggattacaggagcgagccaccacacccagcctggaatcccaccttttacactgttcctgaaagccctttcctcttctctgtctcttgaagcacacaggttccatgctgtcccttggattctccagtggagtgactcttgctgcctccgtatgcctggaaggcccacccagggcttcccttggctgcctcttggtttcccaccctttaagagaggctttctacactctgcatctaagttccctcctttctctgtcactgtcagccgtcacccccttcccaatttctgcccatcttccaggaagccttgtctgacttctccattctgagttatgcttcagtgtgcaaaatttctctagggctacactgtctatgtttttattttccttagagcacatgtctctctaaaaattgtttgttttcttgccaactgtctctgtccaccagactgtaagctctgagaggacagggacgtcatctatgtcacttctgtatcccattgacaagaaaagtgtttggcacctgaaaggtgtttgtgggctggacgcagtggctcatgcctgtaatcccaacactttgggaggctgaggtgggaggatcatttgagtccaggagtttgagaccaacatgggcaatgtggcaaaaccctgtatctacaaaaaataaaaaaagtagccaggtgtggtggtgcatgcctgttgtcccaattattagggaggctgaggtgggaggatcacttgagcctaggaggtcaaggctgcagtgagctgtgattgtgtcactgcactccagctgggagacagagcaagaccctgtctgaaaaaggcgttagcccaataaactatacctgaatgaataaatgtcaattcctcaggtttcatctgatcgctaatcttttcttttcttttcttttttttgagacagagtttcgctcttgttgcctaggctggagtgcaatggtgcgatctcagctcaccgcaacctccgcctcctgggttcaagtgattctcccgcctcagcctcctgagtagctgggactacaggcgtgcgccactacacctagctaattttttttttgtttttgtatttttagtagagacggggtttcaccatgttggccaggctgatctcaaactcctgacctcaggtgatccatctgcctcggcctcccaaagtggtgggattacaggcgtgaaccacctcgcccggccctgatcgccaatcttatcaaactcttcacgttatatcttctcgcagcacccattcttttccttgtagcttttcatgtagtttgtcatgatctactgattggtttatttgttcgatgtctcccccttgggctctaagcccctcacagggctcctgttcttgtttgtttgttcacgactgtgcctccagcacttagaacaatacaaagcaggttttcaatgaacgtctgacaaagaacaagtggacaaacagctccctcccctgcagccccggggtaggggtttgcttgcacctcagtgactcacaggcaggcaccatcacctgcacagcaggttgacacgcagctgtgaccaaggttcagggggagtgggggtttgtgccaggaaggagtcaccatcccagagagggatggatgcaagaaggggcagaatgacataacctcttccttccgccaacatccatgagaaattcatttgccaagcacctgccatgggaccagggcagggtgaggctctcctgctttgatggcctgggagaagaaagtaaactaagtgtacaggtgaggaggttttaacgaaccgagaccaaaacacagatgattaattaaacaaagggagctacattttggtgtacaatcaaggaggtgaaaaatataacctcaacaaaaccaggattcaaaaggggctgattttggctgggtgcagtggctcacacatgtaatcccagcactttgggaggccgaggcaggtagaccacctgaggtcaggagtttgagaccagcctggccaacatggtgaaactccatctctactaaaaatacaaaaattagccaggtgtagtggcatgcatctgtaatcctagctactcgggaggctgaggcaggcgaatcacttgaacctgggaggcggaggttgcagtgagccgagattgccactgcactccaacctgggcaacagagtgatacttcataaaaaaaataaataaaataaagaaaggacaactccaggccattctcagttatggagccagatgctgaagtcctgaatcgaatcgtgccacatgggaatagagagacagaggagagggactgaggctggcagaagatgaaaggatggggtggagagggatagagaagatggaacacagttcaggccaggcacagtggctcacgcctgtaatccctgcccttggggaggccgaggtgggcggatcacctgaggtcaggggttcgagaccagcctggccaacatggtgaaaccccgtctctactgaaagtacaaaaattagctgggcatcatggcaggtgcccggctaatcccagctactcgggaggctgaggcagaagaatcacttgaacccgggaggcggaggttgcagtgagccgagatcatgccactgcatgccagcctgggggatagagtgagactctccctccaaaaacacaaaaagaagatggaacacagttcaaagtgggagaaatcccacctcttgatctctgggtgggttaggattctgacactcatcacccactcttctctgcccagccacctcctggtatgggaaactccatcatttcggccctggaccagggcagaaaaaccacacctgagtttgcccaggaatttggctttgtccctggagtgtgaaaccgggaaacagatttgatgagctcaagcttggagaggtggcacacttagtcaccctctataggcagagcccagagaaggcagaagcttctggatatctgtcctgggatgcctgtctttgggtggagtcaagtgtccaggagctggagaggaaccccgggtcctctgaggggagtgggccttggcgcctttgtttgagcaaagcctgaaaacacgtgcagattctcgccacacctgggcacccacacacatagctctgccacctccagctgctcacaccctgcacattgttcctgcctggccttcccaccagcaatcccacctccacccctctctcagtctctccccttggcaccaaaacccaaatatctttcacccctgcacctactgtacccacccactggctctcgttctggtcttagcctccctcccaactggcttctagatgcatctgctgccccaagcctgcccaccaccacctgcccttccttccgatgcccttttcatgcctgaggccagactctcagctgtttcccctccaacccgagccaatatgtcaacacttggggcttcaggttggggcttaggaggccccatgtcgggagggcaggaaggatgagggcctggccccagcccaggttctggctcacaggctcctgctgccctgggtcttcggcccctccccgtggctgcctcaaccggcttttcaggagacactgcgtcctgttccagctcgtggcaatcagccccctgcccttgcccaagggctgggaggcaggaggtctgggttctgcgacaggaatgggatcctgcctccaaaatctgcggcactccacaagggactctatgctgccctggcgacccaggcgcccttccctccagcaccctgtgagacccagactcgggctcggagtctctttccttggcctgttcgaatccatccatttgtccagtcaataaatatttactgaaccccaggcagtgttcaagaagctaggaatacagcagtgatcaacacgaccaatttacattgctagtaggtgagacaggcaataaaaaataaaggtaatttcagattttttttttctgtgaaaacaaaagggtgatactacagagtataattaatgccatgttatggtcaggagaggttttcttgcgaagttggcatttaagtcaagtacggatgaggaggagccagccacgtgaagatctgggttctgcattccaggcagagagaggagcatgtgcaaaggccctgcagcaggaatgagcttggtgtgtttgtggaacagggagaaggcctgtgtggctggaatggaatgagtgagggcaggggctggcccacaagaacgaggtctgatgactccttcatcccacctagtgttctcccctctccagacggtgcctcccatcattctagcccctcactgcctggggagctggaggcttagatgcctgagaggagtgaggtgttgaagaattgcctgcatcccagggatggagcgtggtggaaggtgggtttgcgagagaggaggcctggacagtgggtgaggaatgaaagaggaggtggttggaagggcagacacccatctctggggtggagggcaaggagcaaagatgccagagttcttctccatccatgactcaccctctcttcctcctcctctccattgctcaactccaaatctccctgggaaacacctccttgactgaagaccaactcagtgcctcacaggggtaattgagtcatgaggggtggagaagagggcgagagggagagaggataaatagcagcgtggcttccctggctcctctctgcatccttcccgaccttcccagcaatatgcatcttgcacgtctggtcrgctcctgctccctccttctgctactgggggccctgtctggatgggcrgccagcgatgaccccattgagaaggtcattgaagggatcaaccgagggctgagcaatgcagagagagaggtgggcaaggccctggatggcatcaacagtggaatcacgcatgccggaagggaagtggagaaggttttcaacggacttagcaacatggggagccacaccggcaaggagttggacaaaggcgtccaggggctcaaccacggcatggacaaggttgcccatgagatcaaccatggtattggacaagcaggaaaggaagcagagaagcttggccatggggtcaacaacgctgctggacaggttgggaaggaggcagacaaactgatccatcatggggtccatcacggggccaaccaggcgggaagtgaggcagggaagtttggccagggagtcgacaatgctgcagggcaggcyggaaatgaggctgggaggtttggcmagggagtccaccatgctgcagggcaggccggaaatgaggctgggagrtttggccagggrgyccaccatggtctcagtgagggctggaaggagacagagaagtttggccaggggatccaccatgctgccggtcaggttgggaaggaggcagagaagtttggccagggggcccaccatgctgcggggcaggccggaaatgaggcagggagatttggccagggggtccaccatggtctcagtgagggctggaaggagacagagaagtttggccagggggtccaccatactgctggtcaggttgggaaggaggcagagaagtttggccagggggcccaccatgctgcrgggcaggccggaaatgaggcagggagatttggccagggggcccaccatgctgcggggcaggccggaaatgaggctgggaggtttggccagggggtccaccatggtctcagtgagggctggaaggagacagagaagtttggccagggggtccaccatgctgccagtcagtttgggaaggaaacagagaagctcggccatggggtccaccatggggttaatgaggcctggaaggaagcagagaagtttggccagggtgtccaccatgctgcctcgcaggtggggaaggaggaagacagagtggtccaaggcctccatcatggcgttagtcaggctggaagggaggsggggcagtttggccacgacattcaccacacagcagggcaggctgggaaagagggagacatagcagttcatggtgtccaacctggggtccacgaggccgggaaggaggcagggcagtttggccagggagttcaccrtacccttgaacaggccgggaaggaagcagacaaagcggtccaagggttccacactggggtccaccaggctgggaaggaagcagagaaacttggccaaggggtcaaccatgctgctgaccaggctggaaaggaagtggagaagcttggccaaggtgcccaccatgctgctggccaggccgggaaggagctgcagaatgctcataatggggtcaaccaagccagcaaggaggccaaccagctgctgaatgtaggtgaacagggatggggagatgggggacaggggggttgggggagggaaaggttaaacccctgggacatttggcggggcgggggggtccgcgtagcctttgtttggtgaaagaagcttgggcagctatatcactgggttcctcccccttccccatctcccttacaaaggagctggtggcagctggtcagatggggtgagccaccttatctgcaaagcacgtatcagacagggtggcgggcaccctgtcccaccttcagggagctgccctcctggttaagggggcctcaagtggggcccatgaagcccttcctggggaatgggaaacagttcctgagatcaagatctagtatagtgcaaagggactgagtgttgacaaaacctggttaggagagtgagcatgaggaatagctttcggagatgagccttggcctgtgtaatctttgtaactaccctctgatgtggtcaagatgaggctgctgacgccctgattctcagataaggaaacaaaggctcagagaggttaggggacgtgccaaagtcctgtggctagtgcccagctttggcagagggcaggccagggttctcttcccctgcactgcccagccaggagaggttttctggaaggtttctcttacccatttatgtagggggaacagaggccaggttcagtggctcatgcctgttaaccccagcactttgggaggccgaggcaggtggatcacttgagctcaggagttcaagagcagcctggccaacatggtgaaaccctatctctactaaaaatacaaaaattagccaggtgtggtggctggcgcctctaatcccaactactcagaaggctgaggcaggagaatcccttgaacccgagaagcggagtttgcagtgagctgagattgcaccattgcactccagcctgggcaacagagtgagactctgtctcaaaaaaaataataataaaataaaatatgtagagggaacagagactggaggcaggcaaatagcaccactcacaacagaacaggcaccaagaagggagcgtggggagcaggagagggtggactcctgtgcgccctcactctccaggctccatgaggggtcctggatctgcaagatgtgactggctcagacgtcgaagtccagagccacatctgccgccagacagagccagggatgggtgggtggggaggaacggygcagcagaggagcgggcacggcaggctgcagggtgccgcgagcagaggacrgtgcactgtaggatttggggctggcaacagcagccggggttgggggcactgctggggtgcatggctgagtgtctggggctgggttaaggacaaggatcagyggagttagggatgcagctagacagggcatagaagggtagatttgaggtcagggctgaggttaaactaggtcctgatattgtttgtcacgggtcctctaccttccctttccaccagcccctcctccatgactgagagcacttcattaaggaaattaaaaggggctttggggaggaaaaggcagcaggaggcagaatgcccacgcgagcacgggctttgggttttcttctggacagtgaggaggcagtgggttaagctgtgcctcccaccgcagccccagtcaccctggaggggaccaggtccctggggaaaaggaactgggagacyctccgcgkttgtggggttgtaacaagagtctgggctttgtccacagggcaaccatcaaagcggatcttccagccatcaaggaggggccacaaccacgccgttagcctctggggtaagcgcggactctggggtaggggagaggaggmccctgggagttccctagcatggctgtgggtcagacgctggagactgaccttcttgtccttgaattgcaggcctcrgtcaacacgcctttcatcaaccttcccgccctgtggagggtgagtgccccatggtgtctcttttctgctctgcgtcctgatagatacgctcaccccgaccccttcccggtgtctgtttggacagctccccrggcgggcagacctgcagcctctgcaaagamcctccaacctgatacccagtcytgggcttccctctctccacctgctccctcccctttgcaccctgccctcatcttttgggtgcctttcatttccaccaaggcaaacacaagctggcagaaaagacctcccaggccctggtgcccctgggagccagggagggaggaggggctgctgactgttctcattccctctctctccttgtcattcctcgattcccatttgctgactggcttccctcctgtcccaaccctcctgcaaatgcctttgcttcatgctgggagggggagcctgtgtctttgtcctctccctggtgcaaggtcaccccagtgcagaggctcctatggaatcctggttcccagttggggctcaaagtaaactcctgactctctttctttattttaatttattgagacggagtctcactctatctcccaggctggagtgcagtggtgcaatctcagctcgctgcaacctccgtcttctgggttcaagtgattctcctatctcagtctcctgagtggctgggattacaggtgtgcgccaacatgcccagctaatttttgtatttttagtagagacaggggtttcaccatattggccaggctggtctcgaactcctgatctcaagtgatcccctccttcctcagcctcccaaagtgctgggattacaggcgtaagccactgcacccagcctctttttgcacttattgtatctgctgcccgagacctggtgcaggccagggtgagggtgtatcacggaggaggaaggcccacccttgtgtatcccaggctatgggggcggcagagcatcctctcaggctaaacacacgaggcttgttggttcctgcagaggccccagcccctctgcctgyggggactggcttccttgtgttcttaagtttagatgctaccttcctgaaacttccccagaacataactccggggccagagcagccagtccccttgtgcttctcccgaggggcggggctgaggtctcgggtcccgtcatgactgtggaccctacattcacccctgctctccttctctcttccagagcgtcgccaacatcatgccctaaactggcatccggccttgctgggagaataatgtcgccgttgtcacatcagctgacatgacctggaggggttgggggtgggggacaggtttctgaaatccctgaagggggttgtactgggatttgtgaataaacttgatacactatgctgtctcattgtggtcccctgggctccctaaggagggatggacagggaggcaggagggccttgtcttttcttgttactttgctgaaggagtcggagtgtctgaggcatagggtgggttgagctggagatttcaggctgattagctgtaagagggcgggtaatggggacaaaccacgctttgctggggtgcaaagttcgtgctggctactggcaggaggactcgtgcagggaaaaccactgcaggccactcgtggggacagacacaccgggagagaatggtctgggcccaggaggtagcatcctcagtcaagggggtggggggcgccaaaataataacaacaataacttgtatttattgtgcagttaagacctgccaggctgcctgccaggtgcgttacctgcatgacatcattgactcctcccaaccccccagttaggtgaaagggactgttattgccccattttatagagaagcacgtgggcgcttgcacacattaagaaacatgaccaagtttacacagtcagtaagtggaaggagagaaacagtgaagagctacaaaggatattctggaaaaacagaggtctttgccctttggcgtcagcagagaaggagaattggtgaataagaaaagtgagacacgggatggggctggggatcctctcaggggaaagagggagaaggatggaaggctcaggtggaagacatgctggtgacaggagccacctgagtaggggcacagaaggccccattttcagatctgtggaccattcaaagcccagaggaacaatgattacaattactgagcatagagcacttgctagactcaaggtaccgtgtccagagttgttcatattcttttttttttttttttttttttttttttttttttttttttgagacagaatcttgctctttcgcccaggccagagtgcagagatgcgatcatggctcactgctgcctcgacctcctgggctcaagaaatcctcccacctcagcctcttgagtagctggaattactacaggtacgcgccaccacacttggctcatcaaattttctttttctttcttttttttttttaagagatggggtctcactatattgcccaggctgttctcaaactcctgggctcaagggattctcccacctcagcctcttgagtagctggaactacaggcacacaccaccacacttggctaattaaaaattatttttttggccgggcacagtggctcatgcctgtaatcccagtactttgggaggccgaggctggcagatcatgaggtcaggagttcgagactagcctgaccaacatggtgaaaccctgtctctactaaaaataccaaaaaagaaattagctgggtgtggtggcgcgtgcctgtaatcccagctgctcaggaggttgaggcaggagaatcacttgaacctgggaagtggaggttacagtgagccgagattgcacctctgcactccagcctgggtgacagggtgagaccctgtctcaaaaaaaaattttttttttctttttttggtagagacagggcctcactatattgcccacgctgttctcaaactcctgggctcaagggattctcctgcctcggcctcccaaagtggtgggattacaggcatgagccacttcatctggcctgttcatgttctttaactctttaagtctcccacaacccaaaggcagaagccctgttatcgtcaccgttgtatggatgaggatgctgcggctcagtgggacaagggcgcccacagagaaagcagcaggcctgggtctggctccgtctgtcgccagcacctgacttctcgtggttcccggtgaagtctctgtaacactcccaggcactagcctgggtgctgggagacttgcgttccaatcgggagcaagatgcctgaaggccgcctacttcccctctaggggccacgatttcctcctgtataaagggaggcagggattcgacaactgttgcttccagctacaaaattccatcaatgggggactgaaaataatagacagtgttcttgcccttggggaattcacagccttcctgggaggcaaggcctataaacagaatgtgaatgcaaacacacaaagccacgcatcaataagagctcaatgaccggcaaggggaggggcctgcatttgtgcaaaaaatgggacgttcctcactttatagtcactgcattttcccttattttgtggaataccatcatttcattacatatgctccttccctccccctgcgatattttattttgaaaacatttcaagcatcatgaaaagatgaaagaattttatagtgaacaccagaattctcaccacttagattttaccatacttgcttggtcacacatctgtccatttagccccatatcaaacatttttgatgtatttcaaagtaaactgtaaacattatatttgctgcattttgtcttatttattttttgagacagagtcttggtctatcgttcaggctggagtgcagtggcacagtcatggctaactgcagcctcaatctcctgggctcaagcaatcctcccacctcagcctcccaagtagctgggactacaagcacacaccaccatgcctggctaattttgtaatttttttttgtagagacgagggtctcataatgttgcccaggctggtcttgaaatcctgagctcaagcaatcctcctgcctcaggctcccaaagtgctaggaatacaggtgtgagccacagcacccagctgcttgctgcactgatataaatagaaccttccattcatgtcagatactgattgagggtctgctccgtgctggacatcatctcacaggtattgggggaggccctacttaaaagaatcctatagtggcggctttcgaaaaggcaacattcaagggactctttctttcttgaagtaaaagctttcattgactttatttttatttaaaaaaatatacatatatgtgtgtgtatatatatacgtgtacatatatattgagacagagtcttgctttttcatccaggctggattgcagtggggtgatatcggctcactgcaacctctgcttcccaggctcaagcaattctcctgcctcagcctcccttacaggtgcgcgccaccacacccagctaatttttgtattttcagtagagacggggtttcaccatgttggccaggctggtctcgaactcctgacttcagttgattcgcccgccttggcctcccaaagtattgggattacaggcgtgagccactgcgcctggccatcacccggctgactgactattttttaggcacattttcttgctgggtttgcttggatgggggtcctgaaaataccaaagagatacaagataattgataggcactgagtcagtcctgggaagcttctgaaaaaggagagctttgagtcggttttgagggtaaaagaggcctggctctctcctgcctggaggtcttctgtgctgttccctctactaggaacactctccatgcccctcggcccctcatactggctcttccctaccctttgcatctcagctaccttgaccgctcaacctgagctacggccaccctgtcactctctctcatagccctgatcttgtttttcttgttggttatgacaatctgtaatcatattacaaatatcgtatccatttccccccagacaaagaggttcaagcagtgatgtcaaggccaggcatgaatgtctggcaaggagcagaagggaagccactgacttgagcaggttgggaagggccatggaacgagtgtgagcaagacacaggctgctttgcctgagatgggtggagccaggctagggagaaacacagagaggaagggccggtttctgaggatgttgaagaacagggagaggagtttgggtgtggctctcaccgggcatcttttacagggtctgtgctaagcacttacaggcatgattcatttcatccccacaaccatccgggaggcaagtaccatgatcattgccctcacagatgttgaagaagaggtgcacggaacggagcgtgttgcctgaggccaccctgctagtcagtggtgatggccaggctccagttcaagggcacttccctgctgaacatctctagcagtgaggtggcatgctgcccttgcgacccccaggaagcgggagggggctacatccaaatgagtgggtttttttttttttttttgacagagtcttgttctgttgcccaggctggagtgcagtggtgcgatcttggctcactgcaacctccgaaccccgggttcaggagattctcctgcctcagcctcctaagtagctgggattacaggcgcacaccacgcctggctaatttttgtatttttagtagccatgaggtttcaccatgttggccaggctggtctcgaactcctgactttaggtgatctgcctgccttggcctcccaaagtgctgggattacaggtgagagctaccctctcctggctccaaatgagtgttctttaaaagtaagtttctgcatctggcattttttttttaattgaggcagggtctcaccctgttgtccaggctggagtgcagtggcgtaatcatggctcactgcaaactcagcctcctggattcaagtgatccgtgtgcctcagcttcccaagtggctgggactatgggcacacgtcactacaccctggcaatttttgtattttttgtagagacagggtctcacgatgttgcccagcttggtcgggaactcttgggctcaagcaatcttccctccttggcctcccacggttttgggattacaggcatgagccatgcatctggcattttcaggatgtgtgcatgtgtgtgtcacaagattaaacaactgccaagaaagcattccagccacagcaatgtgaccagcactgccgagaacatatattgagtgcttctgagtggcagacacttctctaagcaatttacatgtattacttcacttaatcctcacattcacccctctttacagatgagaaaactgttgcacagatgggttaagatcatggttagtaagcggtggagctagggtttgaatgtaggctctgggataggcaccgtggaagaggtaagactgtaggtgccagtttgagatctgggaccccccagaagggagcagagacatcacccacccccaaagcctcatcttcccactagactgagtccagcctccaatctccctcctccctggtctctctactccacaacccccaacaatcagttccctaggggaactctgttagcacccgtggcagcccagaacccttggctggttctacctcattcagagtaaaaataaaagtcaaagttggccaggtgtggtggctgacgcctgtaatcccagcactttgggaggcctaggcgggtggatcacttgaggtcaggagttccagaccagcctagacaacatggtgaaaccccgtttctactaaaaatacaaaaattagccaggcgtggtggcaggcgcctataatcccagctactcgggaggctaaggcaggagaatcacttgtacgctggaggcggaggttgtggtgagccgagattgcgccattgaccttcagcctgagcgacagagcaagacccagtctcaaaaaaaaaaaaaaaaaaaaaaaaagccagtcttcataatagtccgcaagaccccaggatctttccctctttgactttagcttctcccatcccaacactgctccagccacaatggttctcaaatacagtaggcaggctcctgcctccaggcctttgcatggctgttccccctgcttggaatccactagccccagctaatccccatggctcactcttccactccctgcaggggtcagctcacaggccacatctcaaagagcctttcccgagtaccctatttaaaacacctctctgtcacctattgcctaacttcccccaccatgaatgtaagttctgcaaggagaatgctttttttgagacaaggtctcactctgtcacccagactggagtg

SEQ ID NO: 97767 - DNA, 22354 bp, Homo sapiens
aggcttcatgctgccccctgccacccagttcacccacactcactcaggagaatggtgatgtcaggtgctggcttcgcgtccccagacacacagttgaccacgtactcctgcccagctacccaggtgaccatggtgcctgcctctggggtcagcaggagcagcttgggaggaactggtgagagaagggtctggggtaagcttccagcactgagaaggacttgaagattggagttcggtacccagagtctgggagaggagaggctgggggcttggacttccgggttgcggggtaggggagggcttgaagcccagactcatgggtcctgggcgtctctcacccatacccaggatggagaggatcactctgggagacacgagctcgggccccatctcagagcggccgacctggcactcatactccgcgtcatcgctgaggtcacaggcctcgatgtgcaggtggaattcacctgcagggggagccggaagtcagggccgcagcttccgctggtggctgagggtctcaggctctgatcccttacctctagcagggtccccttccaggcggtacctcgggaagcctgggatcctggggtcggggcccaggagcagcccatctttggcccattgcaccgcactgccaggggtgctgaccccacaacgcagctccactgaggccccctccaccaccgtcaggttttcaggcagggcccagaagccccggggaacggaggcaggaatcgccaactgcgccaggcctgaggacacagcgcggtgcaaggaaagggcagagggtttgtctagggaaggtaagtgggaaatgggggccacttggcgctgggtacaaggctgggatcccactcaccttcagtcagcagccccaggagcaggagagaagccctgagcgtcgtccccagggccatcacaggtccccctactgtgacccccacagcgcccgctgccagccacctgcgtctgtctggctttctctgggtccctctctgtgtgtctctgccacctgcttttcttttttatctctttccgttactctcctccctttctcgttttcctcttcccctcttccctgtgagtatctctctctgtcttgctctcagtctcaatctctgagtctctttctctgtctctttaaaaaaacttttttttcttttttcttttttttttcttttttttttttttagagacggggtctcactatgttggccaggttgatctcagactctttccttcaagccatcctcccaccttggcctccccaagtgttgggattacaggcgtgagccactgcgcccagtctctttatctttccatctttctctccttgtctaagccgttctctctccttttgtctctgtctcttcctctctctctgtctctctctctctctctctctcaatctctatcttctctcctgccacccctcactcctgctccttgtctcactactcacagcctttcaagaaggacctgcagcccagagtccagcaggccaggagcctaggagagcgatgaggctgatgcaggcactggcagagtcagccctgctctctgacccagcttgagctcattctcacagtgcaacctcccccaggtaccttccagagcccccagctctggcctctgcccagcaggctcctcccagctggcccagctggagcataaaatcccctgtcagcacatgccaggcgcgttcctcggtgcctccccagcctccgtgaccccagggcctggcttaggctgggaagatgggagaagtcagatcaaggtggtctcccagctcagcaggggagcagccagctgggcccccagctcttccttgccctgatacatgaccttggcaagtctctttctttctttctttcttttcttgagatagtcttgctctgttgctcaggctggagtgcagtggcatctcggctcactgcaacttccacctcccatggcttgaacctcccaggttcaagtaattctcccacctctgtctcccaagtagctggtgctacaggtatatagcaccatgcctggctaatttttgtatttttactagagacggggtttcatcatgttggccacgctggtctcgaactcctgacctcaggtgatccatctgcctcagcctcccaaaatgctgggattacagacatgagccaccgcacctggcctcccttccttttttagtagacatcagtgcctaaatgatgtcagggatctctgctggggaggatgcaagagtgagtgtgacaggctgggagagtgtgggagagagggaagatatgcatgtgtgtacgtgggtgtgagagtggggaaggttagagtgaactgcgatctgtaataagcatgtggagagcgtgtgtgtgacagtgtcttacgtgggagtgcacagggtgtgggcgggagtaaaaggcagagtccaattccaccggcccccagtgtgggtgcagtgtgagcccaaagtgggcgccctttggcaaggactgcatgagctttcttctccctctttttcttgccctctctcccatctcttctttccttctccatgtctctctctctccctccctctatctatcttgatttatctttctttcttttgagatggaatcttgctctgttgcccaggctggagggcagtggcatgatcttggttcattgcagcctcaacttcctgggctcaggtgatcctcctgcctcagcctcctgaatagctgggactacaggtgcacaccaccactccagctaattttttaaaatttgtttgtagagacagggtctttctctattgcccaggctggagtgcagtggtgtgatcatggctcattgaagcctcaaacctcctaggctcaagtgttctttctgcctcagcctcctgagtagctgggactacaggcccgcatcaccactctggctatttttttttttttttttttttttttgagagggagtcttgctctgtcacccaggctggagtgcaatggtgcgatgttggctcactgtaacctccgcctcccaggtccaagcgattctcctgcctcagcctcctgagtagctgggaatacaggcattgaccaccacacccagctaatttttgtatttttagtagagacggggtttcgccatgttggccaggcaggtctcgaactcctgacctcaggtaacccacctgccttggccccccaaagtgctgggattacaggtgggagccgctgcaccccgccacttggctaattttttttaaatgtttttgcagagacagagtcttgctatattgcccaggcttgtctggaactcctgggctcaagcaatcctcccatctcggcctcccaaagtactaggattacaggcatgagccaccgcacctggcccttgatttatctttcttttttttcttttttctcttttttctttttttgagatggagtttcactcttgttgcccagactggagtgtaatagtgtgatctcggctcactgcaacctctgcctcccgggttcaggcgattctcctgcctcagcctccctagtagctgggattacaggcatgcgccaccacgcctggctaattttttgtatttttagtaaagacggggtttctccatgttgatcaggctggtctcgaactcctgacctcaggtgatcagcctgactcggcctcccaaagtgctgggattgcaggcgtgagtcattgtgcccagctgatttatctttctatctttctccatctgtttgagactctctcgctctctatattaagttgttaaatctcagtcaatctttatttcactgtgtctctccatctctatatgtctctgttattctgtttctctgtctctgttctcacctctgtcgctcccctcaccccacagtctgtctcacacacaccaggagctccataaatatttgttctcagccacactctgaccacgcctctttctcttatgtgtctctccatctccgagtggctctgctcatcacatccctggattttataaccatatgctggtgggcctgccctccccgcgtgcacatacacttgcctgggataagcttcttctgcctgcttatctcctgcgggaattggaaatgctagttttctccctacctccccaagacccccgccaatatcgttcccaggaacaagatgaggcatctggcctcagcccccagcttcatcctcgatgctggacttccatcttccctcacatgcttgactccttgccctcctcccacctcccctctcccaactgctctctacaccccctgggaaatgggctggatgccgagctgggggagtggctctgtcctgggggccctcgccagatggtgtccctaggtgccagagcgtggagctgtcccttgctggggcctttaataagcacaaaccttccaccctccaccttggctgttttccttctctgcatgctcctgggaccttgggctctccatctttccatgtccgtagccccagagagccaggaaggggaagcggcgtcaagtgcctggaaaaacagccccatgacttgagttcctccctaagactcaggagttccagccccatgtccatcctatttcaaaatccaggcactagataagccacacagaagccgggagtgtaggcccccagatccctcccctctcagaccctggggtctcagtcccttctctccaaggactcgggaatttgggcctctgatcctcctggccacactacccacccctgcacctccccatacacacacacacacacacacacacacacacacacacacacacacacacacacacacatacacacaggacttaggacagatgttcacggtctgatttccaaatcctcctgggcctgtgtgggggtggggagagattggcagatagatccaccgactcttaagacttaagaccagatattctgacccctgtcaccctcttccaagtgcaccatgcacttgagtgcaccttgagtctccagcctctcaaggaaccgggagatcaggccatcagcgtctcagccagcaaaggcctgaaccaccagtcccttataaccctgtaagtccaacccccactcccaaccccactcccccatttagggacacggagtctgagcctaagaacagtggagaatctgaatgtggaccctccagttcttacaggtccaggaatgtcagatcagggtcccagccccccagccctccttcaggctgctcggggtccctcccacctgctcggccagctgcgcagcgtgggaacgccccagctgggctgcatggagccgtcaggacaagctgcgcggttcccagcctccctgcctgccccggcccggcaccgccgcctcccagccgtcgccgggcaaccaggccgaggggcccggccggccgagtggggagaggggttgggctgggactgcggggtcctgggaaaggaggggccgagggcctggattcctgggtcttaggacgtgctgtagtttgcagcaataacaagggaacagagggatattttgaggaggggttttgaggctgggggagtcgaggtaggggtcccaactgtcccccaggtatcggtgtgccctcttcccgacacgcaggcccgggggagccccggaccccgcatcccccagggcgcggaaactggcgaggccccaggagctcccatttatagctcagtttccactgagcgcagtccctctaggacctgggctgagcaagtttcttccactctctcccttccctcctcctcaccccttgcctgcccctcaaccccggcagggcgcaggtgtccaacccagccgggaccccctccctcctcgaacccaggtgttccggctcccagaccccaattgagctgggggcgcccacccgccgggggatcccgccctgcgtcccccattcatccgcgtctcagccgcgggagtttctcaacgggaagagggcggagctcccggggggcggacccgggcggggcgagcgggatcgggccctcttggggtctcccagagacccaggccgcggaactggcaggcgtttcagagcgtcagaggctgcggatgagcagacttggaggactccaggccagagactaggctgggcgaagagtcgagcgtgaagggggctccgggccagggtgacaggaggcgtgcttgagaggaagaagttgacgggaaggccagtgcgacggcaaatctcgtgaaccttgggggacgaatgctcaggatgcgggtccccgccctcctcgtcctcctcttctgcttcagagggagmgcaggtaccgcacgaggggagcggaggaatatggggtgggggtggggagttgcttgcgggctgcctcttcactagcgagaagggagctgggggctgggactcctgggtcctgaatgaggrggcccctgaaggtgctaagctcagccctgctgccccgaactctcctaggcccgtcgccccatttcctgcaacagccagaggacctggtggtgctgctgggggaggaagcccggctgccgtgtgctctgggcgcctactgggggctagttcagtggactaagagtgggctrgccctagggggccaaagggacctaccaggtaagagtgttctctccacgctgggacgggctggctagggggagagttgctgggctcggctstacctgcagtttctattttgacattttcaagtttgggaaattgatgggctcgggtaaacatttaggagtcctgatttttgagctgcttctttgggggtgacccacggagtttgggaattattatgttattgsaaaatagtacataggccaggtgcagtggctcacrcctgtaatcccaacgctttgggaggttgaggccagaggatcgcttgaaaccaggagtttgagaccagcctgggcaacataacaagaccttatctctacacaaatgtatatatatattttaaacaaattagccgggtatggtggtgtgcatctatagtcccagttactcaggaggcttaggtggtaggattgcttgagcctaggagttcaaggctgcagtgagccatgatcaagccactgcacttcaggcaatggtgagaccctgtctcaaaaaaaaaaaaaaaagagaacataaatgcaaaaaagtacagtaaatataaatggaagatttaccaaataaaatagacacacacagccaatacccaagtccattgctagctccccagaagaccccgtgttcctttcccctatcatagccccctccccctcactccagaagtagtatctaacctaatttttatggcaatcattttcttgctttccttcctgactttattacccctaagtttgcagtgactctgggttgggagggagttagagtctctctgggcccagtacacactttttaatagtgtcttaccaccaaatgtgtgggccagttttctggtggaggatgtctggggatggaggcctgaggccaggatttcagaaccatggtgtgctgactgccttctccctgactccagggtggtcccggtactggatatcagggaatgcagccaatggccagcatgacctccacattaggcccgtggagctagaggatgaagcatcatatgaatgtcaggctacacaagcaggcctccgctccagaccagcccaactgcacgtgctgggtaaggacctcgcccacttgtcccctgggagcccaagagggcagcccgtactagctgtgagtagcagagcccagggagcccaggggcatggtcaattggagctgagaagatcaggatccatctctgaccccaaatccaccttgcagtccccccagaagccccccaggtgctgggcggcccctctgtgtctctggttgctggagttcctgcgaacctgacatgtcggagccgtggggatgcccgccctacccctgaattgctgtggttccgagatggsgtcctgttggatggarccaccttccatcaggtcaggtccaaattcctgtgctagcctttgcccattgagggaaacttgggttacactctgaccacaggctcatccagaagagaagaagacatgggagggcagaggttcatgggtttggactcttgaaatatgatgcagggtaaagattctagggccagactacctgggttcaaattatgtctcagccacttgctagttgattgatcttgagtaagttagttaacctctctgtgcctcagttgccttatctatacaatcaggataatagtagcatgcatgtcatagggtattgtgagaattaaataaataaatacctataaatgcccagaagagtgaccaatacatagtgagcactatataagtaaggcaagcttgtccaacctgcggcccatgggctgcatgcagcccaggatggctttgaatgtggcccaccacaaattcataaactttcttaaaacattatgagacttttttgtaattttttagctcatcagctatcattagtgttagtatgtgtggcctaagacaattcttcttccaatgtggcccaggaaagccaaaagattggacacccctgatgggtagatggcattattattcttatccttccctccagaccctgctgaaggaagggacccctgggtcagtggagagcaccttaaccctgacccctttcagccatgatgatggagccacctttgtctgccrggcccggagccaggccctgcccacaggaagagacacagctatcacactgagcctgcagtgtgagtgcagctggccctgggaaagaggggtgtggggccctgactcctgggtatgaggaaggaggggactgtggcccttggggaatgaggaaactggagcctggactcctggatctaagatagcaggagagggctgggtatggtagctcacgcctgtactcacagaactttgggaggtcgaggcaggcggatcatctaagatcaggagttcgagaccagtctggctaacatgtcgaaaccccgtctctactaaaaatacaaaaatttgccgggcgtggtagcacacacttgtaattccagctacctgggaggctgaggcaggagaatcacttgtacccgggaggcagatgttgcggtgagccgagatcatgccactcagcagcagagtgagactccgagcaggagaggacagacagctggggtccctggggaaagagaaagctgggccttgactctcacatcggggagastaggagagggcagaaggctggcacattgaggtaactggggaaattgggaactgaaagcccagactcctggctcaaarggagaaggggattaggggcccagactcctgggatggaggaaccagggactggacacctaggccagtgacggaggtgttcctggtccttgcccatctgaccattgtcccaccctcacagaccccccagaggtgactctgtctgcttcgccacacactgtgcaggagggagagaaggtcattttcctgtgccaggccacagcccagcctcctgtcacaggctacaggtgaggacgaagacccacctctccccagccccaagagtgagcttgggaagggctgggacctgagtaggtgtgccagagaggccaggacaacgttaacagcgccaccatttcctcaggtgggcaaaagggggctctccggtgctcggggcccgcgggccaaggttagaggtcgtggcagacgcctcgttcctgactgagcccgtgtcctgcgaggtcagcaacgccgtgggtagcgccaaccgcagtactgcgctggatgtgctgtgtgagctggggccggcctgtgggtgtggtcaaaggtggcmgtggctttcagggctgttgagggtcggggcctggaggggcggggccgggagagcgagcgtggggtattaggaggaggagagtgtggagctggggcatattcttgcgccctagagggtgtggtgtttctgtggggctggctgatcccaggtcagtggctrcattccgccccggccatgtgacccctagtctctttcgtccagttgggccgattctgcaggcaaagccggagcccgtgtccgtggacgtgggggaagacgcttccttcagctgcgcctggcgcgggaacccgcttccacgggtaacctggacccgccgcggtggcgckcaggtacagccctaaatctgaggcggtggctggagggggaccaggcttccttacaaatccggcttctgacgccccttccctgtcgcagrtgctgggctctggagccacactgcgtcttccgtcggtggggcccgaggacgcaggcgactatgtgtgcagagctgaggctgggctatcgggcctgcggggcggcgccgcggaggctcggctgactgtgaacggtgagaaggcggggcttcctaggggacctggcccgtcctgggatagggagcggacagagggggcaagggctaatgcagtgggagtggcctggaaggagctttacacccagcgggggctggagaccggacctattgaaggcgaggcttttaggagaatcggagtttggaggcggcgtggcctgattgattgaggttagcggagagtgcgctggacagacccggctttgttacagcctttggggagggcaagacctctcctctgagtgacctacagtctccatcccagctcccccagtagtgaccgccctgcactctgcgcctgccttcctgaggggccctgctcgcctccagtgtctggttttcgcctctcccgccccagatgccgtggtaaggaaatgtcactcctcccgtgacccatccagccgtgatcyctgacctcccacctggccccccgaaactactgtgaccatttctgacttcccagacatccctcctgcttcttcctcccctcctcagtctcctccgtgtcctccctcttttgtgcccccaggtctggtcttgggatgagggcttcctggaggcggggtcgcagggccggttcctggtggagacattccctgccccagagagccgcgggggactgggtccgggcctgatctctgtgctacacatttcggggacccaggagtctgactttagcaggagctttaactgcagtgcccgraaccggctgggcgagggaggtgcccaggccagcctgggccgtagaggtgagaccccagcccgaagaccccaaatctggagagtctaaaccccacaaacgcagggatcccccagccgagggctgcaaaacctcataccctcaaatgcagaggagacctccaaacctcgggagtctcaaaactgtgggctcattgattcccaagacacccctcaaccacaaatgccttcacattctgaatcctaaactgagagactcctcacacctaggggccccaaaaagggaaactccaatgattgcaaagcaaattgcaaagtaaaggacmcctcaaattctaagactccctaaagccagggagtttaaactcactctcaaacttggggaaccccaaattcaagggcctttgaatcttcaaatgtgcgaccttttgaacccaggaatcccaaactcaatccctgagcccccgcttcctggttccccctcagccttctcaggatgtcccctctgctccctgcagacttgctgcccactgtgcggatagtggccggagtggccgctgccaccacaactctccttatggtcatcactggggtggccctctgctgctggcgccacagcaagggttagtgcctgagccccgccccggctcccgaggccccagccccacacgcgccctgcctgcccagtgacctgacctggccttgggccttggctccagtcccatttccagctctgcacagggcttagctctccttcacgttctggttccctccttaagccctaactaggccttcccagggtcacactcctcggtgggaatgattcttattggtttccaacagccctacccaatcagcctcattggttcccagtcctctctcttcccgcttattggtctgcacacattgtgaccccgcccatcgcttaactccaccggtcgctgtttgtcagcctcagcctctttctccgagcaaaagaacctgatgcgaatccctggcagcarcgacggctccagttcacgaggtcctgaagaagaggagacaggcagccgcgaggaccgggtaggatgccagggtccccagacctgactgtgcctccagacctaaataatagcccagtcccaagagggtccccaaattcaaataggactctaaggccaggcatggtgcctgacgttggtaataccactttgggaggtggagacacaaggatcacttaaggccaggaattcaaagccagcctggacagcatagcaggaccccatctctacaaaaatacaaactaaaataaaataaaaaatgaaccgggtatggtggcatacacctatagtcccagctactcaggacactgaggtgggaggatcccttgagcacaggaggtaaaggctgcagtgagctatgattgcaccatgcactccagcctgggctacagagcaagaccctgtctccattttttttttttttttttatgtaggagggctctagtctttttttttttggcagaatttcactctgtcacccaggctggagtacagtgctgcgatctcggctcactgcaacctctgcctccctggttcaagtgattctcttgcctcagcctcctgagtagctgcgattacaggcgcccaccaccacgcctgactgattttgtatttttagtagagattgggtttcaccatgttggccaggctggtctcaaactcctgacctcaggtgatccacccgcctcracctcccaaagtgctaggattacaggcatgagcctccacgcccggcctgagggctcaagtctttttttttctttctttcttttttttgagacggagtcttggtctgtagcccaggctggagtgcagtggcgcgaactcgactcactgcaagctccacctcccgggttcacaccattctcctgcctcagcctccagagtagctgggactacaggcacccgccaccatgtccagctaatttttttgtatttttagtagagacgaggtgtataccgtgttagccaggatggtctggatctcctgacctcgtgatccgctcgtctcggcctcccaaagtgctgggattacaggcgtgagccaccgcgcccggccaagggctctagtcttaacagtgaccccacacccaaatgtcacccaagtccatgcccctgacccaattattccctaggcccagtatgtccccacagcccgtttttgttgttgttgttgttgttgttgttgttgtttttgagatagagtcttgctctgtcgtccaagctggaatgcagtggtgcaatccagactcactgcaccctccacctcccagttcaagtgattctcgttccttagcctcctgagtagctgaaattacaggtgcctgccaccatgcctgcctattttttgcatttttagtagagacagagtttcggcatgttagccaggctggtctcaaacttctggcctcaagtgatactcctgctgcggcctcccaamgtgctgggattacatgcatgagccacygtgctggcttcttacagcccttttattgtcctgagtgcagtccccagctcttgggtgctcttactccctcctgcctggcctccactggctggctgaaggtccttggggtctggcattggggcggggggatcctctgactattccctctcactaagttccctaccccagggccccattgtgcacactgaccacagtgatctggttctggaggagraagggactctggagaccaaggtgagtgttgagaggggtggggctcccttcactgttgggagaggcrgggctcccttcattgtgtttccgtctctctcccacgcctgtcccctcctttttccttctgttgtcctcagagttgggactcagctcccyaccccactcctcctgcccyctgggccatctcactcagctcccagcctcagtttgcctgtctgcagactcttcccacacatctgtcccagccctagcctccatctggagccccagaccagggctcaccctgcctgtgctctcctcatcayggtcaagccccctttcagccaccaggtcctacactggccccacatctccccagactggttcttcctctggggtcctacctcaggacagccacattgactccaggccatccccaggccagagcacttctctctctctctctctcctgygtacctagcacatgccattctctctcttcttttttttttttttttttttttgagacggagtctcattctgttgcccaggctggagtgcagtggtgcaatctcagctcactgcaacctctgcctcctgggttcaagccattctcctgcctcaggctccctaatagctggctaatttttcttgtatttttagtagagatggagtttcaccatgttggccaggctgatctggaactcctgacctcaagtgatccgctcgccccagcctcccaaagtgctgggattacaggcgtgagccactgtgcccagccgacatgccattctcttggcctgaaacactcctaccttccttcccatgtctacctaattccttcctttagtcctccagtctcagctcagacatttcttgttctaggaagcccatgcttccgtcatgacagctcgatcattttgcctgtgttccacccatcacagccatgaccactctgatctgggcttccttatcccacccactatgctgagggctcyaccatcacagcccctgtcattgcctatgcctttcccaggcacagccctgacccctctgggtactgtctcatgatctgtcatttttcctttggtgtgggattctgtgaggacagggtccagttctatcctagtgacatgccttgtagcagcaacacagggtgtgacactgaatcaaagcctagaggctgttgggcaggtgagtgtctctctcctgttccctctgcaccttccacaccgacacccctcagcaggcctatatccctccgtctctacctttctctgcctatgtcctatccatttgcctcttatcactgttcctctgtctcactttctctctctcccagtccatgtgtgtctctgtgtctctgcccactcctgtctctttttgtctctctcaaggtctggtctatttcagtgtgtctctccatcagtgaccctcatcccccctgcacgctcacagactttactgagtcccatttgtcccctcaggacccaaccaacggttactacaaggtccgaggagtcagtgtgagcctgagccttggcgaagcccctggaggaggtctcttcctgccaccaccctccccccttgggcccccagggacccctaccttctatgacttcaacccacacctgggcatggtccccccctgcagactttacagagccagggcaggctatctcaccacaccccaccctcgagctttcaccagctacatcaaacccacatcctttgggcccccagatctggcccccgggactccccccttcccatatgctgccttccccacacctagccacccgcgtctccagactcacgtgtgacatctttccaatggaagagtcctgggatctccaacttgccataatggattgttctgatttctgaggagccaggacaagttggcgaccttactcctccaaaactgaacacaaggggagggaaagatcattacatttgtcaggagcatttgtatacagtcagctcagccaaaggagatgccccaagtgggagcaacatggccacccaatatgcccacctattccccggtgtaaaagagattcaagatggcaggtaggccctttgaggagagatggggacagggcagtgggtgttgggagtttggggccgggatggaagttgtttctagccactgaaagaagatatttcaagatgaccatctgcattgagaggaaaggtagcataggatagatgaagatgaagagcataccaggccccaccctggctctccctgaggggaactttgctcggccaatggaaatgcagccaagatggccatatactccctaggaacccaagatggccaccawcttkwttttwytttccttaaagactcagaaagacttggacccaaggagtggggatacagtgagaattaccactgttggggcaaaatattgggataaaaatatttatgtttaataataaaaaaaagtcaaagaggcaagtgtgtcttagggagtctactggcattatcactctccaccaaggaaggggtcccttagacctgtcccaaggtccctcctctaccctagcctatgaggtggctgtaggagtaaaactgtgagccacctctcagcctcttgctacctgcaaagcactctaggctctttttttttttttcttgagacaagatctggctctatggcccacattggagtgcagtggcatgatctcagcccactgctacctctgcatcctgggctcaagccatccttccacctcagcctcccaagtagctgggactacaggtgcatgccaccacacccagctaatttttgtatttgtttgtagacagggtttcaccatgttggccaggctggtctcaaactcctgacctcaagtgatccgcccacctaggcctcccaatgtgctgggattacaggcatgagccactgtgcccagccatgggctcttttaatatacatcttcacacacacacacacacacacacacacgcacacacacacatgagttgcaaacagaaaagacacacacataggcatgtatgcacagacacacgcatagatgtccacacagttgcacacaagtgacagggctgccccaggggtcctggggaagactgaattctaactctcattagaggagacaaacaagtgagccctgaagtggagcagggaaggggagactatgggtaggaaaatggcaatcccctggtccttacagcaagcgtggagatccagaccctaatcctgaggtgctgcatccacagtgggcatggtgctggtgcctgcttggatgatccttaaagaaaggtcctgggggctttggttcatggatccttgagctaggagttaaaggtccaggcccctgggacccttgggaagcagagcaagaagagtgaactcctgggtctgaaggagaatgggctgggggcttggtctctggtcctgagagagaaggtgcccagacttctggatctgaaagaggaagggactaggtctcaactgctgccttcttgactggggacattttggaggcctgtattcctgagccctcaacagaggaatgtactaggggatgggggtctctgatgcttgcatccttggaaaaggacaaaactgtgagtgtctgggtctaaagagggtgagagtcctgcgggaggactcaaaatccacaacgggcggagcccatagccggactcctggctgggcccttcatggggcgggacgcctggaatctcgaggggcgggggcctggcgcaggctcccgcccggggttcccgagctgctccactctgcgcgaagccgccacgctattgtcctgaccaggaaggcggggccggcgcggggcggggctggcggcgccggcgcagcccgggggcggcgggaggaggaggtggcggcggtggcgctgggagctcctgtcaccgctggggccgggccgggcgggagtgcaggggacgtgagggcgcaagggccgggacatggggcccgccagccccgctgctcgcggtctaagtcgccgcccgggccagccgccgctgccgctgctgctgccactattgctgctgcttctgcgcgcgcagcccgccatcgggagcctggccggtgggagccccggcgcggccgaggtgaggccgggccgggtcctgggggatgggggaaggggcgggaccgggtctctggacgccggcgcggacatgtccagggcagaaagcgcggtctttccagccaggtggtcagcccccaggcgcccccaatcacatttatgaacccagggttccaggccccagctcccccatcatgcgacgtcccagccccctcccatctcgagcataggaactggtctattcagagcccctggtcccagaagtccagccccctctccagacccaggtgactcggccccaaccccctcccgcctggacataggacccaccaagcagcgaggcatttagatccaataatccagaccccttgtattctctggacccatatggaggcccttgcagcctcccaggacccaggagtccagtccttcagtcaccacccaccccaaccagatgtagctctccagtcctcaaggacctggtgtccaggactgtaggcccctgaagccaggccttgtcagctttgcatcctgcaacgggagcctgagcaagggatggagggaggaggggccagaactcctgggttctggcctcctcctccgcgattcaggtttaaccccttcgggctccagagcggctgcgctggggtgggggcggagtctgtctccgcggcaacaaggcagaaagaatcccgggggacccaggtcgccatagcaacgggagcgctggggcgcccccgccctacgggagctgtttcccagggaacggtgcctccatggaggcggtgtgcggtgcttgggggagggggctggtgctgggggtctcggtcctagggagcaaagaaccaggggaccctcatgccaacgccccccgagccctcactgtcctttccacttccatccaggccccggggtcggcccaggtggctggactatgcgggcgcctaacccttcaccgggacctgcgcaccggccgctgggaaccagacccacagcgctctcgacgctgtctccgggacccgcagcgcgtgctggagtactgcagacaggtgggcggggccgaacgggagaggcggggccgcccatagaaagctagacttgaaaaaggcgtggtccagggtgctgcgcgatctaaggcgtggaggctggggggcgtggccaataaagaggcgcaactatgctaggggcaggggacctgttttgagatactaagtcaggaaaaggggagagccgcgagatagccagagaggaagtggaatttaggaatctggtggtctttgtaaagagtagaggtgtaggggggagtggcgaaaggataggcggggctaagacagaaagagaccttaaggaccagcaagatggggaaaggggtggagcccaatgagagcgcggagagctgggggggcgtggccatgaaaagacaaatttataacgggaagggagagttttggagaggcggaatagaggaaaaggcggggcctaaaggagggtgagacctttggggagacgaatctgactgcggggaggggtgaccagagaggtgggcttagagggaccttcagaaagaaacagcacaggaaaagagatagggcttaaagatgacgggacttttaagggaaaactgctagtgggcgtggccaatgagcacaaggagcttggatatctaaggctggtgctagggagaagcagggcctagggaagcgatgtcctcatgaatactagagccttgaaaacggacctggccgggcgcggtggctcacgcctgtaatcgcagcacttggggaggccgaggcaggcggatcacctgaggtcagaagttcgagaccagcctggccaacacggcgaaactccgtctctactaaaaatacaaaaattagcctggcatggtggtgcgtgcctgtaatcccagctactcaggaggctgagacaggagaatcgcttgaacctgggaggaggaggttgcagtgagccgagattgtaccattccactccagcctgggcgacaagagcaaatctccgtctcaaagaaagaaagaaagagggagaaagaaagagaaaagggacctgactactggagaggggtggctggcaggggcggggcagtgggctgattgcccccatctgatccccccagatgtacccggagctgcagattgcacgtgtggagcaggctacgcaggccatccccatggagcgctggtgcgggggttcccggagcggcagctgcgcccacccccaccaccaggttgtgcccttccgctgcctgcgtgagtcccaggcggggagaggggaactgaggtgggagtttctgaggggcaaggttctgagcccctctctcaggcctacattaaggggctgggtgcttgtgtcctaagtggggcagagaagcctctgaggataaaatatctggattctgaggagggtggggttggtggctataggaggatctcaccctggtgtcccgtgcttccccagctggtgaatttgtgagtgaggccctgctggtgcctgaaggctgccggttcttgcaccaggagcgcatggaccaatgtgagagttcaacccggaggcatcaggaggcacaggaggtcaggacgttggcccacccgtccccagcccccacaacccaggaactgggacctctaacaccctccgccaccagaaccgaggagtctgggccaccagcatcctcttcgcacttgggatctaagaatttcatcccccaaccccttcctctagaagcaggaatccaggctcccagcctcatcaacccccaaccctggcagcccagttccccatctaccccctcccatcccacaatcctggcatctgggcccactcttcctacaggcctgcagctcccagggcctcatcctgcacggctcgggcatgctcttaccctgtggctcggatcggttccgtggtgtggagtatgtgtgctgtccccctccagggacccccgacccatctgggacagcagttgggtgagtgggagggaaccctccatgcccatctcaaggttcctgaggcaggggatggaagcctgggagcccaggcctgggttcttactgcctgggtcctctcctgctccctcagtgacccctccacccggtcctggcccccggggagcagagtagagggggctgaggacgaggaagaggaggaatccttcccacagccagtagatgattacttcgtggagcctccgcaggctgaagaggaagaggaaacggtcccacccccaagctcccatacacttgcagtggtcggcaaaggtgaggcagtctctgaacccctggggcctctccaccatagagggagaaagatctgggggagtcttgctggggggtgtctttgggaggggcctataggggaaaggcccaactgaggagaaaagacgagagtatctttggataaaatagaagtagaagggctaacctgccaagggagggggtggtttgggggtacttgggagtagaggggccattgggtaggtcttgaggatcatttcaggaaagcttggaagatggtgtaatggattcctaagctttgcaagaacaggcccagtccagaactacatctcccataatgccaggcagcagcggtggctaaactgggtgcatgatggtctccagtgcactctaggaaatgtggttctctaggtagaaaaggcgacctggaggtgggctgcagactgacctcctgatccctggtcttgcagtcactcccaccccgaggcccacagacggtgtggatatttactttggcatgcctggggaaatcagtgagcacgaggggttcctgagggccaagatggacctggaggagcgtaggatgcgccagattaatgaggtgataatactgggggccccaggaccccctacagtacagagctccctaaataccaggaaattcctccaggacacattgatactacctccaaaggctccctaagcccctttgaccttgagctctcaacaccaccccctaagatggccagagatccatggcccttctagaatcccactgagacgctaccaggttctctggaaactctggtctatggtactctttcactttattggtttttttttttttcttttgttgttgttgttgtgacggagtttcgctcttaacacccaggctggagtgcaatggtgcgatctcggcccactgcaacctctgcctcccgggctccagcgattccccttcctcagtctcctgagtagctgggattacaggcacccaccaccacgcccggctaatttttgtatttttagtagagacagggtttcaccatgttggccaggatggtcttgaactcccggcgggaggagatccacccgcctcggcctcccaaagtgctgggattacaggcatgagccaccacgcctggcctctctttcactttaaactccttctggatcttccctcttgggaacccaggagccagcgagacttaagggatctggggcctttaaatcttttttttttttttt

SEQ ID NO: 97768 - DNA, 14609 bp, Homo sapiens
atggttcctggtgtctgtttgggcctatccacaaagccctcttcaagtggaagtggggagggagggtagaaggtgatgcccagaggactcgtgtctgtcagtggagagcatgggaccagcgctcccaagaagttcaggaactgcagccatgacctcagggccagtcctcccacactgcccacagagctgccacagaccagtgtgaggtgcttacccagtggggcccatttgtgccccagggaggagccagaccctcttacctgccccctgccagtgcctgagaactcactggggctgctgtgatcaccatgtgcctaccttgcccagcagtccacgctttgccatatcatggctcagggcctctgggccaaggccacactagatcccacaaagtccacggtggtggtgtccccatctgcaacaggggaaactgaggacccatgaacaggcttgcccaagctgggtatggtggcctgcacctataatcccggctactcaggaggctgaggtgggaggatcgcttgaggccaggagtttgagaccagcctgggcaacttggtgaaaccccatctctttatttcatgtatttatttatttatttttgtttttgagatggaatcttgctgtgtcatccaggctagagtgcagtggtgcgatcttggctcactgcaacctccgcctcccgggttcaagcgattctcctgcctcagcctcccgagtagctgggattacaggcacccaccaccatactcagctgatttttgtatttttagtagagacggggttttgccatgttggccaggctggtctcaaactcctgaccttgggagatccgcccacctcggcctcccaaagtgctgggattacaggcatgagccaccgcacctggccaaaaccccgtctctttaaataaaacaaaataaaacaagaaacccaggcaggcttgcccactgtatgatcctggcagcaggcccaggccacgagcagctgggaccaataactgcttccccttcagaagttctacattccacgagctcccagcactgctaccagctcccccagacagcaggcatctggccacatggggtgtctgctaaaaaagccactcttggctggggtgtggtggtgcacacctgtagtcccagctactcaggaggttgaggcaggagaatcgctcaaacccaggaggcagaggtttcagtgagctgagatcacaccatcattgtactccagcctgggtgacacagcaagtctcaaaaaaaaaaaaaaaaaaaaatcctgccagttcccacccaggtgccgggcactgtagcagaaggaacatcaggcaacgcacctgccctcatggccactcaccttctatacagtcaaacagatgcaggaattagagctctgtataattctagataggttggggagatccattgctggtgaagggtcagggaaggcctttcgaggtgacatttgggctgaagcttgatagaggacatctcaggaacacatccaggccgacagcacagccagtgcacaggcctggggcagccacacgtgatctgtgtggaagcaagaggagcgaagcccggacggctggaatggagtgagcaaggggagggcaggagctgaggtgcaaggaggagcagggccttgttgcttcataacatttaagtccaaggaatatccagaacagttttttgtttttgggtttgtttctaaatctctgctcttaatgtttgggggatatccagtgttgcttatttctcacgactctgcctcagggagtccaggtggtccagaacttgaaccacctgcctaggcctaggcccatctgcctagttcggccaccattgcccaaaaccttgcccaacatccctgggcaaagcttggtgttcagccccccaggcctcggacacccaggagaccaccttgggcctctgtcatgcatggaattacccttccttccaacctgtatcatagtaaagtcttctgctccaaggagtaaacacctggctttcagggcccaagatggagggacgttggttacccttgatgtcatcatgcacctggcctcttcctctcctgctctgttatcctctgtgagcaagcttcagtctccagcttatggcctcatggttgcaacacggctgctgtggcacccagcagcacaccctcaggtggtgtctccattttgcaattgttggctttcctgcagccctgactgaggtgcctggcataggcctggaagcgcaggagctagaagctgccccgatagtactgctatggggaggctgaggttagatgtggagtgcagggggctcacagagggtgacagcaggagaggaagaggccaggtgcacaatgacatgagggtcagaggcccaagttattggtcccagctgctgggtggcctggtccaaccaggagcaaaggcacagagcagggcaccctctagggcagcagaaaagatgcagatctctcccaggggtctccctgggagactcatctggggtcagatgagtcccaggcaacaggaatggagattgctttgatgtgcttggaccatctctcctgtcctgggcatgttgcagctcaaacaaagaggttctctcaataagaaaggcaagtgggctggtaatcagagaggatccagcatgtctgccacttccctcttccaaatgccaggctctgtcctggaaggaccatactttctccatacttcttaaccaggataaaccacctggttaagaagccactgctggtggtgcagcatgtgtgcatgtggtttgtgagctgacagggtcccagcagaaagatgacagcatgcttagatgggatattccaaagagtttaaccaagggatcatttgcaaaggagcagcagggactgggaaaccaccgaggctggtgcagaaccccaggactggcaccctgggagctgttaccacccccaggccacaaggcacaaagagaaggaacaagaacccaaaagagcaaatcccagggagagggtagtgctgagggagctgcagccctgactcccacacaggacggagtgagaatcaacaccctgaccttactcccctcctgcagggcaccccattgtccaaatcctactggaagccagagtgcatagaagcccaggtgaccccgcctccagtcaacctcctaggccatggagcagggcagaacaggactgagagggttcctggggaactgggtccctggaaggaaaacagttcatctttcactgcaactccccccctgcttctacccccacatctacccttggcctccccatagcagtaccatcaggacagctcctgggtcctgagctgccaggcccgtgccaggcatcccagtcagggctgcaggaaagccaacaattgcaaaatggagacaccacctgaaaccccattttgcagatgacccacctgaggcctggatgtttgcccagaggagggattcctcggcaggatgcagtggctcattcctgtaatcccaacactttgggaggccaaggcaggcagacggtttgagctcaggagttcaaaaccagccctaggcaacatagcaagactccacctctacaaaaaattttaaaattagctaggtgtggtggtgcacgcctgtagtcccagctacttgggaggttgatgtgggaggatcacttgagcccaggagcttgaggctacagtgagctgtgttcactccactgcactccagcctaggtgacaaagcaaggccctgtctcaaaaaaaaaaacaaaaaaaaaaccttcctaaccaatccctgcttatatgtctgccacatgccaggccccatgctaagcattccctccatgtgagctacatggatcttcaatacaaactgggaagagggagattccttagtctcattttccaggtgaagaaaccgaggcccaatgagaaatgacttgctctgggtcctgcagagagcaagcggcaatgcatggccagcagaccctcagcactgccacccttgcttccccaaatgaattggcacaactgactctcgggcaatgtaaagaaatgaagaaatactcctctcaccagcaagccttgtacagatgtccccctctgactagaacaccctcccctttcatctgaaacctttcagcgcttatccaggaagccatccctgtacccgtagcctggatcaggagcctgttcgggtccccaggtacccctcttttccccatcatggctgggtctctgcctcacttgcctctcactgtcttggtcattctgggctgtcactggtgtgcctccttcatggacttacgcgatcattttcagtaagctaggtctggagcttagaaaattgtttagttgccaggcgcaatggctcacgcctgtaatcccagcactttgggaggttgaggcaggtggatcactcgaggtcaggagtttgagaccagcctgcccaacatggtgaaaccctatctctactaaaaatacaaaaattagccgggtgtggtggtgcgcacctgtagtcccagctacttgggggactgaggcagcagaatcgcttgaacccaggagacggaggctgcagtgtgtggagatcgtaccactgcactccagcctgggcaacagagtgagaatctgtctcaaaaaacaaaacaaaacaaaacaaaaaaaataaaaacaggttgggcgcggtggctcacgcctgtaatcccagcactttgggaggctgagccgggcggatcacctgcatttaggagtttgagaccagcctggccaacatggtgaaaccccatctctacaaaaaacacaaaaaatcagctgggtgcagtggtgtgcccctgtaatcccagctacttggaaggctgaggcaggagactcacttgaacccaggaggcggaggtcatagaggagccaagatcacgccattgcactccagcctgggcaacgagcaaaactccgcctcaaaaaaaaaaaattaaaaaacagagcttggattgcttcttagtcttctggctaagaatcaagtgtaaaacagcttggccagtgtgccggggtagggtcctgggagcccctggctgtgtcaagagaccccctttgggccaggtgcggtggctcatgcctgtaatcccagcactttgggaggccaaggcaggcggatcacttgacgtcaggagttcaagactagcctggccaacatggtgaaactctgtctctaccaaaaatacaaaaattagcccggtgtggtggtgcatgcctgtagtcccagctactcaggaggctgaggcaggagaatcgtttgaacccgggaggtggaggttccagtgagccaagatggtgccactgcactccagcctgggcaacaagagtgaaactccgtctcaaaaaaagaaaaaaaaataggagacccccttttactttccagactgtgggagggaggaagagtgttgtcccaggcagtaactaggggctagattattaacaaactagtattttagtgcctgctacacctgaacagtgcttctggctgaatgttagccctgggaatctgaagatcagagaggtggggcatcctacctgaggatgcacagcctggatcctcattttgccctgatttatccagatctgctgtcctccctgcaccctacagagcagggcaatcacagcagggggccccttcagtgtcctcagacagctgctgtgatttgaataaccaggcaggctgctggatgtcccctggtgactgatttgcctggcaaacagaccctcaacccctgggagacagtccccctggggccttgtttcttcttcctatcctcaaaagctccccaggcccatctccccttgcctggctctgcttggtggtcctagtgcttgtccacccctggaggctggatggttccctccaaaacctgggagaagatgggcaggtccccaggcaggggtaacctgagccagcttagtccactcccagggccagccaggaaatttgcatgaagagaatgaggttcctcagaggcttcccctcctttcccaccagggatagtcatcctggggctgaggtctgacagcaggtggaagcagcccctgtgtgtggagagccttcyggagggcatgccccgcgccttcctggtcaggagtcggcgtccacagccccccaactggggccatctgcctgaccagctccggggagatgcctatatcccaggtgggcccctcactgtgcctggaggtaaggggcaggagagacgcagtgtcaccatctggcttttctcctcagactgcagcagcctgggggggccaccggcacaacagtcgtccagtgtcagggatccgtggacagcggtgagtgtgtaactggctagcaaagccagctgtttcgctcctgcctgctctcagccttaatgaagctgacagccccttgctcccccgacccatctgcacacgccctccagcctcrggacctgtccgcccctacttctctgtgttgggaatgcctctcctttcctagtagtgagctctctactgttaggtctcaccccaggcaccagggccggcagccacagggatctcttccagcggggcacaagattcatccccacatgtggatgatccgctttatgtcagaacatgggacaaggcaacaggagtgcgatgggagataagggctttttcagctgtgcatgcattggaggaaggaaagcgccagccggaatgtmatatattcatgaaagcaagscactgttctaggcatgggctgttatattcagcgggaataagacaaaaatccacaattttatggagcttatattctggttggggctgcatgtatagacaataaaattagtcagcctgtaattccagcactttgggaggccgaggcgggtgaatcacttgaggtcatgagttcgagaccaggctggccaacatgttgaaaccttgtctctactaaaattacaaacattagccagacatggtggcacgtgcctgtaatcccagctcctcaggaggctgaggcaggagaatcagttgaacctaggaggcagggcagaggatgcagtgagccgagtctgcgccactgcactccagcctgggaaacagatctagactccatcccccctcaaaaaaaacaataaaattagaaaaatagaccgggcatagtggctcatgcctgtaatcccagcactttgtgaggccaaggtgggtggattgcttgaggtcaggaattcaagaccagcctggccaacatggtgaaaccccatctctacaaaaaataaaaaaattaactgggcatgtggcgcatgcctacaatcgtgtaatcgtggggaggctgaggcactagaatcgcttgaacccgggaggcggaggttgcagtgacctgacatcataccacttcactcctgcctgggcgacagagcaagactctgtctttaaaaaaaaaaaaatgtgtatgtcacatcagaagatgggacttggcatagagaaagtaaggaccatgggatagtgagggaaggccctggagagtgacaggcacacacactaatcactgtctcccacctgccttcctaatcctccgtggtggctcaggacactctgtaaatactcatttgcagagtaacaaagggtggatggggtccagccagagaggctaataactcctgcatccctccagcagcccacacagggmaacctgacctctgctcccaggggcccwgggacgctgggctgcccgctctgccctaaggccttccctctgcagcgcatgctgacaaggcacctcaagtgccacagccccgtgcgccgccacctgtgccgctgttgtggcaagggctttcatgacgccttcgatctcaagcgccacatgaggactcacactggtgagcagtggcagggacagggaaaagttgctgggccccaggtggggatggaaggaaatggagagaggtgctgggctgtggagtgtccatggtttgtgtatgtggggtatggagaatcaagacatgatgtctctcggaccccagtgggtgggtgtaaggtggcaccaaaataggggcctgtcacggaatgcagagtgcagacggatgccggttatacgattcaggctccagatcgaaaggcaagggaaggcctccctctccatcccccaggggagggagcatcctggtgagggagagtggagacacaggtgtctggcccatgtctgcactgggtgacggtagcagatggtgggtcatgggcggaagagtctgaagagcttggaataggtaccagaaatgctcaacactggaaagcagggtgggggcgctttagtccagagcccattgccctctctgtccagccctcccctctgcgcccatctgtgcagggatcmggcccttccgctgcagtgcttgcgggaaagcgtttacgcagcgctgctccctggaagctcaccttgctaaggtgcatggacagccggccagctacgcttaccgtgagcgccgcgagaagctgcacgtgtgcgaggactgcggcttcaccagctcccggcccgacacctacgcacagcaccgcgccctgcaccgcgcagcctgatacggtgtgccagcgtcctccccacgaggcaaataaacacagaaaactcacgcatggaatctggtgtttattacactcgggggagagaggaggtcactcggtccagcggtggccgcagtgtggggctgtgcacacgtagtaaaggcgcatggcgtcctggcagaaatgatgcatggttaggaaggatttggacccagcagcgccttaccccaaaagaacaggcaagagaacttcaccaataggtaagggcccggcagagttccaagaagcgcagggtcacccacattgatatccccgcccccagaaaggaccaaacaagccccagatacttagaaagccctcgcgccacttacctcggcccgcgcactgtgtgactggaagaacacagcctccttgtggccgcacctgagagggtaggggctcggtcaccggaggcttcacacccttccctcctcccttcgcccagtgaggagacgagcctcactttacctccccagtaccagctgaacgctcacttttggcacgggtggtcctcggtccgcggcaacgtggggtcctgggacacgtcggcgataatctgggtcagttcgctgcagggacgcgggggtgcaaaattacgctcagacccagcctccagagccaacacccccgcccccagctcagggcccgccactcactccacttcgtgcgtgatcttgttgacatagatgcagctgttgtcggcctcctgctggtaatcacagttccggcactacgagagggcgagtgtgggggaaagggggtcacggaaggattccagacaagattgggaggagagggcagggtgatcccggaggatatgacgacaggactctctttggggatgggcaggacatgagagtcaggatcacttgaggtgcagcggagggcgaacagggagtccgatcacagaggcagggggcagggcggggccacgctgggaacaggtggacctgccggggaagaccccggcgctcaccgcgtagagcagaatgcggttctccttgtcttccttggggtacagcatgttgttactgtggggagggggaggtgccaggggttagtcctggagccattcctcgcccgccttctaacatcacccgctccctccgcctcaccattcctggcagaagcgaatacccacgaagcccggctcgtaagtcccgtcgggctccatggcgacgcgcagcccgcgcagccctcccagccttccgcgcttgctccgccgcgctacaggtcgcgggaggggccaggcctaggtgcttcgccaaaagagggcggagctgcgcacacgtgctggctccccgccgcctcgggctcggctctctccgcgcagaggtttcatggcttgcttcaatcttttgatatcttagagtaattgcttccaatttttgggcatcgccgcctcagtttacagaatagtatggatctggtgccagagccgggaaaacgatgcgcatcgtaaaccgcaaaacactgagcatccaggacagaagccaaggcgcttggcttggttgaaggccagtgcgcatgcgcgagtttacccttcgcggactgggcgagctcttgccactcctacctccgggcttcagtcttcgccgcctgttctggtcctttcccgggccgctattggaagaaccgtgaactatggaaggcccctctggattggctgggctggcccaagagtaaggagagccctcttcctggcggtggggaagggacggcggcgattggcggacgctcctggcaggagagcgcggattggtcaggcacggagcaggaggcggggctgatagcccagcagcagcagcggcggcggcggctgcggagcgggtgtgaggcggctggaccgcgctgcaggcatccgcagggcgcggcaagatggaggtgacgggggtgtcggcacccacggtgaccgttttcatcagcagctccctcaacaccttccgctccgagaagcgatacagccgcagcctcaccatcgctgagttcaaggtgtggccatgggggcggggtccggaggggcggggcgaagaaattggggggttcccggaagggggaggctgggaggggccggggagtgactgggcgggcccggaggtgatcccaggctgcggaggctggggacccggtcgcggcggggcgggtccggagagaactcgagagtgcagagatgagggccgggtccagcgaaaaatccgacggtccagagggcgggggcaagaggcgaggggctggattgcggccccgtgcgtcctgactggggggtcttttggaggaaaagggacgtggcgatggtcattgatgcaaggggcggggcctccgtggcctccttcttctcaccctgcctcctcctcacagtgtaaactggagttgctggtgggcagccctgcttcctgcatggaactggagctgtatggagttgacgacaagttctacagcaagctggatcaagaggatgcgctcctgggctcctaccctgtagatgacggctgccgcatccacgtgaggactctctatctgggacactcccccaccccacctttcatttggttattcaacagacacttgctgggctttgccctcagtcatacccgagataggtcctgccttcgtggagcctccagtgcagcctgacgagagacagacccatcattagacagggacagcctagagtggtctgggctgggatcaggaaatcccaggggactggagccaccaagaagaggtgcctgactccacctgggagaatcagagagggcttcctggaggaagggatgtctgagctgagggatgaggaaagggtgacttaagagaaagaggtggaaaggagggagcagggtgtacagaggcctagaatgtgaggtaggtcacagtgagcgaccaggctggacagcttgggagaaaccagaacacaggatctctttgtgcatccactcagtacatcctttctgtctttttttgagacagagtctcactctgtcacccaacctggaatggagtgcagtggcactatcgggctcactgcagccttcacctcctgggttcaagtgatccttgtgccccagcctcccgagtagctgggattacaggtgcccacccagctaatttttgtatttttagtagagatgggtttttgccatgttggccaggctggtctggaactcctgacctcaagtgatcagctcaccttggcctactaaagtgctgggattacaggcgtgagccaccaagcccagcccctttctgtccttattccctcccgacctcactcagtctgtagcagccacattgctccttgcacagtccaggtgagctcggcctctggatcctgggcctgaatggttcttttgtcatatgcctgcgtgcctcacccttccttcctgtcttaatttaaagtgtcagtattctagtgaagtcttcaccggcctcagtgttaacgtttacctcattcctttccccttctttgctttattttagatttttgtgtttacaagtaattctcctctgacacactctggatttctctcatctggtttatttactctctgtctccctggattcgagtgccctgagggtggaaattttgatcactataattcactactgtgtccccagtacttggaatagtgcctgggacagggaggatagtccgtgaatcgttttttgttttgttttgttcgagacagagttttgcccttgttccccaggccggaatgcagtggtgtgatctcagctcactgcaacctctgtctcctgggttcaagctattctcctgcctcagcctcccaagtagctgggattacaggtgtgcaccaccacgcctggctaattttgtaattttgtattttaagtagagttggggtttcaccatgttggccaggctggtcttgaactcctgacctcaagtgatctgcccacctcagcctcgcaaagtgctgggattacaggcatgagccaccacgcccagccctgtgaatcattgttgaatgatgaattgaatccataaagtaagaccacaaggataatgtaattatccccattttgcagaagagaaaatttagcttcagggtggagtttatttatttattttttattttttttgagacagagtcttgctctgtctcccaggctggcgtgcagtggcatgatctcggctcactgcaacctccgcctccccggttcaagcgattctcctgcctcagcctcccgagtaggtgggattacagatgcccgccactacaccagggtaatttttgtatttttagtagagacggggtttcaccatgttagtcagactggtctcgaactcctgacctcaggtaatccgcccacctcggcctcccaaagtgctgggattacaggcatgagccaccgcacccggcccagaatctactttcttaaggatgaactgtcagtagcattttggccccagtctacatgactctagagagaactgcttcttttttctctcgttgattaactgttcattccccatctgtgttgtgccaggggtttcattatgactgcatctgagaagttctagtgtatgaggcagatgttggctaaatggccagaggactgaatgtgaagggtcaggggagacaagggttgtgtaggagatcatgaagctgggagaccctatcctggggtacctgatgcatcagtgacgtctgggaggacatcctggaggtggtgctgctggagcagagacgagaagaataaaaagaattggtcgggcatggtggttcacgcctgtaatcccagtgccttgggaggctgaggtggacagatcacttaaggtcaggagttcgagacggtgaaaccccgtctctcctaaaaatacagaaattagctgggcgtggtggcagatgcctgtaatcctagctactcaggaggctgaggcaggaggatcacttgaacccaggagctggaagttgcagtgagctgagatcacaccactgcactccagtttggatgatagagtgagatcctatctttaaaaaaaaaaaaaaaaaaaaggttaactgaagatggggaaggggtgccctaggagtggggcacaacccagcaaacactccaaggtgggagggagcgcggtggggattaagacaggccacttctgtggccaaacactgtggaagctggggaggaccctgacctggctcaggtgttcacaggccccctctggctgtgtgtggggaacagatggtggaggacaggaagagtagggagaccaggaaggggctgctgtgagagtcctgatgaggggacgaggtctggagctgtgggtcaggcctctgctgggtgcacaggactgagcctttgggccaccctgggcagctgaagctaaggggtgcgggtgttcataggcacctcataggcagtggcatctttgagcaggtttcataacaggcggttcaggtacacacagacctcccaggccactcaaggaaggtgttccagagtggagccactggggaatttttacattttctaaaattctttttctctttataaatatcacccatattcattgtttaaaataacagaacttcaaatttgtgaaaattctcaacagaaattctcagtgacgcttcatccggagataaaggccattcctattttgccatgttagcccagtggcttaggccagacacctcagggtgttccttgggcccgctctctccctcacccccacatccactctcatcaaatcctctcggctccacctacaaaaacttccctgaccctggtccagcctccatccttcccccaacctcgccatcccggcagcttcctccctggcctccccgctccccatctcagccagagggagcctgggaccacctgagtcaggccagggccctcctagctcagagccctgccctggtggcacttcgctccagataaaaaccaaagtctaggccaggtgcggtggatcgtgcctgtaatcccacccagtacattgggaggctgaggtgggaagatcacttgaggtcaggagttctagaccagcctgaccagcatggca

SEQ ID NO: 97769 - DNA, 24229 bp, Homo sapiens
tcgggggtcatgcgtggggctggatcccgcagccaggccctaaccaccaggttctcctgtcgctcggcggggaagcgcgctgcgcttggtccccacccaggaggacgatagacatgaagaccaaggtccggggctcggggcggatggtgtgggtctccgggtcgcccaggccctgtcccctccccatgtgccttagctcgccccagcctgttttccttttgcgggaggcaccagcggccgcccctgccagagaggctaggagggaggccaggacccagggggaggccgaggcccgggtgaacgccgtcccgcccgcaggagacgccagcgagagcgccgaggacatcttcttccggcgggccaaggagggcatgggccaggacgaggcgcagttcagcgtggagatgccactcaccggcaaggcctacctgtgggccgacaagtaccggccacgcaagccgcgcttcttcaaccgcgtgcacacgggcttcgagtggaacaagtacaaccagacgcactacgactttgacaacccaccgcccaagatcgtgcagggatacaagttcaacatcttctaccccgacctcatcgacaagcgctccacgcccgagtacttcctggaggcctgcgccgacaacaaggatttcgccatcctgcgcttccacgcggggccgccctacgaggacatcgctttcaagatcgtcaaccgcgagtgggaatactcgcaccgccacggcttccgctgccagtttgccaacggcatcttccagctgtggtttcacttcaagcgctaccgctatcggcggtgacggccctggggaacggcaggcaggtgtcctcgggggcacagtaaaggggcttcggtgaagctggtggtcactccggggccgctgtctgggctgcagggccgcgggttcacgtcccacctcaggccgcatctttctttcgccaggcctcagtttcctcctatataaaaggggggtcaccattgagcctgccatggtgagctgaggagacactgggacaggctggcctagggtcctgatgcaacggagggggcgctaggggcatctttcgagcacgagggtggccagcagccgccagctgacctcaccgtccaggcggacactctccaccgcccctcagccaggctgggtggggcccacagggcctgccccaagtggcggccacacagggtgttgtggagatgggccagaggggcctgggcttggcggtgccaggctcgtgagaagcaggaaactcaaggccagccctgccacatcacggggcacccactgggcgtgaggcagagcccgcggctgtggggcagctccagccctgcccacaggccaccctcgcccgcacaggcagcactgaggccgggaccctgctggcgcccgatccgccactgcagaagagaccctctgtggacacccacactctgcagggactggcccccaactcaccccgtgctggctggtggggtccatttccccgcagcgggtatggaggatgcgtcgaggtccctgtctctgtcaaggtcgtgggaaccaaaagtcactgagccgtcctccccccacctctgagcacagggcctggagggcaggggctccccgaaggctgggggttggagaagggtgaggggcttcccccagggatccccccacctggcctgctcacggggccttggagcatgagaccagtgaccccgagttttgcccatatcaggacagtggctccttctcactcccctttctcaggccaggagggccgagggccacacgggtgccacagcccaggtcggagtggcccagccggcaggcttgttcttcagcatccgacgggaacatctccaacagaagcaaaacggaaagtgcctcccggacccccagagggccacccaacctcaccagtcaccagccccagaccacccacagcccctcccagacaccccgcctcatctggaaatagttccgtttgtttctctaaaaagacttgtaggtgggaaaaaaaatcttttgttctcatggaattggcctattggcaagatcgcatgtttttttaataaacgttgtattttagaataatcttaggtttgcagaaatgcagagagtgtaacgtgtccgacgccccacacccgctgccctagttgctgctggcatttgtgacacagcgcatttgtcccaagggaagagcctgggaaacaacacggcacccaactggggcctggtggtcccttgggagctgtgttagtgcccggatctgtctttgccccccgcccctctgccttgcctcccacagtgggggtgacagtccatttcccagacgacaggagggagggtacaagggtggacacagctgctggcctgggcccaggctctcgtgggggcagcgcttggccatgcctgggggcattcgtggtggtcccaccttggggctgctcctggcgtggagtgagtggaggccagggatgctgcccaatgtgcttcagtgcccaggatgagcctccccaaatgtcctcactgcagtaggcagaggtgcgaggcagatcctgcactcccctggggcactggtcacctcccagcccccacctctaacaggatcccggaagtctgtggcacagggcttgggaactggccagggaagtgcatctgatcagcgtccgctctccacaccgcagaccctggcccaccctgaccagcctactccagaatcccaaatcgcattgcagcacacacaacactgccatccccagcccagccttcagcagacatcacaagttgatggcagatggccagagccatcttagaatcctctgggcagcctcttgcctgggttcctggccagctccaccgccgatcaggacaggctgctggggcagggctgagtccgggctggactcggggggcactttttatttttttgagacaggctggagtgcagtgggcgtgatcacagctttctacatcctcaacaccagaaggcacttttgagcccagagtggtgtttgggacaggccgggttctgtagtcacagcccaggttgtgtgtgcgtggctggcgcagcccagcctgtactgggcctaacccagacctcccaccagctctatgtgacagtatttacttccatttggctgctcgggaaactgaggctcacaaaagcccacgttgttgagcccagaaagtggcagggccagtattagaagctgggtttctctaccctggagaatcccaatcccagaccaccaccccgtccctgcctcagtttccccacctgcccctgcagagattcccccagccccagcatcctgcttcctcctcctcacgttccttttgcaccccaagggagatggctgtcctccaactggcaagacacatggtttgccaggggccccagtctggagggagcagagctggggccctgggacccctgaagggtcacgggcactgagcctgggaagacgggctgctggccgagaagggtgacggctgccttgcagaggacagggcagcaggtgtgcccagggcagggggcacacagggctcaggccaagctaaggagccagatcctaggggagctgggcaccagggagctacggagggcgcgtgagctggggagggcctccgagctgggtgtcgagaccctgcaggcagactggaggtgggggccaggggtaggctctgcacaccacccccccatctaccccatgactctccaccatggcccgaggtccacctggtgtcctggaagctgcccccgcccccacccagcttcctgactttggctgtgtccagagctaagaatagacgctccctgcccggcccccgccggaaaccgcagccacgggggtacatcctgagcctggcctctgttcccaccatctgccccccagcccctcacaactcctcccaccagagcctcctgtgctcccattgaacccgaagtgctggcggggggtggggggcggggggcgggccaagaccgggagaccagcaaccagccccagatgacagggaagcccagtgctcatgttccaatcccacacatgggcgtggcattgttccccctttgtgcctcagtttccccatctctaaaatttaagagtatctttaccccctgccttgcagagatgtggtgaggcttaagctaaatgcaagtgtccttctctgaactctgcccaggctgtttcccagaagagtcattgtccttgttatctcagggccgaggacagaggaagtggggacaggacagccttcctccgtctctcactgccccctcatctggagccccagccccacatcctcctcccccaacatctgccctccttgcagttagtgtagcaagggcctcatgctctctcttgcctccaaagctttatacatgcaattcctgtcactgccacgtagcccagacctggggagctcctattcatcctacaaaaccccacttcccatgccctctcctcacaagatgtcttcctagctcacctctgggcttccctaggccctgtctcttcctttggcccagccctgaccccagggggctggaacagcctgtgtccagttcattctccagcctagggcatcctgaagggcaggcctggtttcaggtctcacttggagctcataattgtcccactgtataagctgaacacagagaggggttggggagagtaagacttggagattaggtcggcttcacgggaaagcagccttggagccagggttttgccacatccataggagttggatagcctccttgccaggaaagagagaagttgtgttaaatggctggtgacttaatgggatagagctttgggagggaggttgggtgtggccgaaggccaggaggaggaaggatagtgggcggggtagccggggaaggggcttccggactgggctgacgagagggccgggccaggctgggaatacccctcactcacagcctggactagcagccctcccgggcccaggggacggggtggggtgcagtcagggcaaggtcagcttgtccggtcccactccaggtccctaactcaaggttctgtccggctcgggtgtacaaacaaggccaaggaagcccaaggtcccccctctgcaaagagacggtcccagtccctgcgtccggcaccttctcagccattcctgttgggctccatccctccttccccagcccgagctggggggtggccaggaaagagtgcccatcccccactgcagcctcccggctccagactgttcctcctctggctccaaagccacctccgagcctcctcaagagaccctcccatgcgatgccatcaccccagccctcccggctcacctgctctgggaccacctttctcagtctggctgtgtcgtctggtgcaccccccatccctctgtcctcccaccccacccctggaaggggcctcaaatatgtcctgtatgtattaagcagggcatactactactgtgtgccgcgttccagcgcacccagtgaatttggagccctggagtctgggcgacccccgggagccgatccgcctggacctgccccgccccctccaggccttgggtgctgcccagatggtgaataatgcgggcctggcggcgggagcgccgggaagaggcctggcagggcgctgggcggctggaggggctgaggctcccgaggaagcgcccctgccacccctacgcgggccattgcatccctgccaccggtggcctgggggtcccaagggcgccgccttccccagaaggctgtagggtgtcccggcgtgcggggggcacccactgactccaagtcagccaggcccgggcccgaggggcgtggccagcgcagggtgggcggggctgatgagagacagcgggagacagagactggacggagagagcgagccgcgggctgccagcggcccccacccgtcccagctcggcttagcccccgcggacccctccaggccgcgaccccagggcgtcctgtgccgccacgccctccatctgtgtgggtcctctgctgggcccgccccwggtcacagccagactgactcagtttccctgggaggtcccgctcgagcccgtccttcccctccctctgcccgcccccagccctcgccccaccctcggcgcccgcacatctgcctgctcagctccagacggcgcccggacccccgggcgcgggatccagccaggtgggagccccgcagatgaggtctctgaaggtgaggtcgccccgctggcttagggcgggatgcwctgctctggtgtgagcccgggctgctgggcgcatccggcgctggccctgccctgctgtgggtgtgtcgcaaagcccgcggtgacagcggccaggtgccaggtgtcccctgtgtggcccggcgggtggcatggtgccctgaggcctgccctgggcgcccaggcggctgggtctgggtgcggcccaggctgattctgtccggggggctctctggtctctgtggggccacatggctgtgaatgggggtcccagactcagggggctgcagccggggagggggcccaggccctgggtgtggcagggatcgagtgtggttgtgcggctgtgtgtgtgatcttgtctctgggagtgaaccatgcatggccctggttgtgtgtctgtgtctgtgcgtgtgtggtggttttgtgtgtgtgaccgtgtgtttgtttctgccgagagtctgtgactgttaaatactgtgtgttcttctgtgtgtctttctgtgtctgtctgtatctatgtacctgttgtgtttctgcctgtgtgtctgtgtttttctgtctgtgtctgtcacatttctgcctgtgtgcctatgtgtgtatctgtgtgtgtctatgtctgtcgtgtttctgcctgtatgtgtctgtgtgtggctgtgtgtctgttgtgtttctgcttgtgtgtgtctatctgcgtgtgtctgtgtgtctgttgtgtttctgcttgtgtgtgtctgtgtctgtcatgtttccatctgtgtgtgtctatctgtatgtgtctatgtatttgccatgtttctgtatgtgtgtctgtgcatgcctgtgcgtctgtctactgtgtttctgtctgtcacatttctgcctgtgtgtctgtcatgtttctgtctgggtgtgtctgtggtgtttctgtgtgtgtctatctgtgtgtgtctgtgtatctgccatgtttctgtatgtgtgtctgtgcatgtctgtgcatctgtctgctgtgtttctgtcacatttctgcctgtgtgtctgtcatgtttctatctgtgtgtgtgtctgtgtgtctgccatgtttctgtgtgtgtgtctgtgcacgtctgtgcgtctgcctgctgtgtttctgtctgtcacatttctgcctgtgtgtctgctgtgtttctgcctgtgtgtgtctggctgtgtctgtgtgtctcgagtgtgcacacacggtggtggcctgaggtgcatgttggtggaatcactgtaacttgtggtccaccattaaccaccagctgcacctcccgggtcccgccccctggtccctgctggcccctgtgtgacggagctccgtacatgctccctggggagcccccactagagagatggggaaagcgaggctcacagggggccatgtgacttagggccccaacaaggctggccggagtctggctggctgggggagtccccgccctgcactgtgtgggctggggaccctgttggtgtcacaaacaggaaatgttctcggaaatggagctttgcgatgaggggaggtgggcccatcagggtgtggagtgtgtctgcctccgctaccatgtgggggtccacgcccatgagcgttcagatctacagcaggcatgggagggtctggccggtccctgaagtttcagtcccaaaagggccctgtgggtccaaggtccaaggccgacaggggtgacacggagcctcagggctccctgctggctgcccgggcaccttgtagggagttgagctgtgagtacagccaggagccctgcagaggtgagagccagggaggcctgagctkagcacccgcaggcatggagatcagaagctcacccccattgcacagagcggggaaactgaggctcggcaaggtggagccccagcctggccacggcagatcagggactagagcctccaagcctgtctgggggaggtggggtgggctcaggccgtgacaggcaggcggggcgggcagggtggkgtgctgaggagaggggacttgttgagaaatggatggatgatgaggtgacgygctccagggagtgggggagggggcacgaggatggaacatggggcggaggagaggcctgctgtttgggaaccaaggatcacattccactggcaaccaggcttggggcagccaggcctggtgcccacgcccagcccagcgcccgggcctctggaaacagcgccggacagagccctccgagtcacacgacctgcaagccggrtaccctgtcaggggtggcatcggatgagggagarctcactgtccgccttccagaaagaagccaggaattaagacagagatttctggaacccgggacccaggcagattcccatcaaagttgcaggacctcagcctcttgggagttgcaggacctcagcctcttgggattctagaattgtgaggccttctgcgtcccaggactggaagcgtgttagaattccacaaccctgaacccgctgagggcaaacgtctgctctcagactgcaaaattctggagttattcaacatcgaaaagsgatcttgggtccacacctctccccagacacagggagggacagtaattttcccaagagccgcagtgctgctctactsccccaccgcgtgggggcccctgctacccctcctggccaatgcaggagggaagggaggccctgcccggtccccccattggcatccttgcctggagaacttgagatggctgccatcgcctgaagccagggtggggagtggaggtggggggattggaaacagccagctgtggccagaaggactcagtgccagtttccaggctcccctgggccaagggctctgggccatgcatttgctcccagccaccggaggtgtgagggagttccgggtgtgtgacccccggtgagtggagtggagtgtggtcgaggagaccctgagacccaggagggactggaagttgctccaggcagaggtcgggtcagtggccgcagggacagccgagtcccaaggaatgtccagaaacagcacataccagctctcgagggaggaacgccttgtcccaggggaaatcccagtgcaggaatccaaaccccaggcgccaaagcagcccggagtggagggcaacgatcgccagaggccgcgaggaaccccccaccgcatctgctctccaggcctcagtttctcctctggaagccctgcctcccaccacggtggcagtggccttagctgtcttcccaggaagggagttcagtgccgctgtcaggagctggataatttatgaggctggatacagcgtagccaaggccagaagccaggccaaagcgtcacaagtgagatggggagtgagggccacagtcacccatttgaccgccctggaatgcgttagctgctgcgaccccacagcccaggccctgcctcagggccagcatgcattgagtgcccgctgtgctgtgctgagtgctgcgcgtggatcccttcactcccgtcatcagcaaccccgactttttttttttttttgagatggagtctcgctctgtcgcccaggctggagggcagtggcgcgatctcagctcactgcaagctccacctcccgggttcacaccattctcctgcctcagcctcccragtagctgggactacgggcgcccgccaccacgccyggctaattttttgtatttttagtagagacggggtttcaccgtgttagccaggatggtctcgatctcctgacctcgtgatccgcccrcctgggcctccctcttttcttttctttttcttttttttttttttttgagacggagttttgctcttgttgctcaggttggttcagtggcacgatcttggctctggggccctgtttccggcccacaaacatcacttcccctgtcgggttcaagcgattctcctgcctcagcctcccgagtagctgggattacaggtatgcaccaccacacccggctaatttttgtatttttattagttgagatgcggtttcaccatgttggtccggctggtctcaaactcctgacttcaggtgatccgccctccttggcttcccaaagtgctgggattacaggcgtgagccaccacgcctgaccgtaataggaccttttgagccttaactgcctggcacctccatctcgcacacagtcccattcgcccacctttgcccacccagtccctccaggtgacttgggggtgtgtcagggcaagaggcaggagacccgggttccatcctagcctcctgggtgactttacaaccagccacaaccctctggactttgacatgacccatggggtatggggagctggttttgttttgttttgttttttagacggagtctcgctctgtcacccaggctgcagtgcagtggcacgatctcagctcactgcaagctcctcctcccaggttcacgctattctcctgcctcagcctcccgagtagctgggactacaggctcccgccaccacgcccggctaattttttgtatttttagtagagacagggtttcactgtgttagccaggatggtctcgatctcctgacctcgtgatccgcccgcctcggcctcccaaagtgctgggattacaggcgtgagccaccgcacctggccgttttgttttcttgagatggagtctcgctctgttgtccaggctggagtgcagtagtgcgatctcggctcactgcaacctctgcctcccgggttcaagcatttcttctgcctcagtctcttgagtagctgggattacaggcgcccgccaccatgcctggctactttttgtatttttagtgaagatggggtttcaccatgttggctaggctggtttcgaactcctgacctcagatgatccacccacctcaacctcccaaagtgctgggattacaggcattagccactgcacccagccagaagctggtttttgaaccatctcattttatttttacttcactcatcacacctggccccatttttttgttttttggggtttttagcgtttttgtttgttggttggttggtttttttttttttgagacagggtctcactgttgcccaggccggagtgcagtggcacaattgtagctcactgcagcctcaacatctggggctcaagcaatcctccaacctcagcctcccaagtagcagggattacaggtgcataccactacacccagatatatatatattttaagagatagggtctcgctatgttggccaggatggtcttgaactyctgacctcaagtgatccgcccactttggcctcccaaagtgctgggataagaggcgtgagccactgcgcctggcttggctccgattttgttgtgcattgtggctgagcgttagccccacacagagtaacaggtccccgcctgctgctctctaccaaccatccctggggaacctgccattccgaagaagtgttttttgttcccaaaatagaactggatttcagggtttatttcttattataaaaccgacaccatgaaaatggaggaaaaggccgggcacggtggctcacgcctgtaatcccagcactttgggaggccgaggcgggaggactacttactacagggtatgtgcctgtagtcccagctatttgggaggctgagatggggggatcacttgggtccagaaggtcgaggctgcagtgagccttgattgcatcactgcactccagcctgggtgacagagcaagactctgtctcaaaaaaaaaaaaaaaaaaaaccggagaggatatttgagctggggcattgaaggttgtgtaggagttcaccagagctacttacactgaaatgcagaattaatcacaagcaaatcttctctcgcctcccaggtgtgcctgaaccagtgccagcctgccctgtctgcagcatcggcctgatggggtggtgactgatccctcagggctccggagccatgtggcccaacggcagttccctggggccytgtttccggcccacaaacattaccctggaggagagacggctgatcgcctcgccctggttcgccgcctccttctgcgtggtgggcctggcctccaacctgctggccctgagcgtgctggcgggcgcgcggcaggggggttcgcacacgckctcctccttcctcaccttcctcwgcggcctcgtcctcaccgacttcctggggctgctggwgacyggtaccatcgtggtgtcccagcacgccgcgctcttcgwgtggcacgccgtggacccwggctgccgtctctgtcgcttcatgggcgtcgtcatgatcttcttcggcctgtccccgctgctgctgggggccgccatggcctcagagcgctacctgggtatcacccggcccttctcgcgcccggcggtcgcctcrcagcgccgcgcctgggccaccgtggggctggtgtgggcggccrcgctggcgctgggcctgctgcccctgctgggcgtgggtcgctacaccgwgcaatacccggggtcctggtgcttcctgacgctgggcgccgagtccggggacgtggccttcgggctgctcttctccatgctgggcggcctctcggtcgggctgtccttcctgctgaacacgrtcagcgtggccaccctgtgccacgtctaccacgggcaggaggcggcccagcagcgtccccgggactccgaggtggagatgatggctcagctcctggggatcatggtggtggcmagcgtgtgttggctgccccttctggtgagtaggggctctgcggggtcctgctaccctcctgactggacctctggtcacccagggtggatttagatcctgatggtgggaccgggcgcggtggctcacgccggtaatcccagaactctgggaggctgaggcgggaggatcgcttgaggccaggagtccgagaccagcctggccaacatggtgaaaccctgtctctactaaaaatacaaaaattaaggccrggcgtggtggctcacgcctgtaatcccagcactttgggaggccgaggcgggcggatcatgaggtcaggagatcgagaccattctggcyaacacrgtgaaacactgtctctactaaaaatgcaaaaaaattagccaggcgtggtggcaggcacctgtagtcccagctactctggaggctgaggcaggagaatggcrtgaacccaggaggcggagcttgcagtgagcagagattgcgccactgcactccagcctgggygacagagcgagactccgtctcaaaaaaaaaaataaaaaataaaaaaattagccagacatggtggcatgtgcctgcaatcccagcactttgagaggtcaaggcaggaggattgctggagcctgggaggttgaggctgcagtgagctatgattgcaccactgcactccagcctaggtgacagagtgagaccctgcctccaaattaaaaaaaaagaaaaaaaatagaaagcagccgtagaaaacacataaatgagtaggcgtggctgtggccaataaaactactgatggatagatgatgaaatttgaatttcatgtcatttttatgtcactcaatttttgcctctattttgttttcctctaaccatttaaacatggaaagaaattcttagtaaaaaacaaaacaggcygggcgtagtggctcatgcctgwaatcccagcactttgtgaggcrgaggcgggcagatcatgaggtcaagagatggagaccatsctggccaacatggtgaaaccccgtctctactaaaaatacaaaaaattagccgggcgtggtggcgcacgcctgtagtcccagctacttgggaggctgaggcaagagaatcgcttgaacccaggaggcggaagttgcagtgagccgagatcacgtcactgcactccagcctgggtgacagagcgagactccgcctcaaacaaaaacaaaaacaaacaaacaaacaaaaacaggccagccacggtggctcatgtctgtaatcccagcgctttgagaggccgagacaggcggatcacctgaggtcaggagttcaagaccagcctggcctacatgttgaaaccccatctctactaaaactaaaaaaaattaactaaccatgatggcacactcctgtagtcccagctactcaggaggctgaggcatgagaattgcttgagcccaggaggtggaggttgcagtgagccaagattgtgccactgcactccagcctgggtgacagagcaagactctgtctcaaaaaaaaaaaaaaaaaagaaaagaaaagaaagaaagaaagaaaagaaaagaaaaaaaacccaaagcaagtggcaggccagatttggcccatgggtcaacccttgctctaaaccctcccatggctccctgttgccctcagaagaaagttctcacaggcacttcctgcagacgcaccttgcccactcccatttgcccttcagtgacttccctaggccaggtcaggcacctcttctgggctctgacattgcttcctcctcacagctttgcccaccccatgctgtaactccccggacccagtttccgtctcccgactggactgtgagcctatgagggtgcgccctgggagttcctcagctgctgttgctgcttcattcagcctacaggacctactgctcaggaaatgatttgattgattgattgatttaatttatttagagatggagtctcgcactgttgcccgggctggagtgcagtggtgcgatctcagctcactgcaagctccgcctcccaggttcaagcgattcacctgcctcagcctcccgagtagctgggattacaggcgcccgccaccatgcccggctaattttttttgtatttttagtagagacggggtttcatcgtgttagccaggatggtctcaatctcctgacctcgtgatctgcccgcttcagcctcccaaagtgctgggagtataggtgtgagccaccgcacccggccaaattattttattttattttaagatggagtttcgatgtgtcacccaggctggagtgcagtggcrcaattttagctcactgcaacctctgcctcctgggttcaagggatcctcccacttcagcctccggagtagctgggactacaggtgtgcaccaccacacccggctaattttgtatgttttagtagagatggtgtttgaccatgttggtcaggctgatctcaaacaaagtattttaatataatgtaacatttaattataatataattgtatgatatatgatatatatcaattataggccacattataattatgaataattatcatataattgattattatatattatatactaatttgtagataacattcttattttaaatatttttaaatatagtttaaaaatttcctgccaggcgcggtggctcatgcctgtaatcccagcactttgggaagctaaggcgggtggatcacctcaggtcgggagttcaaggctagcctgaccaacatggagaaaccccgtctctactaaaaatacaaaaaaatcagccagatgtggtggtgcatgcctgtaatcccagctactcgggaggctgaggcaggagaatcgcttgaaccsaggaggcggaggttktggtaagscgagaacctgccattkcactccagcctgggcaacaagagtgaaactccgtctcaaaaaaaaaaaaaaatttcccatcaatcctgacctatagataaatataatttttattatttaaatattttatttatggccaggtgtggtggctcacacctgtaatcccagcactttgggaggccgaggagggcagatcacaaggtcaggagatcgagaccatcctggctgacacagtgaaaccctgtctctactaaaaatacaaaaaattagccggatgtggtggtgggcgcctgtagtcccagctactcgggaggctgaggcaggagaatggcgtaaacccaggaggcggagactccgtctcaaaaaaaaaaaaaaggtatttatttatttattttgagacaggatcttgctctgtcacccaggctggagtgcaaccatgcctgggtaacttttctatttattttaactttttgtagacatgaggtctcactatgttccccaggctggtcttgaactcctgggctcaagtgattctctcctatttacctcccaaagtgctgagatcacaggcgtgagccactgcctggctaagagtgcgctaatttatgaacccatcaaaaggagctcagagcggttagtcaactctcctgaggtcacccagcaatgcagtaacagagtggacactggccgggcgcagtggctcactcctgtaattccagcactctgggaggctgaggctggtggatcacctgaggtcaggagttcgagaccagcctggccaacatggtgaaacccccatctctacgaaaaatacaaaaattagccaggtgtggtggcagccacctgtaatcccagctacttggaaggctgagggaggagaattgcttgaacccgggaggcagaggttgcaatgagctgagatcgcaccactgcactccagcctggacgacagagtgagaccctgtctcaaaaataaaattaaaaaacggagtggaccctggatctcaagggaccccgggcagggaccggggcgggcggggctggaggcgggggcccaggctgacagctctcccctttgcaggtcttcatygcccagacagtgctgcgaaacccgcctgccatgagccccgccgggcagctgtcccgcaccayggagaaggagctgctcatctacttgcgcgtggccacctggaaccagatcctggacccctgggtgtayatcctgttccgccgcgccgtgctccggcgtctccagcctcgcctcagcacccggcccaggtcgctgtccctccagccccagctcacgcagcgctccgggctgcagtaggaagtggacagagcgcccctcccgcgcctttccgcggagcccttggcccctcggacagcccatctgcctgttctgaggattcaggggctgggggtgctggatggrcagtgggcatcagcagcagggttttgggttgaccccaatccaacccggggacccccaactcctccctgatccttttaccaagcactctcccttcctcggcccctttttcccatccagagctcccaccccttctctgcgtccctcccaaccccaggaagggcatgcagacrttggaagagggtcttgcattgctatttttttttttagacggagtcttgctctgtcccccaggctggagtgcagtggcgcaatctcagctcactgcaacctccacctcccgggttcaagcgattctcctgcctcagcctcctgagtagctgggactataggcgcgcgccaccacgcccggctaatttttgtatttttagtagagacggggtttcaccgtgttggccaggctggtcttgaactcctgacctcaggtgattcaccagcctcagcctcccaaagtgctgggatcacaggcatgaaccaccacacctggccatttttttttttttttttagacggagtctcactctgtggcccagcctggagtacagtggcrcgatctcggctcactgcaacctccgcctcccgggttcaagcgattctcgtgcctcagcctcccgagcagctgggattacaggcgtaagccactgcgcccggccttgcatgctctttgaccctgaatttgacctacttgctggggtacagttgcttccttttgaacctccaacagggaaggctctgtccagaaaggattgaatgtgaacgggggcacccccttttcttgccaaaatatatctctgcctttggttttattttcctttgggtccagaagttttcaatctctggagtttgtgcattgggcctcacccggagcagacgagggcagggctgggaaggatggggagggacatagaggattcggttcctcccccaccttgtttcttgagtgtttcctaatcacttgatgggtggtaccacctagaattcttccagcagcctgtaatgggagggctacaggttagccctggaacctgcaatcaaaccacctttgaatctgtgtgtcattaaaagtagatataaatgggccgggcgcgattgttcatgcctgtaatcccagcattttgggaggccgaagcgggagggtcacttgaggccagaagttcgagaccagcctggccaacatggtgaacccctgtctctactaaaaatacaaaaattgcagggcgcggtggctcacgcctgtagtctcagcactttgggaggtcgagacgggcagatcacctgaggtcgggagttagagaccagcctgaccaacatggagaaaccccgtctctactaaaaatacacaaaaaaattagccgggcgtggtggcgcatgtctgtaatcccagctacgcgggaggctgaagcaagagaatagcttgaacccgggaggtggaggttgcagtgagccgagatcacgtcattgcactccagcctgggcaacaagagcaaaactctgtctcaaaaaacaaacaaacaaacaaacaaacaaacaaaaaattagccaggcatggtggcgggcgcctgtaatgccagctactcagaaggctgaggcaggagaattggttgaacccaggaggcagaggttgcagtgagccgagatcatgccactgcactccagcctgggcgacagagtaagactccatctgtaaataagtaaataaataaaacagagaaagagagagagagatgcaaaagcgtggagtgatgcccgtttcctccactgttcacttgttcacccagcaacctttcaaacaccacagtgttctgtacagcaccttgcacatagtacgtgctcaataaatattggtagaaaggaccagtggctgggtcttcgtggagcacctgtcgcctgcaggcacgtaagctcatgcctgtgcggtgcttaatgaagtgcctggtacacagtaggtgctcaagaggtattcagtgttgccacagtttcagccagccccccagccccacatctctgcattcccccaaacttcccccaaaatgacacaccaggctgcagagatggaaggtgcctttattcaccatgagccctcagggtacatgcggtgcaacccgtctcctgccctccttttccctccaaggacctggatctgagccaggaccggtgaagcccctgttttcaccaccgcacactccctaccaccgcctgctggagaaataaggtcacttgctgcttctgggggccccaggctggaagggacaggagaggacgagaaccacatgaaccagggctaagtcacagccaagctacggccccccgcggtaagggcgggctcctggctcccccagagtggggcaaagggctggcgccaaagctggggactcagacagctgggaactcaggagggctgccctaggggcaggactaggagtgacagatatggtgggtggggtggacttctggggtcccacccggggcttgggagagacggctggcttctggggggttgaggagacctgtgactgtggggccaggtaggaggcttggggtaagcctgggatggggccaaggctggcctggatgccacatacctgatcatggggctgaggcagaggctgggggtctttgctaggggctggggtggggtctctgggggatgggcctgggggctgaggttgggctggggcaggggcctcaagctggattctagggtcaaggccaggggtctgtgggcagattccatttccagggctcagccagattcttgaactggtgtgagttctggaactggattgggttccagaaacaggctgggttccagaactaaggtgggctccagggctgggctgaattcttgagccggtctgggtttcagagctgagcccggtctcagagctggactgggttctggaactaagttgggctccagagtcgggctgaattcttgagccggtctgggtttcagagccaaactgaatcccagaactgaactgggttccagagctggactgagcctcagagctgagcctggtctcaggactggactgggttctggagctaagatgagctccagggctgagctgaattcttgcagtggtctgggtcccggagctgagctggtttccagaactagtctgagttctggagctgggttgggctccggaaatcagctgggttcccgaactaagctgacttccagagctggcttgaattcttgagcttatctgggtcccagagctgggctgagttccaaagctaagctgactttcagaactgctctgcttcccaaagtccagttgaataccagagctgtctggggctgtggtctggagctggtatctagaacctggcagggttttagaggcgaattgagtcccagaggctggtcgagctcctgggcagcgctgggtcctggagctgggcctgctgtcggaactagacagggctgtggagcttaattctattgctgcgatggcctgggtcccaggactagattggactccagagcttagctggattctggaacttggctgggtctcagctgctgtctgtgttttggagctggctgggatttcagaaccagcctgtgctccagaactgagctgagttccagagctgggtgcggtgcttgggctggattgagctctggagcttggccaggccttgaaattggtctgggtcctggaagtaaactgcattctagagctgagctgcattgtgcaaggagagtggggcttggcaccaagctgtgtgctggagctgggtcttgcttccaagatggatggggttccagagctggtctgaatcctggagttgggcctggttgtagcactaggcgaggttctagagctgggctcagtctcagagctggaatcatcactggagctggactgggctgcaggatggggatgggcacttggatgcaactggggttgggatctggactgggcagccgtgtggacctgggtttctgagctggtctgagttcttgaataggatttggtttgggagctgtctctgaatcctgagctgactggggttccagagctgggctgcttcatgaatctcacatgggttccaaaattaactggggttccggagctagaccgagtgtccaggtgtggctgcatcgtggagctgtccagagttccagagtcagcttgagttttccagcagggcttggtctccgagctagcctggattctggaactgggattggtctccaagctggtctgggtcttaaaatgtgtctgggttccagagtttggcttgttgtcagggctcagctggattctagagatgtgcttcgtctcagagctggcctgggcttcagagcagggcttggtctcagatcttatctgggttctagagctgggtttggcctcagaggtggcctgagttctagaacagggcttggtctcaatgctgggattggtttcagagcttatctgggttctagagctgggcttggtctcagggctgacctgagttctagagctgggcttggcttcagatgtggcctgaattctagaacacggcttggtctctatgctgggcttggtttcagagcttatctgggttctagagctgggcttggtctcggagctggcctggactctagaacagggcttggtctcaatactgggctctgtctcagagctcatctgagttctagagctgggcatggtctcagagctcatctgggttctagagctgggcttggtctcggagcccatctgagttctagagctgggcatggtctcagagcccatctgagttctagagctgggctcggtctcagagcccatctgagttctagagctgggctcggtctcagagcccatctgagttctagagctgggcatggtctcagagcccatctgagttttagagctgggctcggtctcagagcccatctgagttctagagctgggctcggtctcagagcccatctgagttctagagctgggcatggtctcagagcccatctgagttctagagctgggcatggtctcagagctcatctgggttctagagctgggcttggcctcagagcaggcctgagttctagaacagggcttggtctcagtgctgggcatggtctcaaagctcatctgagttctagagctgggcttggtctcagggctggcctgagttttagaacagagcttattctcaatgctgggcttggtctcagagctggcctgggctctagcacatagcttggcctcagatctgggctggattctagagaagggttgggttctggagttgggctggggctccaaattggattgggttctagagaggaacttgtcctccgatctgggctgggttctggagcagggccggggcagggggctgggctccgggctggggctgtgctgggcccccccagggcaaactagccacaggcctctctggcctcgccgatggcggcccacacttccaccacaaactcgtcggggaaggcgaactcgcccaagacggagtctaaacagcgtgcaaactcctgggcgctcgctgtcttcttggacgtctccaccatggtggacgctgcgggccgtgccagaggggatgtcagtgagggcactccccgcgcccaacttcccgctgggacccctgcctcctcccgtaggcttccctccccccagggccccctggcttaccctggccccttacccagctcggggtcccgaatgcccatgtagctttccagcaggtcatcaaccttccgagatgcctcctcctcaaactcactgggctgggggcacacgggagggaagtcaggggtgaaaagctttggagccctccagcccagccccctcccgacccccacccctaagggaagagtagactggaccctcacacgagtcagtagtgctggtaccaacatcattgccccacttttcaatgaggacccattttgcaggcagagaaactgaggctccgaggagaagttcttacccaagaccgcactgactcagtggaggagctgaaggtgcagaagcctggggagagcccctccccttcactcaccgcttcctccactgtggcagcccccccagaacgaagccgcagggtctccctcccgctggtcactttcgcctctactggacatttgctggaccgacttctctggccaatcatatctggagggaacagagtgagggatggccatgggttctgggtggagccacatctttgtaaaccctgggaggccaacagccgagcctttctagaatcttcctccccttcaaagtcctccttacatctgtacggcaagtctccagagacctattcgagattccacacttcgcatccccagcaaactaaatcacaagtccagaatgaggtgttgtaatggagcaggtttagaactaacatcccagttccatgccctcactctccctcttctagcgactttctctagaagggactgcttgggaccctccttgtggtaggatcctcaatctagatatgttcttgtctgggttccagaacccggcttagtgtcaggactgaggtgctagaaacacacttagtctcagagctggcctgggcttaagagcagggcttggtctgagagctggcctgggctctagagctgggtttagtctcagactaagcttgatttttttttttttttttgagatgttgtcttgctctgtcacccaggctagagtgcaatggcacgatctcggcttactgcagcctccacctcccaggttcaagcgattctcctgcctcagcctctcgagtagctgggattacaggcacctgccaccatgcccagctaattttttgtatttttagtagagacagggtttcaccatattggccaggctggtctcgaactcctgacctcgtgatgcacccgccttggccttccaaagtactgggattacaggcttgagccactgcacccagccaggtttttttttttttttttttgatacgatggatcacctgacctcaggtgatccacctgccttggcctctcaaagtgctgggattacaggtgtgagccaccacgcccggcctaaactctatttttaggcatggcttttggagttcacagccacggcaggg

SEQ ID NO: 97770 - DNA, 28117 bp, Homo sapiens
cctctggggacctgagccccgggggccccatcggcctgcagaggggacggctggggtcccgagcaactctgcctccatccacgtgggaagcggaccctcctgccctcagcttgggtttgggggcctcagtgcaggacatctggcctgaacatcgactgtggggacagccctcgccctgccaagcactgcggccactcagcagctatgttcccgccgcagtggggccctgacgcccacctcccaggtgcccctcgagcaaaaacctctggcgcctccaatccagacccaccacagctggagggccaggcctcctcttccccaggctgccacccacgctggcggagctcagggctggggacttgtccttctcttccaacgtaggccactcagcaactggcatggagggcccaggcaacggagacgttttctccatggcaggacagagcgggaggccgggccttgggccacaggagaccagctcagggcggaaggtcaggctccccgccccctccacgtggagacatggcctagggggccaggcccggctccacaggagtctccttcaggactggtgtggatgtccgccgcctctttcttgtttaagtgatgtgatgtctccgaggaggggagagaagactttgtttccgactcatcaccctccaagagggcagcgctcccagtggtgggactcagcccagactgccctggggcagcttcctgggcccgctgcgctcagagggtgctggttggaggccagagctcggcagagtcacccaccctgcccttccccaggacccctgagaggggcttattggtgatggctgtgggaatcccccacttccaagatgtgcccaggatgtgaggagctggagtggaagctgcacctttgggaagaattcctctccagacctggcagagcctggtgtggggtctgagacggccggagaacctcccaggcagggctctgtgttttgtctgttacaacctccgtatgacgccacgccacccgctgttcacgtcccgtcggcctcctgcacagcccacacgctgcgcccggaaggcccctgctgtggagaagccggacccatccccgaggtccccagcgaggacacacactccacgagagcagcccctccactctgcccaggagaggggccgaccctcctcgggaaccggccagccgcgtggctcccagcatccatcaggacaagcccacgtggggtcctccctgcgtgctcagagggtctgtccagccctgggaagcgaccttggcctcagttcacagcctggtgctcatctgctggcaccgggcatccacccatcagcccccgccctgtccctccgaaggacacccagcaggcaccccccggggaggcaggggcagaggtcagaaggggtgtctgggacctggatggccagcagggacaggggcattgtcatctcaaaggcccaacccccagaggccacaccagtcctcccagggagtcctcgagtcgccctgcccagagccctggcaccagagacgccaagagcctgtggggtgactcggagcagcaggtgtggccccgggcgggcggcaccgcgtccagggcagcctccctccgctgagtgacacgggacaccagtgcccggccgacgcgcctttgcaggagaaatgtgcaaacctctgtggataccatttcatttccattcttgtgttgtctccaaggcccttttggagatatacttggtgttggttgtgttttttggttccttttcagagaactgtaaaccgaggctgacgtgctccactgactgtgccgaggggcgggggcaggaggacggcaagacctatttataatatttagcgaactcggtctccctcagatcccccgcgagggaggctgctggacccaccccgctgtcccccatgatagaagtctgtaaataccttggtgaccaatgcccacttcccctcctgggtcacctctgatggctgctgtccactgagaacgtgggcagtgtccaaattcctgtactgtaaagactaaaaggcgtttgctctgagactgacaaggcggaaacttccatgtgtctcctgccaggctctgtccccctacgccatcccgacacgtccccgttcccccgaaacctggctcagtgcaatactcccattgccatggggtccttcaccatggtactgtctccacagccctcagtccccaccccaggagaggcgcctgccacctcctcctcatctccggtggttcaatcgctccgcctgtccccaacccagtcccatttttatggccaaactgattctgaaacaaaatgaaactgcaaacctcgtgtgtcttaactccccccagggatgccactccattcctccgccccgtggtctggtgcgtgacaatccaaagcgccgagacgagggtgctgtgtccctcaaacccagagtggtgggcgcctctgaaaccatacagccactcctggccccaaacactggtttgcatcccaggttcctcgcccacctacccccgccacaccccgtctttttagagatctctctaataaatcgggtaataagcatccgcctgtttgcctttctgtgggttccggaggtctggttgggagtctgaggagtgactttgttctgtgttttttgttttctgtttttgtttgtttgtttgttttctttttaagagatggagtctcgctctccacccaggctggagtgcagtggcgcaatctcagctcactgcaagctccgtctcctgggttcacaccattctcctgcctcagcctcctgagtagctgggactacaggcgcccgccaccacgcccagctaattttttatttttagtagaggcagggtttcaccatgttagccaggatggtctcgatctcctgacctcgtgatccgcccacctcggcctcccaaagtgctgggattacaggtgtgagccaccgcacccagcctgtgttttgttttttttttttttgagatggagtctcgttctgttgcccaggctggagcgcagtggagtgatctcagctcactgcaacctctgcctcccgggttcaagccattctcctgcctcagcctcccgagtagctgggaccacaggcgcccgccaccacacctggctaatttttttgtatttttagtagagacggggtttcaccacattggccaggctggtctcaaactcctgacctcaaaggacccacccgcctcatcccaaagtgctgagattacaggcgtaagccaccgtgcctggcctgaggactgactttgaatcttagagaagagagaaacctttgtgagattgatgctgataccagtaataggacccaaacaccttaccagctgtgaaccttcttcaggtcccagttcagctcagaaaacattttattgtttccaacatctttgcagccccccaaagtttgtatttgttctgctagagcggttccaattcagtcacgtttggaccccttgaagggaacacatttatcttggactcccaggttgagaaactacattgaaaacaagatcctggccaggcgtgatggctcacacctgtaatcccagctactcgggaggctgaggccagagaattgctccaacctgggaggcagagtttgcagtgagctgagatcatgcccctgcactccagcctgggcgacagagcaagaaaatgtctcaaaaaaaaaaaaaaaaaaaagtaagatcctgtctgtaagggagccgttggaacgtttcagcacagctgttttataaactgaacatggaggtgatctcgttgttttaagtttgttttttgtttttttgttttttttttttgagatggagtctcgctctgtcacccaggctggaatgcaatggtacgatctcagctcactgcaacctccgcctcccaggttcaagcaattcttcctcggcctcctgagtagctgggactacaggtgcctggcactacacccggctaaattttgtatttttagtagaggtggggtttcaccatgttgacaaggctggtctcgaactcctgaactcaggtgatccacccaccttggcctctcaaagtgctgggattacaggactgagccaccgcgcccggcccatgcaagtgatctcttaatgtgctgcaaggatgcatctgaattttgggaagcacagggtcaggccttcgctttgttttgggccatcccatcagcatgacaacccacatctcaggaccggcaaggtcatcatctagagcggcaggagatggtctcttcttcctctgtaaggttccatccttgccttaacaccaagcaaagcatacaaagccagcgtttacggggatgttatgaagttgtattccaagataaacgttttatttatttatttatttatttatttatttatttgagacggggacttgctctgtcgcccaggttggagtgcaatgatgcgatctcaactcacaggaacctctgcctcctgggttcaagcgattcttctgcctcagcctcccgagtagctggaattacaagcatgccaccatgcccagctaatttttgtatttttagtagagacggggtttcgccatgttggacaggctggtctcgaactcctgacctcaagatccacctgccacggcctcccaaagtgttgggattacaggcatgagccactgcaccccactcaagataaacattttaattttctttttttttttgagacggagtcttgctctatcgccgaggccatagcgcagtggcacgatctcggctcactgcgacctccgcctcccaggttcaagcaattctccctgcctcaacctcccaagtagctgggatcacaggtgcatgccaccacacccggctaatttttgtattatttagtagagatagggtttcaccatattggccaggctggtcttgaactcccgacctcaggtgatccgcccgcctcggcctctcaaagtgctggggttacaggcgtgagccaccgtgcccgggcaagataaatattttaaaagttagcttaaattactatcatcctccataaacaggccttcccagccccgagtggttagaactgcacggggtggtggtagcagccaccatgggctaggggagctcaggatgggacatcagcgtcttctaggtctctggcctccagccttgcccctgaagtccgtcctcccacgccaaacttgtttcaacagcaagtcccccaaaccctgctcacaaccctcccacgggtccccagcacccacaccacaaagctgggcagcctgggttgagaaggcaagtgttaagagtgactttccctctctgagcctcagtttccccgtctctaaaatgggttgatgggggaatacagggagttatcaaagtttttgtttttttttaaagcttaactcccaaaatacataggtgttcattggcaggtggtggagcataacgatgactctcataagaaggcttttcagtttctgtccccgcgcccgccctctgccctctggagctgcctggcacctaacaccttcccggttcctcgcctttcggggacctcgctccccggacacgcctctcctcggccacgcccctggccacgccaatgaagcgctacttccgacctagacccgcttcttattggtctcgcctcggcaggcccctccctgcacaaggttcctagtttgcccttgccccgcccacagtttctcaggccccctgaggcgtggggacccgcctagggctgcctccagcactgcctgaaaggagactccgccaccctggaggcaacaatcccactggagtcaatcacgcggtccacatttgcagacgtagtggaaagtctggggtgtcggagtccttgcgggctggggcgacgggatgggttgctctttcccggctcaggcgcaaacggggcagcctggagagcgccgtgggcgaggaaggcccccagcgcaggcttcggctattggtgttggtgccgcggccactggcccagccgatgggtcgggacacacgctcgcgctcgcggtccgcgggtcgccggggccgaaggcggcagagtcagagcgggagccgaagtcggagcaggagccatgggcgrcgaaaccgacggcgccgggaggacgagggacggcgcagacggaggcggcggagccgggagcgcaggtggggtcgctgcgggagcagcgctggggatccggctcctacctcaggagcgcccgaccgagggttggagatcccggggaaccgggaaacccccgacttactcggggagggcttcctrgagaaggggacaattgaycaccggttggaattaacctggcagcggaaggaaggcgagaggcgttccaggcaggggaccgggcggttggagggacagcccggagccgggtgagcgaggcggcggggaggtaacgagagatcagatcatatcatatcgagccctgtgtgctcagcacattagatcttggctattagtcggagggaaatggagagtcttgagaggagtttgggtaggggagtgacgtggactgacttaactctgcatactttctggctttgaggtggagaagggatggagcggggtaggcaggagcggcatcagagtaggacggcacaattgtccagacagtagatgatggcagtctcgatgggagggaggctgtagtcaaccacagcgggcaaagtgcgtagatttcagagggattctggaagtagaggagacaacatttgctaatggaggtgggctgtgggagggaaaaagactcggtgtcagctggcaggactcacagctgattcctagtrcctgaatctcagcttccccatggtccttttcttctggagatggggcacttggtcggatttgccttgagccggctccagtacagagaaaccaaaatggggacagggactgattcccagaccggggccccagtgctggctcagccccttcgtggctgacactcaggccagtcttgccccgctctgggccaagttcactcatcggttgttggtttttttgtttgtttgtttttgagacggagtcttgctctgtcgcccaggctggggtgcagtggcacgatctcggctgttacctctgcctcctgggttcaagcgattcttcagcctcagcctccccggtagctggggttacaggtgcttgttgccacacccagctaatttttgaattttttcgtagagctgggatttctccatattggccaggcaggtcttgaactcctggcctcaagtgatctgcccgcctcggcctcccaaagtgctgggattacaggcgtgagccaccgcgcctgcccataagtcttgttaatgtcatctttgtgttttttcgcctaccattttctggtattggaattattcacaataatttgccactctagatatgtaattagaattaatgttcacgaaaattcagttgaacttgtggccaatatttaagggctctgcaatgattggtttcaacatagtttagatttttttgacatgagcttaatgggtagagcatttaacaaaatatttggcagttctctgtgtacaaagacccctaaacgtgactgagcgcagtggctcacatctgtaatcccaacactttgggaggctgagacaggaggcttgcctgagcccaggagttcaagaccagcctgggcaacatagcaagacccctctgtacaaaaaaatgtaaagagttacctgggcgtggtggtgtgtgcctgtagtccccgctactcaggaggctgaggcgagaggatggcttgagcccaggaggtcaaggctgcagtgagctctgatcatgcactccagcctgtgtgacagagggagactctgtctctaataaataaaaatatagaccttgtctctagtagactctgtgtctagtagaccttgtctctaataaataaaattraaggcccctgaaccacccctgaggttgtgcatcttccattccctgcgctctactctgttaactcctgtccatcctgtgggactagttcaaataccacttccatctaggaagccctcccttgacagcctaaatgtgttcgggtcccctggttcgtacccttataattcctgcgccaccagccccagccacctccctgcccgcgcctcctccctctcccccacactctgtctcagccatacagcctccttgttgttcttagaatgtggcaggtcagtgcctgcctctaggccctcgctcttgctctgcctcgagcactctccctccgaatccacccatcgctgcctccccactccctccagaccttggctcagtgtcagctcctgagagagcccctctctgacctcggccctgcagccccagcccctgtgctcggcattgctactctttgtggcttctgcctctgcctagtgttgcgtggtgtgtttatttgttgatgtcttccttgttggggcccaccagagggtgagcccaggaaggcagaagccatcggtatttgggtcactgctgtgtccccagaacctagaacagtgcctgctcccccacgggcacccagtaagcatctgtggagcagatgacagctgcaggcactgagcaggcatccatggtcctctccgcaggtcagattcagaggaagagcggtggcagcgctcagggatgcgaagccggagccccccgcggcccaagtggcactcaagagatgggtcctctcagtcggactcaggagaggagcagtcacggggccagtgggctcgccggcgacggcgcgcacgctygtggtctcctagctcctcagcatccagmtccgcgtctccagggcgatcccagagcccccgggcggccgcggctgccctgagccagcagcagagcctgcaggagcggctgcggctgcgggaggagcggaagcagcaggaggagctgatgaaggccttcgagacgcccgaggagaagcgcgcacggcggctggccaagaaggaggccaaggagcgcaagaarcgggagaagatgggctggggtgaggagtacatgggctacaccaacaccgacaaccccttcggagacaacaacctgctgggcaccttcatctggaataaggtgggccccgccgggtggtggcctctgtccctgtagcatttccactgtttctggagaccccaacacttgagacactcccagcctgcccttgatcgtgcaagagttggttttacacacacacgcataagcaagcttctgccgctatcagcttycttttttgacacagggtctcgctctgtcrcccaggctggagtgaagtggtgtgatctcggctcactgcaagctccacctcccgggttcatgccattctcctgcctcagcctcctgagtagctggggctacaggcgcccgctaccacgcccggctaattttttgtatttttagtagagacagggtttcaccatgttagccaggatggtctcsatctcctgaccttgtgatccacccgccttggcctcccaaagtgctgggattacaggcgtgagccaccacgcccggccagctttcttttttgacwcagggtctcgctctgtcacccaggctggagtgcagtggcgtgatcgtggctaactgcagccttgacctcctggcctcaagcgatcctcctacctcagcgttttgacttgctgggactacaggcaccaccaccatgcccggctaattttttatttttttgtaaagatggagtctcactatgttggccaggctggtctcgaactcctaagctcaagtgattttcccacctcggcctcccagagttctgggattacaggcatgagccactgcgcccagcccaccgtcattttcttgccattaactgtgtctcttgcggtgtaagcttcagccattctttgccccgaacaccagcccaacctgaaacctatctagagagccagctcttggcatcatgtrcccaggacagggttccacagttccaggcgctctgtcgtctgagctggttctttcgttctgcgcctgccatttagccaccagtcacaccagtggcataagacaacagaacttatcatctcttcgttctggagtccagaagtccaaaatcaaggcgtgggcaggtgtgggcaggaccccactccctctgggggccgaggggaggcccctcctgcctctcccagctccagtcatggccggtgattcctgggccctccctggcttgcagccgcagaacccggcctgttcctgtgttgtgtggyggtctgccttcccgtctctgtctccatacggccttctgctctgtgtgtctgtgtgtaaatgttcctcttcccatgaggacaccaggcattggatgagggcccgccacctccaggatgacctcatcttacctacgtctgcaagacctcatcactttttttttttttttttttttgagatggagtctcactctgttgcccagactagaatgcaaaggcgcaatctcggctcactgcaacctccgcttcctgggttcaagtgattcccctgccccagcctcccaagtagctggaattacaggcgggtgccaccacactcagctaatttttgtatttttagtagacagagtttaaccatgttggtcaggctggtctcgaactcctgacctcaagtgatctgcccgccttggcctcccaatatgctgggattacaggtgtcagccaccatacctggccaagacctcatttcacatggggtcatgattacagctgcaggggttcagacggggatgtgcctgtgggggacacagctcatctgaagcagcatccacttgtggagggggtggagcaggcaacgtgtgggctgggccgactgcacctgctcgccggttgcgcagttgggagctgtggggtctccaggtggcttctgcccgatgtcgtctgagaacacaacgagctccttccgcctcggggccctcacactgccgcgcccctgcctggacatgctctgccccttccccggctgttctcttccgtcaggcctcaactgacacatcccctcttgagagaccccttcctggccccttgctccccagacyccccagagttctttattgaggcacacactgctgcctggcacttcatcgccaccatgtgctgtgcacctgcggtgtgctgggcaccaccgtgagctctgggcgggcagccatggaggaggaagatgtggtcatcgttgacgcctgtggaagcggccccaggctgggttggatagaccacagagtggcccgggtgtctgggggtggtccccagccaggcagcctgtgtccctggaggcaagttctgggcggcaggggttcctggaaccccctcatggcgacggggcaccgggagcctgaggaaggtggtcgggaagtgggggctccgcgccaggctctcagacagctgctggaagaagccagctttgagggtctccaggctgggacaagcccatcagtggccacccctgtgccccgctgtgtgggcggggccccatgaccccacaggtttgctttcagagctgctgctgcccccactcactgttcctgccctgtcccacgtgcagtgggggaccctgacttgctgagggcgtggccttcacgtccgaagcactcagactcccgggtaaagcgagtcagcaggccccgagcaaggctcttctgttgggggctggggtggccccgagcaaggccctcctgttgggagttggggcggccccgagtgaggccctcctgttgagagttggggtagccccttcttaccctttgcatacatctcactcccagtgggggctccatgtctgcactgaattggatgcactgggtttcaggagtgttaaggagggggtggaagacgtgcagtgctggcaggtcacctctctctgcaaaacaagggccctggtcaatctcttggacgaaggagctgaggaggggggcgagggggcgggtctgtgctcagggcaggtgtgcctggtgcttccaggccctggagaagaaggggatcagccacctggaggagaaggagctgaaggagcggaacaagaggatccaggaggacaaccggctggagctgcagaaggtaggcaccctgccagcccactgggcagggccctccctttccagggcctggaggcccgccccctttggcaggacttgaggggcttaagtgggaagtccygggggctggcttcaggtaaggctggatccaggggctcagaccatggccccaggaaactgtttccctccacctctcggctctgctggcctcgggccttcactcccacatgctcccttcagggtggccgagagggccccagctgatctgagctgctgagtctcgggcaggagggccctctcccttcccaaggtctgtccaccagcccaggcatctccggaccaatccctgtgcccagggcagctgggtgaaggctgggcccccatcatcacagcccctccccccgcagccctgcagaccgcacggtccccgctgccctcagcctcctgtgcctgcaggtgaagcagctgcggctggagcgggagcgggagaaggccatgcgcgagcaggagctggagatgctgcagcgcgagaaggaggcagagcacttcaagacatgggaggagcaggaggacaacttccacctccagcaggccaagctgcggtgcgctggggcctccccctccctccgacccagacttggagccagggccgggcactggctgtcactctggaagccactgctctcccacccttcagggtcccacacggcacttcctgggaccttcccttcctgaccccttcccgggcggcaaggcttctgtctcctgccctcccctgctgggcagggtgcagaggagacgggcccaggtgaacggcaccccacgcatgctggacgccagtcctgcactgactgcagttgtccctcccacactccacccaggagggtggcacccccatccgcctggtttacagacaagctgaggctccggggtgtccctgcttgccttgggccccgtggcgggtgacatcaggctcctcccagctcgggcctccctggtgacgggttcccttgggttggaccagggcccgcctgcaacgcgtaccccsctgcaggcccagaacagaaacccggctctctgccccgagtggtctgcctgggggaggaggtggttgcaaggcagtgactactctggtcccccagcctgcctctgcttcagctcctccactcttccccatcacagcccacatagaagccgccatcctgggcacatcccagaggccctccaggaagcccctcccacctggcccacctccgggtccacgctgcttgcactttgtctgcactgctggcctgcgccctttggctgacccggctcactctaccttatgcctcctcctcctcctcctccaggaagccttccctgaccacccccaacgggtcaggcccctcctcggctcccactggtgtggtcaccccaagggcagggtctttagcatggagggcacagcccaggctctgatgccaccttcccctgctccccacagttccaagatccgcatccgggacgggcgggccaagcccatcgacctgctggccaagtacatcagcgctgaggatgacgatctggccgtggagatgcatgagccctacacgttcctcaacggcctcaccgtggccgacatggaggacctgctggaggatatccaggtacccagccccacccgatgctcctctgacctgcaccctcacccccaccccagccacacccgtgtcctgacccctgccccctgcccccaggtctacatggagctggagcagggcaagaacgccgacttctggcgggacatgaccaccatyaccgaggacgagatctccaagctccgcaagctggaggcctcgggcaaggggccaggtaacggcgggcatgggcctgggctccaggggagctgcgggggctacagtgttcacccagaagcctcagacttgctgtggggcctggtgctctctgcaggcctcggtttccccaactggggcctccccttctgggccgagccaccagggggcagcagcgggcagtaggccctgggagggatgagkggggcgggcctctgtctggggtgcagggccagcagcgtccagacccagcgtcccgttaacgctgactcggcrgtgccggccttatgggagccacggggctttccgctcrggtttcagtgctctcagtggctctgcctgtttgacagcaagtctcgctccacctggcctgaaggccgtgcagcccagcttcagggcgctmcctgtcccgtgcgtcagttcgtgcccctccaacctgatgggcttttaaaatcacgtttcccccccctccgtgtggttgcacacacatggtcaccggggatgctctaaagcgtctaccctgagcactgcggacatgcgggctgggccgttccctagggtggggccgtcctggacactgctgggtgctgagcaacgtccctggcctccacccagggtcaggagcacccctagtcctgacaaccgcagatgtccccagacgttgcccagagtcccctgggggcagaattgccctagatgagaccccccccscccccggtctaaaagccaaccacagcagccctgccccctccccgccaaaatccacgccccagcggctgctgtaacagtgcctggctctcatgggccacgcatccctgtcgatagacccggtccttcccctgccctccctctcaggccttgggtgccatcatggtggccgaggatcccaggaggctgggtcagtgtcatttgcagccctcagcgtggtctgtggcaggtccttcctaggaaagagcctgtggctttcctctttttcagtggagctktgtgttccccggaggtggagttcactcagccatcctgtccctccagtggtctcctccgtggggcacattctcccgtaacctcagagaggcagggcagttctccagcatcagaggtgtgtccgttaagggtcttggtgtgctcctgctggtggcagcggggctgggcaaagacttctgggtgcagtacattttccttcagaagccgcagaccctacccaccggctgcaggaagcctgggaggcgtttccagcgttgccctaggccccgccctctcctgtaagactgggaggcgtttccagcgttgccctgggcccggcctctcctataagcctgggaggcgtttccagcgtgccccaytgccctaggccccggcctctcccatcccttccatggccttctgcctccaccacgtcgctcagccctcctttcccctcacgcgttacagttggggaccccaggtggctttggtgtcttccgagggagtttstttctgattctcctttcaacatggtttccaggagtagggaaccgaggggtcttgactttgctgtccccctggagacccacagagcccctgtcctggatcttcttaaattaattggggttttccttttacttttcatttttcagagacaaggtctcgctctgtcgcccaggcgagagttgagtggcgcgatcaaggctcactgtagcctcgacttcctgggttcaggtgatcctcccacctcagcctccctagaagctgggactacaggcgctcaccatcacacccagctattttatttattttttgagaaggagtctcactctgtcaccaggctggagtgcagtggtgcgatctctgctcactgtgacctctgcctcccagattcaagcgattctcctgcctcagctgcccaagtagctgggattacagacgcgcgccatcacgcccagctaatttttgtatttttaaggagacagggtttcaccatgttggccaggatggtctcaatctcttgacctcatgatcctcccacctcagcctcccaaagtgctgggattacagaagtgagccacygtgcccagccacttctgaaaattttttgtagagatggggtctcactgtgttgcccaggctagtcttgaactcctggcctcaagcaatcctcctgcctcacctccagaagggctaggattaaaggcatgagtgactgcatgctttttctttttaatttttacaaaattaaagtttttttattatttctgtaggttattggggaacaggtggtgtttggttacatgaataagtttttttgttttttgagacggtgtcttgctctcttgccaggctggagtgcagtggtgtgttctcaggtcactgcaacctctgcctcctgggttcaagcaattcccctgcctcagcctcccaagtagctgggattacaggcacctaccaccacacctggctaattttttgtattttagtagagacagggtttcacgatgttggccaagatggtcttgatctcctgacctcgtgatccacccacctcagcctccaaaagtgctgggattacaggcgtgagccatcgtgcccggccgtttacatgaataagttctttagtggtgacttgtgagattttggtgcacctagctttttctaggaagttctaaccctacaggaggktgtgcagtagaaaacgggtgtcatcccagctcagcttcattagcctcccaccctgtgtagggcctggcctttcccccacgcagccccagggcccttggcctgcacccccagcctctagcagctgctgggaccccctaracccccgggcccccttgtgggcattcgggaggcatccagacatgcagcagcatgtccagacccggctttctatagacgctgacctggcggcacctggcctggcttcctgggagcctcgcggctgggctcttctgcttgggtttcagtgttcgtggtagccccgcctgtctgggcacggccgcgctgtgcttggctggggctgccacggattccagtgccacttagcgcccagcaaaggggctgcagctctgggtgccgattccagggtcccaggtgattggctggaggggactcgggtccgtctagactctatccagtcccctgtggtgtaggtgtgggcctcttgaccctctgtccgccagcggggactggagaaggcaggtctcgagcagggtgcctgcactggtcacccccgcccagtgtgtcaccagcagctatgcaccaagctccctgtgggcccagcatggcacagggaacagcagcagccagccccattgcccgcctcgggaagctgccatcgctggatggtcagggagggcttcctggcggaagggatgttctcactgagcatggaggatgcgaggaattcaggaagcgaatgggacagagaaggatgggtagctggcaggaagcacagygcgtgcaaaggcccagaggtggcaggggttsggcatgggcagcaaggggcagggttgygaggtgaggccagacccagcggggtgggtggaagtggcctgagagcagcactgaggccgccgggatgccacgtggtgtggggcagagcacgcggagtcaggytaggctccagcctcccagcaccccactcccgccctcagcagcctccccgtctatcgaggagggacttgagcctcgggcccctgggccagtggtagatgccagacagactccatgtaggatggggggcggcggtggggagcygtttgtcctggggcgggcccaggacttccccaggggccagcagggtggccttctttgctaggcttcacagagggaaactaaggcccagaaagggcaggccacttgcccacagtcacacagcccaggctggcagagaagatctgaattccagagagcctggctaccgagcacaccccccaaccccctcatggactgcccaaggccagggcagagttgggccaggttggtgggccgggcccacaactagggttcccagacccacatatcagactcacctggggaggggcattctcagggccagtcctggcctcccmcacgctgggggcctgggcctccaggtcaaggcctcagcaactgcatcttaacgtggctcccaacctccgcccaccccctcccctccgctgtggccagggtggggacaacctgagaccagggaggtggcgggactggatgggacccctgtgggggaagaggaggggagggggacccccccatggcaggggaggaggccctgatggggtggaggagcacgtaggaaatgtggaaccgcccccccatgcccccaccccgctgcaggtgagcgccgcgagggggtcaacgcctccgtcagctctgatgtgcagtcggtgttcaaggggaagacatacaaccagctgcaggtcatcttccagggcatcgagggcaaaatccgcgctggtggccccaacctggacatgggctactgggagagcctcctgcagcagcttcgtgcccacatggcgcgggcccggtgagcactaggtgcgggtaccagggttggtgccgtccgggtgggatgggtttcgccccctcctgagtcctgggtggggtgggtctcgcctcctcctgggaccatgtggggtggagaggggcaggaaagtgccgactggccggggccagcctgtgagtgacgaaggggggccggggggcgcgtagtcccgtgccctagcgggaaggccccaggatgctccagtgccctcacctggagtcagccctgttggtctcacagrgctccccaggagcttccgccctttaacgagtacctggcgcgctccagcagccatggcatcacaggaagcccccaggcggcctgcctgtccccactgccttgcgcccaggcctgcgccctcccagcgctgctgcctcccggcctctggctgtgtacagatttctggagtgtttttggcaccgctgtgtaaatacatgtctcctctgctaatttgtaaatgtctctaaatttatcatgcttgttggctggtgtcctgctgggccccttctcctggccagccccagccacaagacactgagactgcagcgtgagacagagacccacctctccctgccatgggatggttcaccagggtacctgcgtcctctcgtcctctctcccataagccttgaccctgaactgaccaagcctgggcaaaggtcccagccagagccgtggctgctcgccaccttctcagggtccttgcagcaataaggggcgtgagaatctcggtggggggtggggcgcggagccccttcgcctccatgcgggtgaccccggctctgcgtcccaggctgcgtgagcgccaccaggacgtgctgcggcagaagctgtacaaactgaagcaggagcagggcgtggagagcgagccgctgttccccatcctcaagcaggagccccagtcccccagccgcaggtaggcccggccggcaccccggggacgccgatgcagacgyggagcaggatggaggggccgtsggcagcctccgcgcctccaacgctctctcctcccagcctggagcctgaggacgyggcgcccaccccgcccgggccctcctcggagggcggccccgcggaggccgaggtggacggcgcgaccccgacagagggcgacggcgacggggacggtgagggcgagggcgagggcgaggcggtgctcatggaggaggacctgatccagcagagcctggacgactacgacgccggcaggtacagcccgcggctgctcacggcgcacgagctgccactggacgcgcacgtgctggaaccggatgaggacctgcagcgcctgcagctctcgcgccagcagctccaggtcacgggtaagggcggggctggaggccagggggtggggccagtggggcgagctgggggcggggcttctccagcctcatttcccggccgaagccgctggcgtcagtggggagctgcttgctgcttctcccccgggtctctgagcgtgcrttccgtcacctgcacgcgcactggggcgttccttcattcatcctgggcttgctggcccactggccttggggccacaggtggtggaagcttttaccggccgctgtccgagcactccctgggcagcctccgtcctaagacagaggagaaaatactggcttcagaaaacccctgggccaggaccccctcgggggtcatgcgtggggctggatcccgcagccaggccctaaccaccaggttctcctgtcgctcggcggggaagcgcgctgcgcttggtccccacccaggaggacgatagacatgaagaccaaggtccggggctcggggcggatggtgtgggtctccgggtcgcccaggccctgtcccctccccatgtgccttagctcgccccagcctgttttccttttgcgggaggcaccagcggccgcccctgccagagaggctaggagggaggccaggacccagggggaggccgaggcccgggtgaacgccgtcccgcccgcaggagacgccagcgagagcgccgaggacatcttcttccggcgggccaaggagggcatgggccaggacgaggcgcagttcagcgtggagatgccactcaccggcaaggcctacctgtgggccgacaagtaccggccacgcaagccgcgcttcttcaaccgcgtgcacacgggcttcgagtggaacaagtacaaccagacgcactacgactttgacaacccaccgcccaagatcgtgcagggatacaagttcaacatcttctaccccgacctcatcgacaagcgctccacgcccgagtacttcctggaggcctgcgccgacaacaaggatttcgccatcctgcgcttccacgcggggccgccctacgaggacatcgctttyaagatcgtcaaccgcgagtgggaatactcgcaccgccacggcttccgctgccagtttgccaayggcatcttccagctgtggtttcacttcaagcgctaccgctatcggcggtgayggccctggggaacggcaggcaggtgtcctcgggggcacagtaaaggggcttcggtgaagctggtggtcactccggggccgctgtctgggctgcagggccgcgggttcacgtcccacctcaggccgcatctttctttcgccaggcctcagtttccycctatataaaaggggggtcaccattgagcctgccatggtgagctgaggagacactgggacaggctggcctagggtcctgatgcaacggagggggcgctaggggcatctttcgagcacgagggtggccagcagccgccagctgacctcaccgtccaggcggacactctccaccgcccctcagccaggctgggtggggcccacagggcctgccccaagyggcggccacacagggtgttgtggagatgggccagaggggcctgggcttggcggtgccaggctcgtgagaagcaggaaactcaaggccagccctgccacatcacggggcacccactgggcrtgaggcagagcccgcggctgtggggcagctccagccctgcccacaggccaccctcgcccgcacaggcagcactgaggccrggaccctgctggcgcccgatccgccactgcagaagagaccctctgtggacacccacactctgcagggactggcccccaactcaccccgtgctggctggtggggtccatttccccgcagcgggtatggaggatgcgtcgaggtccctgtctctgtcaakgtcrtgggaaccaaaagtcactgagccgtcctccccccacctcygagcacagggcctggagggcaggggctccccgaaggctgggggttggagaagggtgaggggcttcccccagggatccccccacctggcctgctcacggggccttggagcatgagaccagtgaccccgagttttgcccatatcaggacagtggctccttctcactcccctttctcaggccaggagggccgagggccacacgggtgccacagcccaggtyggagtggcccagccggcaggcttgttcttcagcatccgacgggaacatctccaacagaagcaaaacggaaagtgcctcccggacccccagagggccacccaacctcaccagtcaccagccccagaccacccacagcccctcccagacacccygcctcatctggaaatagttccgtttgtttctctaaaaagacttgtaggtgggaaaaaaaatcttttgttctcatggaattggcctattggcaagatcgcatgtttttttaataaacgttgtattttagaataatcttaggtttgcagaaatgcagagagtgtaacgtgtccgacgccccacacccgctgccctagttgctgctggcatttgtgacacagcgcatttgtcccaagggaagagcctgggaaacaacacggcacccaactggggcctggtggtcccttgggagctgtgttagtgcccggatctgtctttgccccccgcccctctgccttgcctcccacagtgggggtgacagtccatttcccagacgacaggagggagggtacaagggtggacacagctgctggcctgggcccaggctctcgtgggggcagcgcttggccatgcctgggggcattcgtggtggtcccaccttggggctgctcctggcgtggagtgagtggaggccagggatgctgcccaatgtgcttcagtgcccaggatgagcctccccaaatgtcctcactgcagtaggcagaggtgcgaggcagatcctgcactcccctggggcactggtcacctcccagcccccacctctaacaggatcccggaagtctgtggcacagggcttgggaactggccagggaagtgcatctgatcagcgtccgctctccacaccgcagaccctggcccaccctgaccagcctactccagaatcccaaatcgcattgcagcacacacaacactgccatccccagcccagccttcagcagacatcacaagttgatggcagatggccagagccatcttagaatcctctgggcagcctcttgcctgggttcctggccagctccaccgccgatcaggacaggctgctggggcagggctgagtccgggctggactcggggggcactttttatttttttgagacaggctggagtgcagtgggcgtgatcacagctttctacatcctcaacaccagaaggcacttttgagcccagagtggtgtttgggacaggccgggttctgtagtcacagcccaggttgtgtgtgcgtggctggcgcagcccagcctgtactgggcctaacccagacctcccaccagctctatgtgacagtatttacttccatttggctgctcgggaaactgaggctcacaaaagcccacgttgttgagcccagaaagtggcagggccagtattagaagctgggtttctctaccctggagaatcccaatcccagaccaccaccccgtccctgcctcagtttccccacctgcccctgcagagattcccccagccccagcatcctgcttcctcctcctcacgttccttttgcaccccaagggagatggctgtcctccaactggcaagacacatggtttgccaggggccccagtctggagggagcagagctggggccctgggacccctgaagggtcacgggcactgagcctgggaagacgggctgctggccgagaagggtgacggctgccttgcagaggacagggcagcaggtgtgcccagggcagggggcacacagggctcaggccaagctaaggagccagatcctaggggagctgggcaccagggagctacggagggcgcgtgagctggggagggcctccgagctgggtgtcgagaccctgcaggcagactggaggtgggggccaggggtaggctctgcacaccacccccccatctaccccatgactctccaccatggcccgaggtccacctggtgtcctggaagctgcccccgcccccacccagcttcctgactttggctgtgtccagagctaagaatagacgctccctgcccggcccccgccggaaaccgcagccacgggggtacatcctgagcctggcctctgttcccaccatctgccccccagcccctcacaactcctcccaccagagcctcctgtgctcccattgaacccgaagtgctggcggggggtggggggcggggggcgggccaagaccgggagaccagcaaccagccccagatgacagggaagcccagtgctcatgttccaatcccacacatgggcgtggcattgttccccctttgtgcctcagtttccccatctctaaaatttaagagtatctttaccccctgccttgcagagatgtggtgaggcttaagctaaatgcaagtgtccttctctgaactctgcccaggctgtttcccagaagagtcattgtccttgttatctcagggccgaggacagaggaagtggggacaggacagccttcctccgtctctcactgccccctcatctggagccccagccccacatcctcctcccccaacatctgccctccttgcagttagtgtagcaagggcctcatgctctctcttgcctccaaagctttatacatgcaattcctgtcactgccacgtagcccagacctggggagctcctattcatcctacaaaaccccacttcccatgccctctcctcacaagatgtcttcctagctcacctctgggcttccctaggccctgtctcttcctttggcccagccctgaccccagggggctggaacagcctgtgtccagttcattctccagcctagggcatcctgaagggcaggcctggtttcaggtctcacttggagctcataattgtcccactgtataagctgaacacagagaggggttggggagagtaagacttggagattaggtcggcttcacgggaaagcagccttggagccagggttttgccacatccataggagttggatagcctccttgccaggaaagagagaagttgtgttaaatggctggtgacttaatgggatagagctttgggagggaggttgggtgtggccgaaggccaggaggaggaaggatagtgggcggggtagccggggaaggggcttccggactgggctgacgagagggccgggccaggctgggaatacccctcactcacagcctggactagcagccctcccgggcccaggggacggggtggggtgcagtcagggcaaggtcagcttgtccggtcccactccaggtccctaactcaaggttctgtccggctcgggtgtacaaacaaggccaaggaagcccaaggtcccccctctgcaaagagacggtcccagtccctgcgtccggcaccttctcagccattcctgttgggctccatccctccttccccagcccgagctggggggtggccaggaaagagtgcccatcccccactgcagcctcccggctccagactgttcctcctctggctccaaagccacctccgagcctcctcaagagaccctcccatgcgatgccatcaccccagccctcccggctcacctgctctgggaccacctttctcagtctggctgtgtcgtctggtgcaccccccatccctctgtcctcccaccccacccctggaaggggcctcaaatatgtcctgtatgtattaagcagggcatactactactgtgtgccgcgttccagcgcacccagtgaatttggagccctggagtctgggcgacccccgggagccgatccgcctggacctgccccgccccctccaggccttgggtgctgcccagatggtgaataatgcgggcctggcggcgggagcgccgggaagaggcctggcagggcgctgggcggctggaggggctgaggctcccgaggaagcgcccctgccacccctacgcgggccattgcatccctgccaccggtggcctgggggtcccaagggcgccgccttccccagaaggctgtagggtgtcccggcgtgcggggggcacccactgactccaagtcagccaggcccgggcccgaggggcgtggccagcgcagggtgggcggggctgatgagagacagcgggagacagagactggacggagagagcgagccgcgggctgccagcggcccccacccgtcccagctcggcttagcccccgcggacccctccaggccgcgaccccagggcgtcctgtgccgccacgccctccatctgtgtgggtcctctgctgggcccgcccctggtcacagccagactgactcagtttccctgggaggtcccgctcgagcccgtccttcccctccctctgcccgcccccagccctcgccccaccctcggcgcccgcacatctgcctgctcagctccagacggcgcccggacccccgggcgcgggatccagccaggtgggagccccgcagatgaggtctctgaaggtgaggtcgccccgctggcttagggcgggatgcactgctctggtgtgagcccgggctgctgggcgcatccggcgctggccctgccctgctgtgggtgtgtcgcaaagcccgcggtgacagcggccaggtgccaggtgtcccctgtgtggcccggcgggtggcatggtgccctgaggcctgccctgggcgcccaggcggctgggtctgggtgcggcccaggctgattctgtccggggggctctctggtctctgtggggccacatggctgtgaatgggggtcccagactcagggggctgcagccggggagggggcccaggccctgggtgtggcagggatcgagtgtggttgtgcggctgtgtgtgtgatcttgtctctgggagtgaaccatgcatggccctggttgtgtgtctgtgtctgtgcgtgtgtggtggttttgtgtgtgtgaccgtgtgtttgtttctgccgagagtctgtgactgttaaatactgtgtgttcttctgtgtgtctttctgtgtctgtctgtatctatgtacctgttgtgtttctgcctgtgtgtctgtgtttttctgtctgtgtctgtcacatttctgcctgtgtgcctatgtgtgtatctgtgtgtgtctatgtctgtcgtgtttctgcctgtatgtgtctgtgtgtggctgtgtgtctgttgtgtttctgcttgtgtgtgtctatctgcgtgtgtctgtgtgtctgttgtgtttctgcttgtgtgtgtctgtgtctgtcatgtttccatctgtgtgtgtctatctgtatgtgtctatgtatttgccatgtttctgtatgtgtgtctgtgcatgcctgtgcgtctgtctactgtgtttctgtctgtcacatttctgcctgtgtgtctgtcatgtttctgtctgggtgtgtctgtggtgtttctgtgtgtgtctatctgtgtgtgtctgtgtatctgccatgtttctgtatgtgtgtctgtgcatgtctgtgcatctgtctgctgtgtttctgtcacatttctgcctgtgtgtctgtcatgtttctatctgtgtgtgtgtctgtgtgtctgccatgtttctgtgtgtgtgtctgtgcacgtctgtgcgtctgcctgctgtgtttctgtctgtcacatttctgcctgtgtgtctgctgtgtttctgcctgtgtgtgtctggctgtgtctgtgtgtctcgagtgtgcacacacggtggtggcctgaggtgcatgttggtggaatcactgtaacttgtggtccaccattaaccaccagctgcacctcccgggtcccgccccctggtccctgctggcccctgtgtgacggagctccgtacatgctccctggggagcccccactagagagatggggaaagcgaggctcacagggggccatgtgacttagggccccaacaaggctggccggagtctggctggctgggggagtccccgccctgcactgtgtgggctggggaccctgttggtgtcacaaacaggaaatgttctcggaaatggagctttgcgatgaggggaggtgggcccatcagggtgtggagtgtgtctgcctccgctaccatgtgggggtccacgcccatgagcgttcagatctacagcaggcatgggagggtctggccggtccctgaagtttcagtcccaaaagggccctgtgggtccaaggtccaaggccgacaggggtgacacggagcctcagggctccctgctggctgcccgggcaccttgtagggagttgagctgtgagtacagccaggagccctgcagaggtgagagccagggaggcctgagcttagcacccgcaggcatggagatcagaagctcacccccattgcacagagcggggaaactgaggctcggcaaggtggagccccagcctggccacgg

SEQ ID NO: 97771 - DNA, 15205 bp, Homo sapiens
gggtaattagtccaggcgctatggctcatgcctgtaatcccagcactttgggaggccgaggcgggtggatcacttgaggccagaaattcgagaccagcctggccaacatggtgaaaacccatctctctctctctctctatatatatatatatgtaattaattataacatagttggggagaaaacgggttaaaaacagacggggagcctggtgcagtggctcacacctgcaatctcagcacttggggaggccgagatgggcagatcgcttgagcccaggagtttaaaaccagcctgagcaacatggggagaccccatctctacaaaaattagctgggtgtggtggcatgagcctgtagtcccagctactcaggaggctaaggcgggtggatggcttgagcccaggaggtcaaggctatggtgagcctagatcatgccactgcactctagcctgggtgacagaaccagaccatgttacaaaaaaacaaaacaaaacaaaacaaaacaaaaccaacaacaaaaacagactgggtccacagtgaacacccagactgatgaaccatcaagtaagtgatgctgaaacctttatctcaatgacaaattcaactcctaccaggccaagccttattccagaagtagggattgcctgaacaatgtggcttatgaggtgtcaaaagaaccccagaggtcctaaacatcttccccaccagcctgccaaggtgcttaaagaccactctatatatgtatctgcattaagaccttttctgttaaaatacaacactccttttctccctccttcctaagagccagtacattacgcaattctcaggggttagcacagcttcaggtaatttatcaactattttttatatctgatgcatttcacctagactatttgggtaagctgtgatagagttaaataaaggtaaatttccaggagaagaggatgggcctgaatgtctgaggtaagagatagagagtaggcagtatagcacagtagttaagtgtgagaccttatgatctgggcccaaatccagtttcgctgctggctaggtgagtgaccttggctagtcacttaccttccatgcctccatttcttcatttagatagaaaatggtgttactcaggaaagggaacatcacacactggggcctgttgtggggtcaggggagaggggagggatagcattaggagatatacctaatgttaaatgatgagttaatgggtgcagcacactaacatggcacatgtatacatatgtaacaaacctgcacgttgtgcacatgtaccctaaaacttaaagtataataaaaataaataaataaaatttaaaaaaaaagaaaaaaaaaagaaaatggtgttaccaagatgacctgcttcaatggggcatctgagaattaaacaaatcaatatatagaaggcatttaaaatgatgcccaacctatgtgaaccctatataatgtgttaatttctgactaatttattagaggggatgacatgagatttggccctgaaaggagctgctctggctttactacttgctgcctcctttcccaatttactgagaagcaggcaaggtcccgagaggatgagcagcgtccccaaggccacagcctactgatggcagagccaggacttcctatccagggctccccacacgcggaacttctcgaggaggaagaggggaaggggtcgtgggaggccaggagaaaccgagagccagctttaccatgtgtcccttctggggataatggaatccaggcccttcggggcttttccccagagctggctacacgtcccgctctcgggtgcgcttggtgtccacgcaaacgccatcctccgaacatccccccgcccacacacacacatacacacacagccccacacccttgcgccggacgcaccctctacgtctggcacagcacggcaactcgctgccccgctgggaggactagtcaacaggggggcggacgggaaaagtgacacaactgggccgcggcgccctccgcgccagcctcccacgcagcgcagggcggacttcggccctcagaggggtgaggactggggccaaactgcccgggtctaccccgccgcccgcaacgctccggggtcccgcgcggagggaggcctgggcgcgggccgccgcggcgcacttttcaggaacgcggcggccgcaagcctgccaggccgggtcgcaggacagccgccgccgccgccaccgccaccgccaccgccccccgaagctagatgacggagtcttgaaagactttcaccaaatatgggccggggctggaaacgtcctgcgccgcgcgccgccggaaacctcgattcttggcaaccgcggtgactgtgggcgcgcgggcggggtggccggcagggggcggcggtagcagccgggcaggcgcgtccggatgcctcgcgtcccgcaccctctcgcggtgcggaccctctccgctccctccgcaggggtcccggagccgaccgccctctccgcgcgtcggccacccagttcctgccgcagccaccaggatcctggcttcctggggctctcctggctgtcaagccaaggggatgggggcggggaaatggtagaggagagaaatgggatggtacgggggcgccaccttaaagccggtcttttgcagacaccattaagttctgttcattaaggtggctttgaagagtggagttgtgaggttgggtgtgcagccgaggatctatgaagacacacacacacacccctactacaggcactccggtcgtccagggcagtggtgctcagggtgtgatctccggaccagcagcatcaacatcacctggggacttgttagaaatgtaactaatcagaaactctggggtgggaacccagagaaccattcattaactagccctccaggcgactcggatgcacgctagtctgagagccttcctagggctaggaaactggagtcgccagatttaccgttattattctcggttgccgccagacagtgagcccttcattaggtaacctaaaattccctggcagcagcggttgagagacgtccccatctctcagcccgaagccaggagctgcagaagacaagtagccccttctccgtggattgcaatccaaggcagcccaaggaaacaaggcagtccgttatttcctcctggggcacccgtatggggagggtgaaggagaaactagcaaaagagccatacagaattagcacccgaagcaacacttacccataaacatttgcacatttcgcctcctgtccgtcaacttggactgatctgcggctcccagcggaggcggcgagaaggcgacgggaggctggggtttctggacggtctttgggcaggacttgaggagccgctgtttctcttgcctaatgtcgtcgattactagcaggcgcaacagcacatggtatatggagaggctgtgcacataggttactctagtgtctcccgctcccacacctcctggccctgttgctccagcttcccacccccatcccacaacacaccccctgctttaaatgggcagctgacggtaaggttctctaaatttctcttctggggcaaactcatcctcaagattccccagttgaagtccagaaacaaacccacacacccttgttaaaaaaactttaatgtgattttaaaggaatctctggaatggcgtgtgtttgaacgcagtgcggcagactggatctctgccgtcccccatccccaacctccaattaaggtatatacggccagttggatgatccactgtgcttttattttaaatcatgatggacagattgcgtgaaaaacaaggaattccaaagaatttcctgctctgggaagagaagttaaatctatatttaacaacatttgaagctgtcaagaatgctttgtggttggataacagaggcagaaaaatgttaaaaacgcaggctactgctatacccaaatatggaaatattgttacgtctggtgtctgattcaccatctggaaatacttacaaccatgaagtcaaatagaaaagacgccacaacagaagccaggaaccctcctctccattctctctctagttcaaccagtactgtccctgcacccctcctcccccctcccgccccccgtcacttcattaagaaggaaacaataatgaaatgataaggcaggaaaaacagtgttttgtaaataataattgatgtattaacctgtgtacgtgttgggcccacgctttcctcactgtatttgcataacacctgacaatccattgtcttgaaaagtctcccacccctaaccctctaacagagctttagagatcccactccctctagcaaatgctgcttccatttatgaaagggcactttggaatgaatgaaactgaactccttcctgcaagaattctcttcactggagtgtgttttcatcctgacagattctcattgtgcttatcaggaaagtcagcattagcactaagggccttttcaagcaagactgctaaattatgaagtctgaatagccttaaacattaaaaaggataagtagttatcctagagcatatgagtcttacatgataatttttattaaaattatgcaaaaagtttttgaaacttgcagggaaagtttatcaatcacactaatggtattggtgatgttcaagtaaattgtcttgtggtggggtcttctactgagtgtgttgcaagtagaacgggatcttaaaatctgctgacatttttactgcaaaatattacatcctaaatctcttttctgtacttggagagaagggcattgcaattcatttaaaatgggaggcttccagtggtccctaggaaaggagttaaaaaccccacaaaatgtccagcttgaaggagtctgcttttcccagagattcatagggcacaatggtcctggaatctggtttggccttgcggtctttgcaggtgatgatttcaggccactccacggtggtctcctgcacttctggctggctgcttggttagcatagcctcctgcccgcggagggaggcgggaagggcttaccccgtctcctgcatccgtgaggaagtataagtcagcctcccggagaactccccgcgttcgtttcctctcggacttccaacccaggcagtgggctggaactaaagtgggaacctccaaaaacaaacaagtacaacatacccaaaagagggaagggctggaggagtgggggagacctctgcctgggaatttgccagacgatgggcaagtttccccccgccccaccccccccccgccttttcattcataaatgccactgtgggtattaatttgcaattcactgaactttgctaataaacatcatgccaaagctttgggacttgttccgaacacgcctctttgaagtccacaaatattcctgactcagagacacactcctcttccccgttctactctttcaacagataacttgcctctcaccttcgctgtaaaaaagcaaacagctcactgccttcccgggtgagggcttcagtggctgcccggtcaactcgcatcaccaaacaaaacgacttttgttcctccctctcaggtcctcccacccacccagtccaggcaaagttctgaactggcccccctcgcccctcacgaccctccaactaccatcaccaccatcacgccccaaagaacccttcccaacataagtcgtaatttaaggtggaaaaaacgaactgttttcttgacgggtctgggacacacacacacacacacacacacacacacacaccccccgaactgttttcttgacgggtctgggagacagacacacacacagacacacacacacacacacacacacacacacacacacacacacacacacacacacaaaggtgcaatggagccaggggaggcgcttggcagcagcccgcgccaaccagcattcctgagatgtttgagaattctggaacgcgcagacagagccgacgtcactgcaacacgcggcgcctccgccggcccgtataaaaggcgggctccggggcgcctgggcagaccgcgagcgagagcgcccccgagcagcgcccgcgccctccgcgccttctccgccgggacctcgagcgaaagacgcccgcccgccgcccagccctcgcctccctgcccaccgggcmcaccgcgccgccaccccgaccccgctgcgcacggcctgkccgctgcacaccagcttgttggcgtcttcgtcgccgcgctcgccccgggctactcctgcgcgccacaatgagctcccgcatcgccagggcgctcgccttagtcgtcacccttctccacttgaccaggctggtgagttggactctccttttgccacctattccccgtccgctctccagccccttcccctggtcccagattgcccacggcaggaaaagttaaaaagttcgcgatcgtttgcgggtagccgtttctttaagcactctccccctccccccgaagacgtgtcgggacctcttggtgggagcagccttccgaggtggccrggctggacgagatcagaggctccccgtcgatagggtcggagacccccgtccctcactgcggcagccgcggcgcccctcctgcgcaccgcgccgagtctcacgcgtatcttctcccccttccaggcgctctccacctgccccgctgcctgccactgccccctggaggcgcccaagtgcgcgccgggagtcgggctggtccgggacggctgcggctgctgtaaggtctgcgccaagcagctcaacgaggactgcagcaaaacgcagccctgcgaccacaccaaggggctggaatgcaacttcggcgccagctccaccgctctgaaggggatctgcagaggtaagatgcttgtggtttggcccctttaaaaaaaatactagtccccatagtccagaagtttagtaattctgagaccatgtatggtgatgctttgttgttggtagcttggcagaaaggcacatgatttcagcagtctggaatgcaattcagtgtgtctgggcccaacgaaagcgcatacggaaaagtgattcctgactaacttattgttctggtctggagtctccggggaattgtagggaactttaccataaattgaatttaacagcagaaaatatgtatgagtttcaggcggtggtttggaatcttaactttatccccttctacctttctsttttggtgatctttgcagctcagtcagagggcagaccctgtgaatataactccagaatcwaccaaaacggggaaagtttccagcccaactgtaaacatcagtgcacatgtattgatggcgccgtgggctgcattcctctgtgtccccaagaactatctctccccaacttgggctgtcccaaccctcggctggtcaaagttaccgggcagtgctgcgaggagtgggtctgtgacgaggatagtatcaaggaccccatggaggaccaggacggcctccttggyaaggagctgggattcgatgcctccgaggtggagttgacgagaaacaatgaattgattgcagttggaaaaggcagctcactgaagcggctccctggtaagtggagactgagcacttcagacactgtactgagatgcatttctggtctaaatctttgtagaaatgagtgcttgagcctgtttgtgtcggyatgccwctgagragkcttccctcttatatgtctctagtttttggaatggagcctcgcatcctrtacaaccctttacaaggccagaaatgtattgttcaaacaacttcatggtcccagtgctcaaagacctgtggaactggtatctccacacgagttaccaatgacaaccctgagtgccgccttgtgaaagaaacccggatttgtgaggtgcggccttgtggacagccagtgtacagcagcctgaaagtaagttccttcagggacgtgtagactgttgcctggcaggtgggtgggatgtgaacatctttttgaagaaagagaaatatcacccctaactttccttctctcctttctcttacagaagggcaagaaatgcagcaagaccaagaaatcccccgaaccagtcaggtttacttacgctggatgtttgagtgtgaagaaataccggcccaagtactgcggttcctgcgtggacggccgatgctgcacgccccagctgaccaggactgtgaagatgcggttccgctgcgaagatggggagacattttccaagaacgtcatgatgatccagtcctgcaaatgcaactacaactgcccgcatgccaatgaagcagcgtttcccttctacaggctgttcaatgacattcacaaatttagggactaaatgctacctgggtttccagggcacacctagacaaacaagggagaagagtgtcagaatcagaatcatggagaaaatgggcgggggtggtgtgggtgatgggactcattgtagaaaggaagccttgctcattcttgaggagcattaaggtatttcgaaactgccaagggtgctggtgcggatggacactaatgcagccacgattggagaatactttgcttcatagtattggagcacatgttactgcttcattttggagcttgtggagttgatgactttctgttttctgtttgtaaattatttgctaagcatattttctctaggcttttttccttttggggttctacagtcgtaaaagagatawtaagattagttggacagtttaaagcttttattcgtcctttgacaaaagtaaatgggagggcattccatcccttcctgaagggggacactccatgagtgtctgtgagaggyagctatctgcactctaaactgcaaacagaaatcaggtgttttaagactgaatgttttatttatcaaaatgtagcttttggggagggaggggaaatgtaatactggaataatttgtaaatgattttaattttatattcagtgaaaagattttatttatggaattaaccatttaataaagaaatatttacctaatatctgagtgtatgccattcggtatttttagaggtgctccaaagtcattaggaacaacctagctcacgtactcaattattcaaacaggacttattgggatacagcagtgaattaagctattaaaataagataatgattrcttttataccttcagtagagaaaagtctttgcatataaagtaatgtttaaaaaacatgtattgaacacgacattgtatgaagcacaataaagattctgaagctaaatttgtgatttaagaaaacagcgcttcatgttcatcagaatataaagcctaagggtctccatcactctgtgagatggctataataatttattattttaatcaccaggttagtgggcatgccactttagtagagtagagaaaccctttaatgaaaaggggtagtccataactcaggctgcccacatccagacccatgggcaagattgaatataattaatgtattctaaagacttgcttgtttataactttatattttcccaataccgttcctaaaaattagaactacttagaaatttacccttggctgttatgaggaaaaatctgagtctataggagtcagtttgttttcactaaatgagcttgaagcatgacttgtgttaatcctaataagccggtgattaggtaaacatgctgttaaatgcaaaggaatgcaaggaatttcaactacttttccaatagcgtgagggccaagctaccccatccccctttcctttttataatatacgttatattgatgggggagggagcagttatatagagttggctattcagaaggtcaaaggtccagagcattcctaaaagaaagggacccaaatcataggtctaggagaggttgagaaggctgtgtcaatgtttgtgaaaatgtcagtagtctgtttcagaagcatcttcatctttagaaagcgctgacaataaaccttttatagggagaagttttcctttcatcatcactgttggctcctgttcaaatccatagtgaaatatttcagtccgcacttagttaagagagtacttgagtttttaggcagaagagaaagtgcttttaaaaggaatggaggaggacagctcctgggatcctgaagggatttttccaagtagattaaataagatccatactttaatgaagacccacagaaaaatactgcctaagaaatggttttaaagccttatggaaatgcatagaggttaatataaatgcactagtaaaatctatggccaaaagccttcacttctgattttgacttgcctgaaatattacagcttgtgccttctgaatagtcaggttttttgcctgagacattcaaatgttaaggtatttgagaatttaaacatcagctggcccagtcgtggatgcagttaaacttgtcagtgcaatgtaacgtgtgaaacataataaaggtgtgaggcttttgtggtgcaatcttgttgaacagacatctaaatccataggcaagatttacacattcccaagcatcaaccctgaagtattgctctccaacactggagtccaacaaattgcttcttatgcagagatcaaggagcaatattttatagatcctttcagtgtgcagggaagtagtatttgtccaaataagctcaaatgtgaaacagaacctagtatgggaaaacactgaatctttgggttattaatttcatcctagtaaatataatgagggtgattgaaagtgccaattccatttacaataagtgtgttcaattaataaagaagatgaatacaagcaaattatgtcttttgtttagctatagaaaaacctgaagaaattaaaagtagtggagaataaaattatgatatttagaacacgtaagttttacctacatccagaatggagctctgcccactttaaatattgagaaaacaaaccaaaaattatgcatctgcatatatgaaatagaagttacatatagaaatattcattataatatatatgtaccttcccatgcacagtaaagaccttgggttgttcttgcttttcaatccaaaagatcctggtggtcttgagctattttttggtagagattttagaactgagagagtgatctcagaatcttaggcattccacgaattttaagaaatactctatgggacattgagcagcacagcaagtagtctcactatgactattttttcatatgaacatatgtgttgtctgctccacaaagagatgcaactgagtcaaaattagcaaagcatattttagagttatgttttccaacagagggaacagacttggtttgttcacaacctcttcttgcagccttctggcactacttgaaagtcagttgagcaatagcagtggttcagtatgaccacagtacagagcaaagctatgctctgggcagaatggcaggtgatacagtggaaagaatcccatggaatcatgtcttttagcaccagctctgccatgaattcactaggtgactctgggcaagtttctgtttcactccctcatgttaaagtaggaaaatagctttcagcatttttgtcaccccaaaaaccctttctcatacacccacttcggtacattggctctcataccttaaaacttttatctcctcaagtaaccacatgtgtgaactgaaaactgctcaaggctttctgtcatcaaatgcacttgtttccatgaagcgtttgaaaatgtattgtggctagaccccttcccccccctttactttctaaagcacccttggttagaggacacagcaattcctggatctcagagtctacaggtccatactttaacctcactgtatagccctatccaggcctcattaactccttgccctacacaactgatgctttaaaacaaagcatattctgaaacatgacaatgatccatttgtcctacaaatagattagatatagctgtgactttctccattggtggtgggcaatattcatccatgtaatcttataaactacaattaataaatactcagatgcatttgttactgctttgctgtttccatatattctgttcatatattctgaatctacccctttctcatctccagagcaaacctctagatgagaccaccatcatcccttgtctgaattaccagaatggcctcctcatttatagcatattgtattttccaaaggtggctgcagcaatatctcccactccatgtgcccttctgcaatgtgcctctgttgctcccccattaatgggggggtctatttctccaccctcttggatgtgggtgagctcttgacctgtgaatgtggaggaagcaatgcaatgtggtacaagttccacatgcagtactggctaggagttcctccatcttttctcttagaaatgagcttccatgtaagaagtacaactactctgagaccagcagactgtgagaagctgaagccacatggataggccttagagaatgagttgccatgtggagaaagagaaaggaccaggagcacttgggcattacacctgtccatgaagaaaccatcttggaagtgaatcctccagcctcagccaccccagctgatgtcttgtgaatcagagatgagctgcccagctgagtccttcccatagttcctgacccacgaaatagtgggcaaaccaatacggtaattataaagaaataagttttgggtttgtttgttacatagcaatagataaccaaaatatcattggtttccattcttccccttttacatttttaaactgactctttaaaaatgtaaatcggactatatggacccttgggttaaaggctccaatggtgtcccactgctgtcaaagtagagatttagcttcttacttggcacccaggtcctggaccctgcctacttcttaccattcaccctcattcactatacttccacttgccttttcttcttctttgaaaaagccaagcaatttcccctgcagggcctttgcactagcgttcctctgcctcaaatgccccttcccctgacctaggcttcttcttggcatgtaggtctcagcacaaatgctaccttcttagcaacctttcttcaccacccagtctaaattattaatagttccttacaccaagaagttttttaaggggcagagcaaaaaggtggaataaaaatccccaacaatcatccccactgcaggaacaccaaatttaacaactacctacacaaaaaagaacctttacaagaaccagaattcagatgagcactcacaaccagtttctaacttcatatcgttgaaagaggcactgaagagtgtaggaaagacagtcttgaatcactgccaccacccctcccccattctctggcagcagccacatggtgcagagaatctgtgctcttgggagagggagactacagcaactaggagactgcctggaacgcagtgctgccctgtcacagcagagatgcccacctatggaggtagcattcagacctgtcctagccagaggagaatcacccatcccagtggtaagagctggagttctggcaagccttaccaccatgggctgaagtgccttggggacgtaaataaacttaaaaggcagtctcggctgtaaggactgcaagtcctggcactgagctgggctcagagcaggtggattttaagggcatgtgacttactgagataccagttggggcagctaagggagagcttgcatcacccttcccccaaacccaggcagcacagcttgcggctccaaaagagacccctacctcccacttgaggagaagagagggaagaataaggaggactttgtcttgcatcttggataccagctcagccacagtgggatagggcacaggtcacagttgtgaggcccccattccaagttctagcttgccaaccacatttctagacacatgttgggccagaagggaacctgctaccttcaagataaggactcggagctggcaagaactgttacctgctgactaaagagcccccgggccctgaataaccagcagtgatacccagatagaatgctgtgggccttgggtgagactttgagatgtgatgacttcaggtaagactcagcacatttccagctattgtgactatgatgagagactccttctgcttgagaaaaacagatgaaaaagcaaaggggaccttgtattgcatcacaggtaccagctcagccacagtggagtataataccaagaggggtcttggggccccaattccaggccttgggtcttgaatggcacttctggacctgccctgggccagagaagagcccactggcctgaaaggtgaatcccaggcctggcaccattcaccactagctgactgaagagcccttaggcctgagaagaatatcagtggtagcttggcagtactcctcttgggtccgtggtggtggtggctacagggtgaggctcctcttcctctgaaaaggggatggaagagtgggaaggactgtgtctcatggtttgagtgctagcttaggcactgtagtgtaaagcaccagatagacttctaaggttgttgactcgagtccctggatcctggatggcatctctggaccttcccagggcctgggggaacttgctgccctgaagggaaggacacaaacctggctgctttaccacctgctgattgtagagccctagggctttgactcaacacagatggtactaggtagtggttacagggggccttgggtgagacccagtgctgtgttgtcttcaagtctgacctggcacagctccagaggtggtggctgcaggggtgtttgtgtcaccctaccccccaagccccaggtggctcagcacacacagagagagactccatttgtttgggagaaagtaagggaagataacaaaagtctctgcctagtaacccagagaattatctggatcttatccaagaccaacaaggtggtacctctatgagcctgcaagaaccacagcattcttggggttggggtgccccctaatacagatatggcttagatcacaacacccaagtccttttgaatacctggaaagccttcccaagaaggataggtgcaaacaagcacagactgtgaagagtacaacaaatacccaactcttcaatgctcagacaaagctgaacatccacaagcatcaagaccatccaggaaaatatgacctcaccaaacaaactaaataagtcaccagggaccaatgctggagaaacagagatatgtgacctttcagacagaaaattcaaaatagctgttttgaggaaattcaaaataacacaaaaaagaaattcagaattctattaag

SEQ ID NO: 97772 - DNA, 75792 bp, Homo sapiens
  misc_feature (1)...(75792): n = A,T,C or G
gccaagacaatcaatcctaagcaaaaagaacaaagctggaggcatcacgccacctgacttcaaactatactacaaggctacagtaaccaaaacagcatggtactggtaccaaaacagatatatagaccaacggaacagaacagaggcctcagaaataacaccacacatctacaaccatctgatctttgacaaacctgaaaaacaagaaatggggaaaggattccctatttaataaatggtgctgcagaaactggctagccacacgtagaaagctgaaactggatcccttccttacaccttatacaaaaattaattcaagatggattaaagacttaaatgttagacctaaaaccataaaaaccctagaagaaaacctaggcaataccattcaggacataggcatggccaaggacttcatgactaaaacaccaagagcaatggcaacaaaagccaaaatagacaaatgggatctaattaaactaaagagcttctgcacagcaaaagaaactaccatcagagtgaaaaggcaacctatagaatgggagaaaatttttgcaatctacccatctgacaaagggctaatatccagaatctacaaagaactcaaacaaattcacaagaaaaaaacaaccccaacaaaaactgggcaaaggatatgaatagacacttctcaaaagaagacatctatgcagccaagaggcacatgaaaaaatgctcatcatcactggtcatcagagaaatgcaaatcaaaaccacaatgagataccatctcatgccagttagaatggcgatcattaaaaagtcaggaaacaacagatgctagagaggatgtggagaaataggaatgcttttacactgttggtgggagtgcaaattagttcaaccattgtggaagacagtgtggtgattcctcaaggatctagaagtagaaataccatttgacccagtaattccattactggatatatacccaaaggattataaatcatgctactataaagacacatgtgcacatatgtttattgtggcactattcacaatagcaaagacttggaaccaacccaaatgtccatcaatgatagactggattaagaaaatgtggcacatatacaccatggaatactatgcagccataaaaaaggatgagtttatgtcctttgcagggacatggatgaagctggaaaccatgattctcagcaaactatctcaaggacagaaaaccaaacactgcatgttctcaccgataggtgggaattgaacaatgagattacttggacacagggcagggaacatcacacactggggcctgttggggggtgggggggtgggggagggatagcattaggagaaataactaatgtaaatgatgagtcaatgggtgcagcaaaccaacatggcacatacatacgtatgtatcaaacctgcatgttgtgcatatgtaccctagaacttaaagtatgactaaaaaaaaattaaaattaactttgaatttttatccatagacacaaattattattttttttgagacagggtcttgctgtgttgcccaggctggagtgcagtggcatgatgttggttcactgcaacctccacctcccggattcaggcgattctcatgcctcagccttccaagcagctgactacaggtgcccgccatgacagccggctaatttttgtatttttagtagagacagggttacactatgttggtcaggcttgcctcgaacacctgacctcaagtgatctacccacctcggcctcccaaagtgctggaattacaggcgtgagccaccgtgcccggcctcccagcctcacaaattactttttataagtttttaaaaactagttttatttggctttatcttctttttcattgaaagatgccactaaggttttaagagagtgagtggtgagcctgggtcagggcccagatcatgaggggcctttaaaaatttagacttcatagcattttgtttgtttgtttgtttgtttgtttttagagataagatcttgtcctggctggagtgcagtgacacaatcacagctcactgcagccttgaactgttgggctcaaacaatcctcctgcctcagcctcctgagtagctaggattacaggtgcacaccaccacacctggttaattttaatttttgtagagacaaggtctttctatgttgcccaggctagtctcgaacagctgggctcaagcgattctcctgcctccgcctcccgaagagctgagagccaccactctaggcctttatagcacttttcaaaggaaagagtgtatggaagaaagaagttcctttctactttcttagagaaatgtagtatctaccaagttttctctgctttcctctttgacttttttttccaataacctctcttactcccctcctatcttctttccacaaatgcatatccaccatcacatgccagaccctgggggatccagtgatggataaagctcaccctattttcagagcagaggcaaagttagttggaattggaaatgtgtaaagcttttctttgttcagtgagtcttttcattatttaaaatagagagcagctttgcggttttctcaaatgctctggaaaaaactgaaagaggattgagagcaattttaaaaggagggggagcacagttttccaaatacatttcgaaggaaaagagggggaaacctgtggattaaaagagacttctgagatatagcaacggatttcaatatctggatcttacttggatcctgattcaaataaccaaagtgtaaaaaagtaaaatttatgatatttatgacacaactgaatatttgaaagctgattcgatatttgatgatattagggatttattgttaattatgttaaatttgataatggtattgtaattatatatttttaagttctcttttaaagatacataaggaaatattcctggataaaatgttatgctatcagggatctccatcaaaataatatgtggggagaagtcggtaggggtgtacatgaaacgagatgaggattgcattgacagcagaaactgggtgaagggcacacagggatttattatcctaatctccctatctttgtctatgtttgaaaatttccataataaaattttttttcagaagacagaagggtcatatttatgattgacttctgctttggtgaaaatagtgaaatagggaggaggtaatgatgagaggaaggggctggagcttggaagtatgatttgggagtgaacagtctccagactacaggggcagaaagggaaatgcagggcaaaggacatcatgggagtatgagaagagcgggaagaatgcaaaagagaagtaggcccactgctcttcccccacccctcagccttttcttcacttactcattccctatcccttatctctgtagatgaaaaatcatcttggggccaaatgtagtggctcatgcctgtaatcctggcactttgggaggccaaggagggaggatcgcttgaaatcaggagttcaagaccactctgggcaacatagtgagacccccatctctacaaaaaatttaaaaattagccaggcatggtggcacatgcctgtagtcccagctacgtgggaggttgaggttgggggggattgcttaaattcaggaagtcaaggctgcaagaagccatgaccatgccactgcactccagcctgggtgacaaagaccctgtcaccacacacacacacacacacacacaaaatcaccctgggaacttaacagcaaagattctcaagcacgaagtcatgaaatttcatttccatttcacttggcaaggtctgggaatctgcattttcaacacgtgctctgggagattgagatatctagacttccctttgagctccccagtacctagcccctgtgagagccatggtttttctgtcataaacctttcctctgtcagactggggatcaaacactgcctttcaaagcctttgggacagcagtccactgtttcaaggcaggaaaaaataaagggaatgagagattatgcaaaggaaactatttattgatttcctttaatgtgtgtgtggaaacacgcaaatgctgagggtcgtttgagtggggaaaagaaattcatcagccagtgatggcttgaaagacaccccctttaaaaccttctaacctttgtgctgatgttctctgatgttatagtcactgaacaaccttctgatttgtaatgggattccactaaggaggaaaaacaaacaaacaaactagttgccctaagtaacacagtcctcctggtagctgtgccttttatcatcaatttaatatattgattttttgctttccaagtctcccaaagcctgttattcagaagaactaggtcacaagatttgatcatccatcagtgaactaacttaagctttagggttgggtaaggtaatgaatcagaccctgcaactgagccagaattaccacgaggacagtaaccctatggctaagtcgttgtcacattaggggtaactagacacttgcttacccacacattcttggccacatccctcccaatagggcaagattagaaatcatgactaagttatcaggctgcagccttacttacctggagcccaatgcctgctcaagcataactaggtcttgacatggtgagatcagccaggttggggaaagaagttttgaagcaaatagggcagtctgcagggccctggccccagtgctggcagggatattcccagggacaggaaaaaactacaagcaactggccccacaatctcccacataacaagctgtgagaagtcagacagatttgtctgttcagttcaaagcatcctccttcctcgtcccatctcctaatctcgccccatcctatcagctaaaagaaaaaggcaaatgcctgaggccttctagaggcctttctgtactcactttgtaacctatgtggttccacattgttctttgaaccgtaactacccaggggcctgctggcatccatctaagcctatctctagctgggattccctggctccctacatggttagaaagaaagtcacctcttgccctcttaaggacctcactgaggcacagactacaatggagacaccaggtggccagagtggcaggcaagagcccatgttgccttacagggaaatctgagcacgcatgccttgtccagggtgagaggaacgagggccctctgcttccctcaaagaggggataggggaaataaagtgagcatttgggctgaggagaccaagaggccaagtcttgaggtaaattgggctcaggtcagctaagaaggatatacaaagcatacctcagccaggaattacagttttggggtttttccccccaagattctcgtgcgttagcctcccaagtagctgggattacaggcactcgttaccatgcccggctaatttttgtattttagtagagagcggggtttcaccatgtttcccaggctggtctcaaactcctgacctgaagcgatccgcccaccttggcctcccaaagtgctgggattacaggcctgaaccaccacgcccggccaggatttgtagttcaggaattgcagtttaaaaagaacaggaagaggattctgtcaaccggttcagaggatacgagagagggggctaaagagtgacgaggaaaatagcaggaagggttgggctcgtgcaccgacggggcccaggggagtgaggggacaaaagtgtgaagcggacacagagtcaccgggccaggtgaggcccatgggtcagtggggcagaaggggaaggaaagagcccgagaatggggagagattcagggcaatgcagagagacacggcaggaaacccagccaaggctcgagagaagttggggatttgtgggaggagaggggtggccgcggattggccatcgcgaagagaggccgcgccccctagcgtccctccgggatgagccagaaccctgcccgggcgaccctgaagctctccaaggaccgccccgcccagcgcggagtgcaggcgccggattcccttctgtcgcgcggccttatagttccggctgtggcgcgcggacggaaagtttatgccgacggaaagtttatgccgacggactgtgtccggcgatgggcacggggtgagtggggaggccgagggcccgggactgcctttcgytgcttgttggggttacaggtgaaggggttatgggtgaagaacaacccagggccagcgcttggccttcccgccaccgtggcggccgccccgcgctgtctgtgaggcgccagttccggggcgctgctcccggcctcccctcgctctgaggctcggggtccccagctccgcgtaaactgcacgatttcgccctctgctcagctcccctctgccccctctttccaagagagacttccagatcccacattttcttgactgatttttaaggtaaaaatacatctcccagatgtgattttcagtctggacttttagagatgaaattatatctgagaactggggagggactcccggaggctgacgggaaagccaaagagcaggtgaggcactagaaattcaggtagaatcctgctttgagagcgagactgctgagaatcagttctttatgaatgagctaattatcaccttcagggaagaattayaaacgtctagctgatggacacttggtattcaaggccaaataggtggctagggcctatttctcagactgttcctgagaaagaagagccctagttgtttgaacagtacacgtgggaagggggtgggggtgggagacttgggggctcagaatccacccaagtgaggaatacatagtgttgtgctcacaaaattggtagactgtggtgggcagggattcccccccacccaagacggagtctcgctctgtcgcccaggctgaagagcagtggcgcgatctcggctcactgcaacctctgcctcctgggttcaagcaattctcctatttcagcctcccaagtactagaaccacaggcgcacgccaccacatctggctaatttttgtatttttagtagagatggggtttcaccatgttggtcagactggtctcgaactcctgacctcgggtgatctgcccgcctcagcctcccaaagtgctgggattaaaggcgtgcctggccttttttttttttaatcaggcctatactgcttgagtgaactatccttcaggaactttcagttccctcctttactccaacctgagtactaaattgatctcccacgactttgtaactgttaatgaggtgcatttgggagtcgacacaaatgcatcacttgggagaaagagccagctccagaggtgtcttcagagaaggcaagactgccagctgtcatcactgtcaacagcagatttcacgggctgaaagtgcttttttgtatttgatctaagtctgtgtaaactgtttcctcccattctcctaagaggtgagggcagtactcctcatgatcctcaacttgtaaaaaggcctccctgcatgaatgggactaccacaggagctgggcagacgtgagggagtcccccatatgtctgcttgaatgaggagaagaggaaatgtgtttctggtgtccagagttaacatttataatgtattttgctaaataatatatggtatatctggtgatttaggggtagttcatcagttgttatcaaattgttgggcacctactatgtgccagttactgtgataagttttgaggagacatcatgggcaaaatgtggcatggtccctgcccttagtgagcgtatgttatggtctaatatagtgtagttgaaccaatattgtgcaggacctcactttttttttttcagtcgggcctatactgcttgagtgaaccatccttcaggaactttcagtttcttcttttacgcctatgcttacaacctgagttgtaaacattgtttccatgaaccagtgtattctgagttcgaaacagcctacttacaaatggaattttggctgggcgcggtggctcacgcctgtaatcccagcactttgggaggcagaggcaggtggatcacgaggtcagaagttcgagaccagcctggccaatgtcgaggtcagaagttcgagaccagcctggccaatgtggtgaaaccccatctctactaaaaatacaaaaattagccgagtgtggtgacacgcgcctgtagtcctggctactcgcgcctgtagtcccggctactcgggaggctgaggcaggagaatggcgtgaacccgggaggcggtgcttgcagtgagcggagatcgcgccactgcactccagcctgggcgacagatgtcgcaagactccgtctcaaaaacaaaaaagaacaaatggaattttagaatatgacacatttgcagctgggcaccatccttaaacaagtaatctggctactgttaaatgttttgaagttaatcccaaaaaagaaagttgtgaacattaaatttctaacctgtttatatccacctaatctctctaattgtatatttgcattatgatttttatgaagttgtaagcagtgtataatacagttctggggcctgcttttctcagttactaatgctttctataagtatttctgatatctgtagtacatatgtcatttatttatagttttatgatatttcatcatgtcagtagcctacagtttgcttaataatagagtagcagcaggctatatacccatgagcaggtctgtgtatctgtaaacttttttatttttgagcaccaaaatgttttctttatgctaattctcaatccataattttgaataactccatttgtacattttgacttttctacccaatttcatgagataattccagctgtataaatttttttttttttttttttttttttgagatggagccttcgtctgtcacccaggctggaaggctggagtgcagtggcacgatctcggctcactacaacttccacctcctgtgttcaagggatcttcgtgcctcagcctcccaagtagccaccatgcctggctgatttttgtatttttagtagagacagggtttcaccatattggccaggctggtctcgaactcctgacctcaagagatccgcccacctgggcctctcaaagtgttgggattacaggcatgagccactgtgcccgaccttacatattctttaattttgttcttttccttcacagttgaagcaccattggccagtttatgtacaatgaatactactgaggctgacagtttattacttttgttatgtgtaatgatttccaatttgtctaatttggtttatgactttactagtcctttcatttttatatttggcattcattttactaaaacaagagcaccaaccaacaaaataattaaacacatgcagtaatactgcaaaaaggttgtgacagtgccaaaaaacaatggttgtttgtcaaatagcaccaacatatgacaactagaaatgttcttcagtaaattaagtgttaggagatgtgggagtttattaagttgcataaaagtcgaatgtgtgaaagttaagggctacctgaatttagcagggcttttttttttccagtagatatatttagatggtccttgatttatggtcacttaatgggtgattctaagagtggtccttacaatgaactaagctgctcacttccctctcactgagttctctacagattattcctcacctcaacttaaatggtgtttgcctctgctaatttctgagaagttagttaaagttatggtgaaaaatattattttctctccatgacatgtaagaacgtatttattttctgcagcatttcttcgtttatagctgtctgtttgcattctgattgggaacactgggatcattttcatcatgccgacagtggtggtaatggatgtatccctttccatgacccgacctgtgtctattgaggggtccgaggaataccagcgtaagcacctagcagcccatggtttaacgatgctgtttgagcacatggccacaaattacaagcttgaatttacagcacttgtggttttttcatcactttgggagttgatggtccccttcacgagagattataataccctacaggtacaaaatgtagtaagttattgtatgtacagggcctaaatttattgggaggaaaacagtgttataatgcgttgaatatttagaactttggcattatttaataagtctatgagtacttaatatgtgtaactaaacagcaagaattcacaaccagtaggtcttatgcctactgtttcttcggtacagctatgagttacagctgtgagttgttcccttattttcctctcttggttttctggaattctctgtggaaaagtgagcatctcaggatgtagtgttccattccctaaaatttaggatctttaggctcaacacttaatttttttctactctcccataaaacttgaggaaatgaaaaaatagccctttcttattctagagtaattcaaaatgatatttcctttccaacaaatagctttgattttgataccaataaattataatttttaaatctcagttggtagatattatctttcaaaggtgttttctgtgttatgttagaatttactttctgacaacatctctaaatcataatattcataatatttccagcagtgcctaacacagtgtcttacccatagtgagcagtcaagaagtgtttgtgggccaggtgtggtggctcacgcctgtaatcccagcactttgggaagccaaggcgagaggatcacttgagcccaggagtttgagaccagcctggacaacatggcaagatcccgtctctatttttaataaaaagaaggaaaaaaaaaaagaagaagcatttgtggaattaaactgaacagttttaacaattgttaggtggtttagaaatacaagatcaatagagtttgaattttttaatgtaagtaacaaaattttgttaaataattccttttattatctcagattttttttttttttttttttgagacggagtctcgctgtcgcccaggctggagtgcagtggcgcgatctcggctcactgcaggctccgccccccgggttcacgccattctcctgcctcagccttccgaatagctgggagtacaggcgcccgccacctcgcccggctaattttttgtatttttagtagagacggggtttcaccgtgttagccaggatggtctcgatctcctgacctcatgatccgcccgcctcggcgtcccaaagtgctgggattacaggcgtgagccaccgcgcccggccttatctcagattttttaagtgacttaaaagctttttttaaaaaaattagtgacttaaaaaattttttttaaatttcttttcctgtaaaaggatattaaacttttggtatatatgctgactttcttacaggtgaataaactaaggatttctgatgttctgcagttctgaaatttagagaattgctatataaggagtgagacgtaatgttttagaccaggagccctgaagtcagactgcatacttacaaatccaggttctgccaccttagtcatgagacctgggaaagttatttaatctttctataccttaattacttcatttaaagatagggttaataatctataccttatagttttattgtgatagctaaatgcataaaagtgcctaggatggtgtttagaacatagttaatattcaatagattttgttattatttttgtgatgtgttyaaaagttccttttaattttttccttcaaagtccacttaacaaaaatgtaaacttggtggactgttcactcttacctgataagaggatagaataaatggaattcttttaactatctttaatagttgaagaagtctgttctagcatttttctttaagaagctatgctttggtgctctcagatacatcagtgtcccctgtgtaacattcatactttgaacaatttatgttgttttctaatacctaattaaaactaaagagtaactagcaattttatcttttattcaataaggaagcactaagtaatatggatgattatgacaaaacctgcttggagtctgcattagttggtgtttgcaatatcgttcagcaagaatggggtggtgcaattccttgccaggtaatgatcaattctttttcattgccctaagttaacaacattaaccactgaggtgcttcgattttcttcaggctctgacacagcatgcattgtaatttctacaaactacattttacactattggtatcttcttaagtgaaggtactaaatyaacactaatgtgttcagaaagcagcaaagttatgccttaaggaaagcatcctcctagtaaattgacttattgcaaactagtactgttatataaaacacaaagggctcacagtggaatttttgaactacaatccctggaaggggtcattataattttgagtgataaaattgtaaacatcagtataatatagcctgtcttcattatctcaatgcaattattcagcagacttttttttttttttttttttggagacagggtctcactttgttgcccaggctggagtgcagtggagctattatggctcactgtagcttcaaccaccgaggctcaggtgattctcccacttcgtcctcctgagtagctgagactacaggcaaatgccaccatacctggctaattttttacattttttgtagagaccaggttttgccatattgcccaggttggtctcaaactcctggctcaggcgatccgcccacctcgtctcccaaagtgttgggattacaggggtgagccactgtgcccagctttattcagcaaacttaaccatctcaactgagttgtctaaaaagtgaggagtataaaacataaaatctagccaggcgcggtggctcatgcctataatcccagcagtttgggaggctgaggtggacggatcaccaggtcaagagatcgagaccatcctggccaacatggtgaaacccccatctctactaaaaatacaaaaattagctgggtgtggtggtgtgcacctgtagtcccagctactctggaggctgaggcgggagaatcacttgaacgtgggaggcagaggttgcagtcagccgagattgcgccactgcactccagcctagcgacagagcgagactgtgtggcaaaaacaaacaaacataaagtctgttgctctttacttagactccacagtaggccacattagtatcaaatcagagcagagtagtagcagaaaaagataactggaartttgttctatacagatacttttgaaaagtagtagcatattttgaaggaaaaagcagaaacattgctaaaagaaaaatcataatagtctacaacaggagtccgcaagtttttttgtattttaggctttgtaggtgtctgtggcaactactcagctctgctgttatagcatgaaagcagccatagataataagtaaatgaatgggtagggctgtgtttaaataaaactttatttacaaaaacagacagtgggccaaatttagcctgtgggccatggttggctggaccctggtgtgtgacttttcattatggggtcaaacaaaggattcctcagtaatgtcagtagcatcactagtatttatttattaataaaaaaaaaaaaagattgtagctaggcatggtggctcacacctataatcctagcactttgtgaggccaaggtgggaggataacttgagcccaggagttcaagaccagcctggaccacatagtgaggccctgtcttaaaaaaaataagattgtagttgcctgggagtcagggaaaggtatgaattgactcaaaagaagcaggagggaatctgggacgtgttgggactattctttatcttgtttgtgggggtggttacacgactgaatacaactgtcaaaactcatagaactgtatactaaaaagggtgattttactgcatgtaagttatatctcaataaactcacctttagaaaacaacaaaaacattttttcttgtgaaaacctccctgttttatagaatatagtggatacttgctgaagaaatcaatagatgccttttgatcaatttcttttctgaaataaaaaagctttttatggcatctcagcttataggcattacttattttggtaaatccatgcatataggatgtcttatttcctaacattatagtgaataaatgaagttttgttgtcagtatcttctgaactgaaagctagcaagtagcacagtttcatttgctatttcttctttggttttagaggagaaattcagattttaagaaccagaccttgtgcatcatgcagacttctgacttttatgattttcttcttttgaaaaaaaggaagaatctgaatttgagacaacgtgagggcaaggggccaagcctgaatctgtctctactaaaaataaaaaaattagccagacgtggtggcgcatacctgtaatcccagccactcaggaggctgcggcaggagaatcgcttgaaccggggaggcagaggttgcactggtcagccaagattgtgccatcgcactccaccctgggcaacaagagagaaactccgtctcaaaaaaaaaaaaaacattgtagtagaggtggtgtttactggttattgtttttataatcagttactataaaacaaacttgcttaaatgtggaatttttggccaggcgcgacggctcacgcctgtaatcccaacactttgggaggctgaggtgggcagatcacctgaggtcaggagttaaacacaagcctggccaacatggtgaaaccctgtctctactaaaaatacaaaaattagctaagtgtggtgtcgttcatctgtaatcctagctacctgggaggctgaggtaggggaatcacttgacctgggaggtggattttgtagtgagccgagaacgtgccactgcactccagtctgggcaacagagcgagactctgtcttaaaaaaaaaaaaaaaaagtggaatttttagccaagattttgttttttatttattattatttttttgaaacagagtcttgctctgtcgcccaggcttgagtgcagtggcatgatctcagctcactgcagcctctgcctccgggctcaaatgattctcatgactcagccacctgatgagtagctgggactgcaggagtgtgccatcacgccctacagaagtgcactaccacacccagctaatttttgtatttttagtagacaaggttttgccatgtttgccaggctggtcttgaactccttgcctcaagtgatcctctggcctcaacctcccaaagtgctgggattacagctgtcagccaccacacccagccttaaccaaggttttagacagctgtactgtgtctttattatttagtaaagtctgtttcattttgacattacgtgaaatatttcattatcccatagcatctgaaaaagccgatggaggtaaatcattgtatagcaattcttggtacctagaaaaggaaattgccttgtagtcaattgactgtcatgccaaaagatgacatccttccaggggacctctattaagcattcttgggctttatcagtaagtgccaatcttgatatttcacacagtgccaccacttaatactgccttaagggccgggcgcggtggctcacgcctgtaatcccagcactttgggaggccgaggctgacggttcacaaggtcaggagttcgagaccatcctggccaatatggtgaaaccccgtctctactaaaaatacaaaaattaggtgggctttatggcacacacctgtagttccagctgctcgggaggctgaggcaggagaatcactttaacctgggaggcggaggttgcagtgagctgagatcacgccaccgcactccagcctgggtgacagagtgagtctccttgtcaaaaaaaaaatactgccttaatggcctattgttatcaagttactggactaggctagggagagcaaaaataatcctctcctgggatgcatgggaagtctgtccaccacaggatcattctgaagcaatgaagaaaaggaaaatgattttgcaattactatccattgttggtatattttgttggttttttcaaattacaggttaagaatgcgttttaaagatcttatatatttctggttaaatagcctttataaatacatattctaactaggtgtcattttagttgaccaggcgtagagtttgtcatctttgaaaataaagtggcaaagttcagactactgtgctggtacttcctaggagcacatgtgaaatgaatcttcattccatatttgacattgttatgttaggtaccaactccttatctaagagttggggttctagttttaatacaattaagtaagaattggttgtgaatgtttttgtccttttttaagtgttcagaggcaagcttttaaaaaatattttattagatgaaatagagtaaaacacattgatcttaagtatacagttcactgagttttgacaaatgtatacacctatataaccactactacaattaagatatagtattctttatcctataatgtggagtggggttctagcacctcacaaaattttctcgtgcctttttttgttgttttttttttttgcggggccaggttgagggtttattttgtttttccaaacagggtctcactttgttacccaggctggactgcagtggcatactcactgtagcctcgacttcccaggctcaagtgatcctcccacctcagcctcccaagtagctgggcctgcaggcacgcaccaccatgcccagttaattcttgtattttttgtagaggcagggtttcaccatgttgcctaggctggtcttgaacccctggcctctagtgatctgcctgccttggcctcccaaagtgctgggattacaggtgtgagccaccatgtcaggcctgttttttttgttttgttttgttttgttttgttttaaaaagacagagtctctctgttgcctaggctggagtacagtgatgtgaccatggctcactgcagccttgacctcccaggctcaagtgatcctcccacctcagcctcccaacgtgctgggaccacaggtgcatgccaccactcctggctaattttttttttctaagtttttttagagatggggtctccttatgttgcccaggctggtctcaaactcctaggcttaagcagtcctgccttggcctcccaaagcactgggattacaggcttgagccaccatagccagccctggtgcccctttctagcagtgaaaacactgctaaatgggactgcgttaaatatgtaatttaatgtacaacctcctctctctctttttacaaacaggttgtcctggtgacagacggctgtcttggcattggtagagggtcactgcgacattccctagccactcaaaatcaacgaagtgagagcaacaggtttccactaccttttcctttcccatctaagttatatatcatgtgcatggcgaatttggaggaggtaataccttttgctaagtttttagtttgattaggcatattttacagcttagtttatttttcagtatataccactagtgctatattgtatatactgtagcattgaactccattggtttcagctgaggctggtattttatttgaaaagattctgggtctcaaatgttctttgaaatttcagagtgttgcctcatctggggaacatagctggagttgttatccatcctgctgatgggtgcataaagggtcaaggtgttctttttggtgttgttcatttcccttatatagaattcttatgtccattccaccagaaatgttgacaagagtgtgctttgactttgacagaagagtaaagtaacattattctgatacacgttttattaaacacttaaattcttggttttcccattcatttgggaaggtgatttaaccttttttcccctcagtttttctctctgtaaaatgtagataatgatggttctcaccaaaagacgttagaaacactttggagggaagatgctgtgtaaatactgtggtcacctctgagaatctttgcaaaactactcctgaatgaaatagctctacctgtgttattttacgtaacattcctctttggtaaccttgagtcaaaattgttgttgttattttcttctcacattggctattaaaaaaatcatctgttatttattgcctatgttatcgtaatggctttgaccttggtgagctgagaataatctggcattttgtgccagccactttaagggtcatctgttttgctttatagctccagagcaccgattccttggaatgccttgaacgtctcatagatttaaacaatggtgaagggcagatttttactattgatggccccctgtgcttgaagaatgtacagtctatgtttgggtgagtatatgcttagagctcttttgccttctttacaatccagtattataatttgacatccaggaagactatctgttttactgttcctaattgtgtcatttcattttccccaagttgtacatttttcagataaagtgatgggtagtaatggttttttaragtaaatctatactgtctgtagatactgacttccttataatgactyagcaaaatttcaaattaacttgctcttgggcttttcagaattgaaatttcctcaccaaaaatgtcagattttgttctgttttacagatggtcagatcttagttttggaaccaacttgaaaggaaaacaacccttgcgtcctgaaaaattaacttcatatgtatcgtattactcttcctataactattaattatcatattctagaaaactgatagatttggcatatacgcctttccatgctgttctcaagtgtggccacctaactgctgatgtacaagtcttccccaggccagaaccttttgttgtagatgaagaaattgatcctatccctaaagtcattaacacaggtaactttttaaaaaaacttatttcttagtttctctgttatccttactttcttctgacttgtgacttttactctcttctctgtctaggaaggttgaaaagaaatatatattgtggtacaggttgagtattccttacccaaaatgcttgggaacagaggtgctttagatttcagattttttggggtttgggatatttgcattttacttagtgattgagcatccttaatctgaaaatccaaagtgctccagtgagcatttcctttgagcttcgtgtcagcttcgtgcatgtgtaatagttgtggattgttgagcatttcggatttcagattttcagataggggatactcaacctgtactagggtgctgttgtcatcagcactttggattggaagattcattacctaaggggtggcagaatattggtcttttatggtaaggtcatcagttgatctccaatcctagataattataaccacgaattattagagttggaaatcatagccgtattcactagcattgaaatctttgagatgattcttaatagacatactgaacttaattagtatcataattaaggtcatataagaagggctagcttctatactttgcagtatgactcttgatatgtgaccctgggaagtcttcctctagttcttattggctaggcagggagaatcaaccagatggtcttggagttcttggatctgatatagtgtactcttctagcactgctgcttatattatgactgaaagaaagtgatgtaccacagcttttacctggttcgtgttgccaatactatgcttaactgagactggcaaagtgaagagtcaaaaatagcaaggagcagtggagaggagacttgcttcctattggtgggtggactccttgaatcttaggtgcatgttaaatcttttagggctggatattatcagtgtttcagtcaccattacagccttgatgtccagcatagtgcctgacacttagtaggtgcccaataggtaattgttcagtcaataaatgattagaattaaatgttcagtgaatgctcattgtttgtggtatacagatttttaaggagtgttggagtgaggggctgtgaacagtctttttactttttgtgcctttagcttctggaagcaaggcatccatctcttctactgtgactagacagtagtacattaagttgtaccaaaagtcttgttgccttcataacagttagattccacttccttcccatcctttttcgatgagtaaatttgaataggtcttttctttcccatataaactcttagtggaagatctttcttgcagctaaactgctttaaaataaagtagacctttttctactcaaatgaaaaatatctagctgcttatactaatgcatttattactcagctaagggaggtayggacagcaaatctccagagaagcacacttcctaatattttagaaatagggtcgggcacggtggctcacacctgtagtcccagcagtttgggaggccaaggcgggcggatcacctgaggtcgggagaccagcctgaccaacatggagaaaccccgtttctactaaaaatacaaaattagccaggcgtggtggcacatgtctataatcccagctgcttgggaggctgaggcaggagaatcacttgaactcaggaggaggaggttgcagttagctgagattgcgccattgcactccagcctgggcaacaagagcgaaactccatctcaaaaaaagaaaaaagaaatataaggtgttcaccatgattctgatttttaaaaattcttttgaaaatatgggtattaatctagaagaaagactgaaaagcacatcaataaaatattaatagagatttcctttgattatgaataatgagtgactttttcttctttataatttttattgtttttaagtttttatattatataatcgaaatgtttaagttcttttggttacaacattcatttttatttattttaggttttcaacaaatacttttggtctttactacagcgtctataaagcagagaagtcattgtcatatttagactgcttaccctagttttgtagagaatacagttctttctcagagagatgtttttaatacaatagctttattcttcaaaggctgagtgtagttgctgcggaagtgtttgactatgatgccccctggtgacctgaacatccctgactacacagagggattagacctttcagtttttgccttggctggggtcctaaccttataaaaataaaatttagctgattttgtcatataacttagactcattaaataaatgacagttatcattatttcctgagcagcttaaaatgcaaattattagacgactccatatacaaatctaataactttcccagtcatcatatttgaaaccccaacctaaacagtgcatttgtgaaatgtaatacayggaaaataatgtacttttccatagaatgaattaattctgtgttgattccttcatttcagatttggaaatagtgggatttattgatatagctgatatttcaagtcccccagttctgtccagacatctggtcttacctatagcacttaacaaaggtgagttcctattccactgatacgtctgaagcgtcttattaactaaagttgttcttaaatcttagatagtaggatagcccattttgcagaatttaggggaaaggaatagttacagaattggattttagaaaatggaatattgcctaatatatcaaaaaagtaattctgctttacatggtagaaacattttgacacatatttactgtgtgttggtttgtgaattgacagtggaggtcctctttagagatgagaatgcttagtccctcatccagggctctgcctttcctagtactaacatgctgagaaagcttaagtagttatcagatggttacttgataaatgtgcaagtcaaatacagctttatacacggaagaatcacatctgttctttgttctactggtgcccagcacatagtagataactcagtaaatattgttgaatgaatgggtgaatccaggcccttgtgggtcctccttactgcagcatatatctctaggaactataaagtcatctcctcaaattcagcatctctctggagaatgctagactctaactctttaaaattatctttttcaggggtggcactgtgctgtggtgggtatagagcaggagcttttgtccctgactggctacaggttcaaatcctagttctacccttaaaattatcttttcctctgttttaagctgaccatccactttatatttatcagctttctctaagaactgtatgtagtcagtcaggttttcacatactgagtaatgaccacatcccatttatgcccaggttatctcagttggagtattggatattctataaccaatcacatgttcacagacagaatcttgaatatatacccacagacagctttataatcactgtgttggtaattattattctcagagaacagccagatttcccttagttctaaggccctggggaattctgcatgccagtatacttaccaagaaagaaattaagcaaaataaaccatttatataggggaatagtgaaaagaaaaatacgggaaggtggccgggcgcggtagctcacacctgtaatcccagcactttgggaggccaaggcgggtggatcacaaggtcaggagattgagaccatcctgactaacatggtaaaaccccatctccactaaaaatacaaaaaaaaaaaaaaaaaaacctgggcgtagtggcaggcgcctgtagtcccagctactcgggaggctgaggcaggagaatggggtgaacctgggaggcggagtttgcagtgagccgagatcgcgccactgcactccagcctgagcaacagagcaagactccatctcaaaaaaaaaaaagaaagaaaaagaaaaatatgggaaagcagagtagggccattttgtaagggctgttgaattttctagctaaactgggctaattcttcctgttgaattagaaagtctttgaacaaagcagagcagacagatatttttagagggaagttaattgtaggaagattcatctgtcagcagagtgtgagagaaactggagaatccagtcaaaaagcttataatcattgtttacctttggggactcacatgcatgtgctgccctaagcctgttggttatgaatgcacttgacatctctgtatctaattctgtttaaatgggtgcctgaagcttccagatagcatctaactaaacatcctagtggaactgtggagaatggatttttgtgtgtaagctttactgagatataattcacataccatatacttcacccatttaaagtggtttttagtatatttgcagagttgtgcaaccatcaccacaatcaatttgagaacttttttataaccccaaaaagaaaccctgtaccctttaactatcaactcccagacccctccccccatttcccctaccccaaataaccactaatatcctttctgtatatatagatttgcctattctggatgttttatataaatggaattcatataatgtgtggaaactgacttttatgtagatattggaaaactggaatgagtttttcctgcttgttataatattcccttagaactctacactatcccttaaaggctagaaacatccaagagtataaattggggtttggggtttttgtaggtaatttcagtctgacctgttttctctttttttcacagaaggtgatgaggtgggtactggcatcactgatgacaatgaagatgaaaattcagccaatcagattgcaggcaaaataccyaacttttgtgtcctgctccatggtagcctaaaagtggaaggaatggtagcgattgttcaattagggtaggaaactttgtttacatttggttgaatgaaagggaaaatcattttacaaagtgaagtattttgcagacttttctgaaggaaatagaaaggtccttgtcacctttttccttttcctgccacacacttttcccacctgctactacagtcctttttttttgttttttttgagacgaggtcttgctctgtcccccaggggtacagtggcatgatcacggctcactgcagcttcagcctcccaggctcaagcaatcctcccatctcagccttccaagtagccatgacccaggtgtgcaccaccatgcctggctaatttttttttttttttttwaatttatagaagtggggtctcactgtgttgcccacactggtcttgaactcctgggctcaaggatcctcccaccttggcctcccaaaatgctgggattacgggcattgagccacagtacctagctgctattaccttctaaactactcttttaatcatcccctagaataagtgtggagtgagccttttaattacgttgcctttattttatatcctttctcaattttcctctttctaatcctatctagaatacctgggttctggttatagcaatgctactaacttgctttaggatcttaggcaggattcacagacttctcatctataaaatgaggggatagaacgaaacaaaaaaaaagatgctaataacattgagcattttattatgtgccaggcactcctctaggtattttacatatgttagcacatttaatccctcataacaacactatatgggaggtatcagcattatccctatctatagatgaggagacaggcttaagagaggttgtggaacttgcccaaggtcacacagctagtaatgaaagagccatgattcttacccatgcattctgactccagagcctactcataatcattctgctgtgttccttccctgtgaggaaaccccgttagcttttacattttctgaagtctcaaaatctgcaaaaccatctatttccctttctataatacatatttttagaaaaaaggaggtcactgatcattttctggccactacctggggttggctggtatagatcaagagttaggattaattaaaggaagcatggctccatttctgctacagttaaaattagctggtccaaaaagaggaatgcagatcttactagatattagtctgctatatttcttggcacccaagctacttgtactggtctgaatatgagaatcatctgggaccctttgagaaactggggacagagtctcttttacataacaggatgatggccttgagccctgtggtagaagggcttctcttggtgctgctgtgagtgactcagtgaggcaggtgacaggacctataggtcacagcctttacccctcctcatcacctctccagctacttgctgccctttgtgatttgttttttctctttcaagattgcttttgatttccatatccacataattttacctgaataataataaatgtctcagaagaatggaaatattaggggacagcagtatgcattttcaggtttagggtttggctttggtaaaagtagtgtgcctgatttcaaagctgaagcctgtgtctctcaagagaaaaatacaggctagacttatttaacttgacagtctcaggcttgatgttcttctgatcttccgtcttctctccrtctagtcctgaatggcatggaatgctctactcccaagctgacagcaagaagaaatcaaacctcatgatgtctctctttgagcctggcccagaacctctcccatggctagggaaaatggcacagttgggtcctatttcaggtataatccagatcagattttacttatcctgactttgttttcattctgctgttctcaatgtctctgactgtgcagtcagagaactgattgatctcccttactggtatgccatggtctcggatgatgctggatgtgtacggtgaaaacttgaagagagtttgatgtttgaactcctaaattttacagctcaggagaaatcaacatttagattgctttaagtaaatgcaaattcttcagcggcttagagtgaaaaactaatctccataattttttttcttggtgtactatagttcaagtaatttcctgtcattcctagataatgtaatctttcctccttcttgaaactttttttctgtagctttcctgacattgcttctggtaccgatttgactttttctttggcggacttttctttctctcttcgttttgtcttttcttctccttgcctcatggtttccaacatgttctttgccttcttctctttggttattcttctcccttggttattttatcagctgtaataacttcacatttcccaaatctataactctagtcttacctgatctctccctggaatttgcatatcatatttccagttcctagttggatctctacacctggatattctgtcacagtctcaagctcagctgtttgttacagacctattgtcccgcacccctttctcctcaaactattcctccttctgattttcctcctccttttgattaagtcatttgtgccactagctactcaggttccaactgtagtcatctttgactcatttgggcccatttcaatttcaggaacatctaccaagcaacctattctgtgccaggcctaagggataaagagttagctggagttgttcaaagtctagtggaaagtggaatgatcacagactggcacaaatcagagttagcctggaggagatgatgatgagctctgcctagaggactcaggagaatcttcacagaggagaaataccctagttgagttttgaagaaaaggaggaacttgctgagctaatgaagggaagaaagggcatcctgggcaaacagaacacctacagaaagaaaaggaagtgtggcacaaaatgtgagagtgggtgtgggaggggcagatggtagattggagattggtagtagctagagtggagcaggccttgtctgaaatgtgaagaaccaggaatttatcttgcagatactgggaaaccactgaagaggagtaatgtgatcagatccttctggctacagtgagaacagggggataccagttaggaaactatattttaggggctggtgccccctgcagttgtacagtatggccataatccaagtgagagataagaaatttgtatttagaaagatatctctgtggagtgtggatctgaaaaggcaaggacctgtggctgaaagttactgtgttaatcctggaaatgtgaagatgagagccagaccgtggcaatagctgggggtaaaagatatttaggaggtaggatcaataatgtttggatatgaaaattatggagagagaagtgttaaaattgatcccaggtttctgacctgggctgcagggtgaaagatagtactattagttgaaatagataatasagagagaagagtaaatttgggaagaacatattttgtttatgttgagttcgtgcctgtgagatacaggtggaggtgcctagagacaattctgtagaagtctgaagtttaggagagagggcagagttggagataaaattttaggttgtaagcctrtcataaatagttaaaatggtgagaatgagggagattgctcagggcagtggttcacaaattttgagtttttgtgtacaaaaataaacttggaataaataccacatgttctcacccatatatggaagctgaaaaaaaaygagctcatagaagtacagagtagaatctagaatcatggtcattagaggttgggaagggtagtgaggagaggagaataggcagaggtaacagatacaaagttacagctgttagggaggaaaaagttcagtgctctgtagcatggtagcctgaatattgctcacaataatttagtgtatattttcaaacagctagaagagaggattttgaatattcacaacacaaagaaatgataaatattcagccaggtgtggtggctcatgcctgtaatcccagtactttgggaggccagggcaggtggatcacttgagtccaggagtttgagaccagcctggccaacatagcgaaaccctatctctaccaaaaatacaaaaatttgctgggcatggtggtgtgcacctgtggtcccagttactcagggggcggaggtggaaggatcgcttgagcccaggaagcagaggctgcagtgagccctgattgcatcgctgcactccaacctgtctggccctcacagaaaaagtttgccaacctctgactagactattgtgatggttttcaccaaagatgcctatctataatctaagatagtagtagcattcagactcctttctgatctggcttccaacatagcaacacttggcttgttacaattgttcttcattccagttgaactgctgttcactctgccctgtgttcatgttgttttttcctcctggatctgttctgcttttcagtgtggataataatagctaatattataatgaacttaactttgtgccaggcactgtgctggacataatgagcataccatctcatttaactctcacagcagtcttggaattggaattatgataacaaataacaattaataataaaacttacctcagagggttgttgagcaaaacatgcaaaatagcactattgtttgtaccaatccctcctactcccaattctgttcctagagacaactactttttaaaacttatttgtttcttttggtatttatttatatttctttttttttttttaattgagacagagtctcactccatcgcccaggctggagtgcagtggagcagtcttggttcactgcaaccttcacctcccaggttcaagcaattcttctgcctctgcctccctaatagctgtgactacaggcacaagccaccatgcccggctaattgttgtatttttagtagagatagggtttcatcatgttgttggtcaggctggtctcaaactcctgacctcaagtaatcctcctgcctcggcctcccaaagtgctgggattacaggcgtgagccactctgcccagccttatttacatttctaaataatataggtatgtccctatttctgtcaggggttcccccattttattattattattattattttatttatttattttgagatggagtcttgctctgttgcccaggctggactgtagtggcgtgatctcagctcactacaacctctgcctcctgtattcaagcaattctcgtgcctcagcctccccagtagctggaactgcaggtgtccaccaccacgcttggctgatttttgtatttttagtaggtacggggtttcaccatgttggccaggctggtctcaaaactcctgacctcaagtgatcctcccgccttgacctcccaaagtgctggaattacaggcacgagccactgtgcccggcctcccgtcttattattttttatttattttttgagacagggtctcactctgtcacccaggctgaagtgcagtggcacagtcttggctcactgcagccttgacctctcgggtgatcctcccacctcaacctctcatgtggctgggaccacgggtgcatgccaccatgcctggctaatttttttgatttttttatagagacaagatctcactatgttgccaaggctggtctcaaactcctgggctaaagcaatcctccaccttagcctcccaaattgttgggattacaggcgtgagccaccacactcagcccttttcccccattttagatgccattttttgactttttaaaggatgaatatttagctctattaacaccaccatctcccacccacctacacaagacgcacatttcccctcctactatcctcccaatatagttataatgttctttttggttaaatcagtattcagtccttgttacatgatgtaaatgttatttacaactaagctataccaatttgtatttcctttgttttgcaactttttgtcccctagctcagtcccagttattttttttctttgcttgttttctatataactaattcctccctaagtaaaatacattcttcaggtattttctcagtttcctttttttttcttagcgtcatctcccatcctcctgcttcataaatggtatggttattccccagacctgttgcataggtgttgtcctgagtctcccctttacatctctcctatggatctcctgttcataactcctcctgaaaaaaagggtacatgggaagtaaatattttgaaatcttgtatattttgaaaatatatatatgtttatttcattctttatatttaatgatagtttggttgggaattgagttctaagttggaagtcattttccctcagagttttgaagcattactctgttgtctcttctggagtccagtgttgctacggaaagttagtgccatggtgactcaaagacctttgaccctgaactgtattttctccatattccttggtgatcttctttgtatccctggtattctgaatttcagaatgttggtctcttcattgattttgctaggcactcagtggaccctttccatctggcaattcatgatcttcagtactgggaagatcaattatttctttgatttcctctttctgtattctctgttctccttttctggaacatatatttgtgatttgtgtttgtaattttctatctctttctgcccattttcccatttttaaaatttttgttctgtcttctgtatcttcaaatttatcttataacttttattttttgtttatactatctttttaaaatttcttctttcataaatgtaatatttcctgtctcctaagccagttagttaccacatataggctccagacaactaatgacagtacaaaataggctctgattagatgttgaaatgtttggtactgatactaagtgctaggggataaaagggtctacaaaaaccactatctgccagaaaaacttgaaacaatttyatggaaggggtaagataggatctggacttggaatataggtaggtaagtttggataagtaaggaacagcagtgttgaatggtggaaaaagtgttggcttttgaagcaggcccaactgagtcactgtgaaaccttgtataagtccaacctctctgtgccttagtttcctcatcttyaatgggactaataacatcttcgctctagagttgctataaagagagaagttgaatatgtaaagtatcttgcacatagttggaacttaataaatattctttattctgtaagttccttgaggctgaaaagtatcttctctaggcacaattcctggcacagtgcttgctacgtagtggggtcttactatagataatgaatgaataagtgaatgagtaaatgagtgaataagaagggagagcattctaggcagtgaggagtaatagaaatagcaggaaagttggaaatgaactgttgtgtgggaaaggacttgcaggaccttagcctgactcagaaggtttatatattgacaaatattaatggaaatacgtctggagagttgggccagtattttatggaggagtcagggctgaagagggttgacaaaggaagtgttggtccaatatcaaggtgtttcaattaatgaccaaatcagggatagagaatgtctggctcaattagacagactggtctaattacatttttcaacacaaacttttgggcaagagatttaagttctctgaacttgtaggaaaatgactcctgctctgtctacacgagaaggtggtaataataataaagatcaaatacaccattagaagtatgtgtgctttataagtttgtggcagtttcatagactcaggaagcaggtacagagacaaaccctgtttgttcatgtagctataaaaccaatgtggctttacatttttggaagcaataaactaataagccatattggggtatgcttcaccaataaaagtatttcttgtcttgccctttgccttaatttggctatatatatagttttcctttttaattattttaatgcctagacctatgctgtctaatccagtagctactagccacattaaatttaattaaaattaagtacaatttgaaattcagtttctcagtcacactagccacagggcaagtgcttagtagttagtagctaccacattagacagcacagatatagaacatttccatcatacagaaagttcagttggagagcactgggttagactatatagaattgcagtatatatatgtgtgtctatgtgtatgtatatatatatatattttttaaatatgtatttgttttatcctttgaccttaatttataaatcagataagtgaagcttgtttctttaaaaacattaagctgtttttcacttaaatgggcctcctacatcagtggctttctattgagaacaggttctccaacctgactgaagttaatggattttcttaattaacaaagtgataggatatcaaagattgagtgattcaaagagcttctagtctaaatggaaatgtaactgattgtgttttaccagatgtcatttcaagaatgtcttttcttttaagatgctaaagaaaacccttatggcgaggatgacaataagagtccattccccctgcagcccaaaaacaaacgcagttatgcccagaatgtgactgtctggatcaaacccagcggcctgcaggtaacattaccatttatgttgctttccactggggacaggagacatttgggtaggcaggcaggcattttatttgattttcttttcctttgatacttagtaattcatttacttctaatgtttgtcattatttccaaaaggkatttgagatgccctacagtaaaacatgtatatagcaaaatcattttttacaaaatttagagcaataagaatcctagaggaaggaggaagaaggaagacaattgtgccaggaacccaaggcaaaataataactttatgtgagtgttttggctctgagcttcctgttaccaaggtcagttgttcttgtctaaagaaaggaaatttgtcagtttgtctagagagacatattttcctggcattgaattttagtgtgaaattttttatatggtgaggcattgactaacataatgggtattggctttaacaacagttttggaaaagatgtaaaagtcttcataactatatttcttccatcccttcagtagaactcaagccatagcattacatttcacaaaaacacttccataggaagttatgataatatgattatcaaggaatgatgctttcaggcatggtattcaggaacatatgataatatgattatcaaggaatgatgctttcaggcatggtattcaggaacatttctcctttcatcagcaaaaagtcatttatacctgtttttaaaaatcacttattgaaacttttttctcctttgagcacctttatttacatttgttcttccagtaagttcaacctaaaccaaatgagaagagacaggccacttggacaacaaaagtagtttctgttgactgcacagtctctgagccccgtttccatggagactgaaccacatcctgccaaggctaaagtgtcaggggcctctttgttggaaaatcagggtcttctattttcctgatatccctgaccccagtgcttccttgtcagagggatattagaaccactttcaccaccagttatagctgagcttttcttaaattattttttttaattttttttgtttgaatcttcactactatcttgggtttatttttcttattctggtaaaatatacataaaatgtaccttcaaccattttaaagtacacaattcagtcccatttagtacattcacaatgtaccatcaccactctctagttccagaacattttaatcactccaaaaggaaaccctgtgcccattaggaaagtcactccacattccttcttccgggccctggcaaccattgattttctttctgtctctatggacttacctattctagatatttcatgtaaacagaatcatacaatttgtggccttttgtgtttgacttcttgtacttagcatgatgttttcaaggtttattcatgttgtagtatgtatcagtacttcattcctttttatggctaatattccatatgtctatatgtatatgtcacattttgattatccctcagttgacggacattagggttaccttttggctattgtggataatgctgttacaaacattcatgtataagttttggtctgaacatttgttttcaatactcttgggtatatattttaatgggaatgggattgctgggtcagacagcaattctctttaacttactgaggaattgccacactctctcacagcagccacaccattttacatttctgctagcagtgtataagtgttctagtttctccacgttcctaccaatactcattgttttccttttattattattatcatatagctatcatagtaggtgtgaagtggtatgtctttgtttttgcatttccttgatgaccaataatgtgcatcttttcctgtgcttattggccatttgtgtatattatttggagaagtatatactcaagttctttgtccattttttaattgggtttgtctttttgttgttgggttttttatatattctggatattatgatccttagcagatacatgatttgcaaatatcttctcccattttgtgagttatcttttcactctctttatagtgtcctttgatacacaaagtttttggttttgaagaagtcaaattttgtctcttgcttttgttgtttgtgctttgtgctgtcttaactaagagatcattgccaaatccaaagtcataaagatttacccgctgtgttttctttttcttcttctctttttctcttgagaaacacatctcactacgttgcccaggctggtctcaaacttctggcctcaagcaatcctcctgagtagctaggattacaggggcacaccactgcacctggcccgtttttttctaagagttttatagttttagcttttacatgtaggtctctgatccattttgagttagttttttgtatatggtatgatgtaagggtccarctttattcttttgcttgtggatatccagttgtctcagcaccaaatgttgaagagactattttttccccattgaatcgtctttgcaaaaaagtccctggcaatagatgtatgggtttactgggtacatttttatgaggcaagttcgtttctgtcaggggatttattttactgtcaagccttttgaaggagggagtgctttactaatgttgaactgacattaactcagaagggatcctcatcttgacattgtagctgtgttctcattttcatctctttaaacatttagatccattcttttatattatttcccttttttaccacagaattctaatgttggattttttttttttacccttaatagacagatgtacagaagattttaagaaatgcaaggaaactacctgaaaaaacacagacattctataaggtgagacagacagaagaggatgtgcccaaaatatatggttcacgacagtaaaactgtgagatggcagtgwgaatatgggcaggggttagagatgtatgacttgtgcctcagttttttcaaataaactcagtaaaagtgataggtctgttccttccctaaaatccaagaattggaagaatttaaatggcctaattctgtacaggcagaaggtttttctgtgttggggctgctgtgaatgaatgactgatggaagcagcttagaggacctgtgggtcatagccctgaactctcctcatcactcctatatgggtatccaggccaaccccaggcaaccaatgtatgtggcttcctggatggggaattgcccagaacattctttttttttttttttttttttttttttttgagatggagtcacactctgttgcccaggctggagtgtcgtggtgcaatcttgggtcactgcaacctctgcctcacaggttcaagtgattctcctgcctcagcctcctgagtagctagtactacaggcacgtgccaccacgcccagctaatttttgtttttttgtttttgagacagagtctcactctgtcggccaggctggagtgcagtagcacgatctcagctcactgcaacctccgcctcgcgggctcaaacaattctcctgcctcagcctcccaagtagctgggattacaggtgtgtgccaccatgcccggctaatttttgtatttttagtagagacggggtttcaccatgttggccaggctggtcttgaactcctgaccacaggtaatccgctcgcctcggcctcccaaagtgctgggattacaggcgtgagccaccgttcccggcctaatttttgtattttcagtagagatggggtttcgctgtgttggccaggctggtcccgaactcctgacctcaggtgatccacccaaagtgctgggattacaagcgtgagccaccccacctggccaccccagaacatttttattgcaccagagactctgcttctaggaatgatatctaacattacacatttatgaattgcagaggagatagccctgcagaatcatatgcagctaatccagaacgatnnnnnnnnnnnnnnnnnnnnnnnnnnnnnnnnnnnnnnnnnnnnnnnnnnnnnnnnnnnnnnnnnnnnnnnnnnnnnnnnnnnnnnnnnnnnnnnnnnnnnnnnnnnnnnnnnnnnnnnnnnnnnnnnnnnnnnnnnnnnnnnnnnnnnnnnnnnnnnnnnnnnnnnnnnnnnnnnnnnnnnnnnnnnnnnnnnnnnnnnnnnnnnnnnnnnnnnnnnnnnnnnnnnnnnnnnnnnnnnnnnnnnnnnnnnnnnnnnnnnnnnnnnnnnnnnnnnnnnnnnnnnnnnnnnnnnnnnnnnnnnnnnnnnnnnnnnnnnnnnnnnnnnnnnnnnnnnnnnnnnnnnnnnnnnnnnnnnnnnnnnnnnnnnnnnnnnnnnnnnnnnnnnnnnnnnnnnnnnnnnnnnnnnnnnnnnnnnnnnnnnnnnnnnnnnnnnnnnnnnnnnnnnnnnnnnnnnnnnnnnnnnnnnnnnnnnnnnnnnnnnnnnnnnnnnnnnnnnnnnnnnnnnnnnnnnnnnnnnnnnnnnnnnnnnnnnnnnnnnnnnnnnnnnnnnnnnnnnnnnnnnnnnnnnnnnnnnnnnnnnnnnnnnnnnnnnnnnnnnnnnnnnnnnnnnnnnnnnnnnnnnnnnnnnnnnnnnnnnnnnnnnnnnnnnnnnnnnnnnnnnnnnnnnnnnnnnnnnnnnnnnnnnnnnnnnnnnnnnnnnnnnnnnnnnnnnnnnnnnnnnnnnnnnnnnnnnnnnnnnnnnnnnnnnnnnnnnnnnnnnnnnnnnnnnnnnnnnnnnnnnnnnnnnnnnnnnnnnnnnnnnnnnnnnnnnnnnnnnnnnnnnnnnnnnnnnnnnnnnnnnnnnnnnnnnnnnnnnnnnnnnnnnnnnnnnnnnnnnnnnnnnnnnnnnnnnnnnnnnnnnnnnnnnnnnnnnnnnnnnnnnnnnnnnnnnnnnnnnnnnnnnnnnnnnnnnnnnnnnnnnnnnnnnnnnnnnnnnnnnnnnnnnnnnnnnnnnnnnnnnnnnnnnnnnnnnnnnnnnnnnnnnnnnnnnnnnnnnnnnnnnnnnnnnnnnnnnnnnnnnnnnnnnnnnnnnnnnnnnnnnnnnnnnnnnnnnnnnnnnnnnnnnnnnnnnnnnnnnnnnnnnnnnnnnnnnnnnnnnnnnnnnnnnnnnnnnnnnnnnnnnnnnnnnnnnnnnnnnnnnnnnnnnnnnnnnnnnnnnnnnnnnnnnnnnnnnnnnnnnnnnnnnnnnnnnnnnnnnnnnnnnnnnnnnnnnnnnnnnnnnnnnnnnnnnnnnnnnnnnnnnnnnnnnnnnnnnnnnnnnnnnnnnnnnnnnnnnnnnnnnnnnnnnnnnnnnnnnnnnnnnnnnnnnnnnnnnnnnnnnnnnnnnnnnnnnnnnnnnnnnnnnnnnnnnnnnnnnnnnnnnnnnnnnnnnnnnnnnnnnnnnnnnnnnnnnnnnnnnnnnnnnnnnnnnnnnnnnnnnnnnnnnnnnnnnnnnnnnnnnnnnnnnnnnnnnnnnnnnnnnnnnnnnnnnnnnnnnnnnnnnnnnnnnnnnnnnnnnnnnnnnnnnnnnnnnnnnnnnnnnnnnnnnnnnnnnnnnnnnnnnnnnnnnnnnnnnnnnnnnnnnnnnnnnnnnnnnnnnnnnnnnnnnnnnnnnnnnnnnnnnnnnnnnnnnnnnnnnnnnnnnnnnnnnnnnnnnnnnnnnnnnnnnnnnnnnnnnnnnnnnnnnnnnnnnnnnnnnnnnnnnnnnnnnnnnnnnnnnnnnnnnnnnnnnnnnnnnnnnnnnnnnnnnnnnnnnnnnnnnnnnnnnnnnnnnnnnnnnnnnnnnnnnnnnnnnnnnnnnnnnnnnnnnnnnnnnnnnnnnnnnnnnnnnnnnnnnnnnnnnnnnnnnnnnnnnnnnnnnnnnnnnnnnnnnnnnnnnnnnnnnnnnnnnnnnnnnnnnnnnnnnnnnnnnnnnnnnnnnnnnnnnnnnnnnnnnnnnnnnnnnnnnnnnnnnnnnnnnnnnnnnnnnnnnnnnnnnnnnnnnnnnnnnnnnnnnnnnnnnnnnnnnnnnnnnnnnnnnnnnnnnnnnnnnnnnnnnnnnnnnnnnnnnnnnnnnnnnnnnnnnnnnnnnnnnnnnnnnnnnnnnnnnnnnnnnnnnnnnnnnnnnnnnnnnnnnnnnnnnnnnnnnnnnnnnnnnnnnnnnnnnnnnnnnnnnnnnnnnnnnnnnnnnnnnnnnnnnnnnnnnnnnnnnnnnnnnnnnnnnnnnnnnnnnnnnnnnnnnnnnnnnnnnnnnnnnnnnnnnnnnnnnnnnnnnnnnnnnnnnnnnnnnnnnnnnnnnnnnnnnnnnnnnnnnnnnnnnnnnnnnnnnnnnnnnnnnnnnnnnnnnnnnnnnnnnnnnnnnnnnnnnnnnnnnnnnnnnnnnnnnnnnnnnnnnnnnnnnnnnnnnnnnnnnnnnnnnnnnnnnnnnnnnnnnnnnnnnnnnnnnnnnnnnnnnnnnnnnnnnnnnnnnnnnnnnnnnnnnnnnnnnnnnnnnnnnnnnnnnnnnnnnnnnnnnnnnnnnnnnnnnnnnnnnnnnnnnnnnnnnnnnnnnnnnnnnnnnnnnnnnnnnnnnnnnnnnnnnnnnnnnnnnnnnnnnnnnnnnnnnnnnnnnnnnnnnnnnnnnnnnnnnnnnnnnnnnnnnnnnnnnnnnnnnnnnnnnnnnnnnnnnnnnnnnnnnnnnnnnnnnnnnnnnnnnnnnnnnnnnnnnnnnnnnnnnnnnnnnnnnnnnnnnnnnnnnnnnnnnnnnnnnnnnnnnnnnnnnnnnnnnnnnnnnnnnnnnnnnnnnnnnnnnnnnnnnnnnnnnnnnnnnnnnnnnnnnnnnnnnnnnnnnnnnnnnnnnnnnnnnnnnnnnnnnnnnnnnnnnnnnnnnnnnnnnnnnnnnnnnnnnnnnnnnnnnnnnnnnnnnnnnnnnnnnnnnnnnnnnnnnnnnnnnnnnnnnnnnnnnnnnnnnnnnnnnnnnnnnnnnnnnnnnnnnnnnnnnnnnnnnnnnnnnnnnnnnnnnnnnnnnnnnnnnnnnnnnnnnnnnnnnnnnnnnnnnnnnnnnnnnnnnnnnnnnnnnnnnnnnnnnnnnnnnnnnnnnnnnnnnnnnnnnnnnnnnnnnnnnnnnnnnnnnnnnnnnnnnnnnnnnnnnnnnnnnnnnnnnnnnnnnnnnnnnnnnnnnnnnnnnnnnnnnnnnnnnnnnnnnnnnnnnnnnnnnnnnnnnnnnnnnnnnnnnnnnnnnnnnnnnnnnnnnnnnnnnnnnnnnnnnnnnnnnnnnnnnnnnnnnnnnnnnnnnnnnnnnnnnnnnnnnnnnnnnnnnnnnnnnnnnnnnnnnnnnnnnnnnnnnnnnnnnnnnnnnnnnnnnnnnnnnnnnnnnnnnnnnnnnnnnnnnnnnnnnnnnnnnnnnnnnnnnnnnnnnnnnnnnnnnnnnnnnnnnnnnnnnnnnnnnnnnnnnnnnnnnnnnnnnnnnnnnnnnnnnnnnnnnnnnnnnnnnnnnnnnnnnnnnnnnnnnnnnnnnnnnnnnnnnnnnnnnnnnnnnnnnnnnnnnnnnnnnnnnnnnnnnnnnnnnnnnnnnnnnnnnnnnnnnnnnnnnnnnnnnnnnnnnnnnnnnnnnnnnnnnnnnnnnnnnnnnnnnnnnnnnnnnnnnnnnnnnnnnnnnnnnnnnnnnnnnnnnnnnnnnnnnnnnnnnnnnnnnnnnnnnnnnnnnnnnnnnnnnnnnnnnnnnnnnnnnnnnnnnnnnnnnnnnnnnnnnnnnnnnnnnnnnnnnnnnnnnnnnnnnnnnnnnnnnnnnnnnnnnnnnnnnnnnnnnnnnnnnnnnnnnnnnnnnnnnnnnnnnnnnnnnnnnnnnnnnnnnnnnnnnnnnnnnnnnnnnnnnnnnnnnnnnnnnnnnnnnnnnnnnnnnnnnnnnnnnnnnnnnnnnnnnnnnnnnnnnnnnnnnnnnnnnnnnnnnnnnnnnnnnnnnnnnnnnnnnnnnnnnnnnnnnnnnnnnnnnnnnnnnnnnnnnnnnnnnnnnnnnnnnnnnnnnnnnnnnnnnnnnnnnnnnnnnnnnnnnnnnnnnnnnnnnnnnnnnnnnnnnnnnnnnnnnnnnnnnnnnnnnnnnnnnnnnnnnnnnnnnnnnnnnnnnnnnnnnnnnnnnnnnnnnnnnnnnnnnnnnnnnnnnnnnnnnnnnnnnnnnnnnnnnnnnnnnnnnnnnnnnnnnnnnnnnnnnnnnnnnnnnnnnnnnnnnnnnnnnnnnnnnnnnnnnnnnnnnnnnnnnnnnnnnnnnnnnnnnnnnnnnnnnnnnnnnnnnnnnnnnnnnnnnnnnnnnnnnnnnnnnnnnnnnnnnnnnnnnnnnnnnnnnnnnnnnnnnnnnnnnnnnnnnnnnnnnnnnnnnnnnnnnnnnnnnnnnnnnnnnnnnnnnnnnnnnnnnnnnnnnnnnnnnnnnnnnnnnnnnnnnnnnnnnnnnnnnnnnnnnnnnnnnnnnnnnnnnnnnnnnnnnnnnnnnnnnnnnnnnnnnnnnnnnnnnnnnnnnnnnnnnnnnnnnnnnnnnnnnnnnnnnnnnnnnnnnnnnnnnnnnnnnnnnnnnnnnnnnnnnnnnnnnnnnnnnnnnnnnnnnnnnnnnnnnnnnnnnnnnnnnnnnnnnnnnnnnnnnnnnnnnnnnnnnnnnnnnnnnnnnnnnnnnnnnnnnnnnnnnnnnnnnnnnnnnnnnnnnnnnnnnnnnnnnnnnnnnnnnnnnnnnnnnnnnnnnnnnnnnnnnnnnnnnnnnnnnnnnnnnnnnnnnnnnnnnnnnnnnnnnnnnnnnnnnnnnnnnnnnnnnnnnnnnnnnnnnnnnnnnnnnnnnnnnnnnnnnnnnnnnnnnnnnnnnnnnnnnnnnnnnnnnnnnnnnnnnnnnnnnnnnnnnnnnnnnnnnnnnnnnnnnnnnnnnnnnnnnnnnnnnnnnnnnnnnnnnnnnnnnnnnnnnnnnnnnnnnnnnnnnnnnnnnnnnnnnnnnnnnnnnnnnnnnnnnnnnnnnnnnnnnnnnnnnnnnnnnnnnnnnnnnnnnnnnnnnnnnnnnnnnnnnnnnnnnnnnnnnnnnnnnnnnnnnnnnnnnnnnnnnnnnnnnnnnnnnnnnnnnnnnnnnnnnnnnnnnnnnnnnnnnnnnnnnnnnnnnnnnnnnnnnnnnnnnnnnnnnnnnnnnnnnnnnnnnnnnnnnnnnnnnnnnnnnnnnnnnnnnnnnnnnnnnnnnnnnnnnnnnnnnnnnnnnnnnnnnnnnnnnnnnnnnnnnnnnnnnnnnnnnnnnnnnnnnnnnnnnnnnnnnnnnnnnnnnnnnnnnnnnnnnnnnnnnnnnnnnnnnnnnnnnnnnnnnnnnnnnnnnnnnnnnnnnnnnnnnnnnnnnnnnnnnnnnnnnnnnnnnnnnnnnnnnnnnnnnnnnnnnnnnnnnnnnnnnnnnnnnnnnnnnnnnnnnnnnnnnnnnnnnnnnnnnnnnnnnnnnnnnnnnnnnnnnnnnnnnnnnnnnnnnnnnnnnnnnnnnnnnnnnnnnnnnnnnnnnnnnnnnnnnnnnnnnnnnnnnnnnnnnnnnnnnnnnnnnnnnnnnnnnnnnnnnnnnnnnnnnnnnnnnnnnnnnnnnnnnnnnnnnnnnnnnnnnnnnnnnnnnnnnnnnnnnnnnnnnnnnnnnnnnnnnnnnnnnnnnnnnnnnnnnnnnnnnnnnnnnnnnnnnnnnnnnnnnnnnnnnnnnnnnnnnnnnnnnnnnnnnnnnnnnnnnnnnnnnnnnnnnnnnnnnnnnnnnnnnnnnnnnnnnnnnnnnnnnnnnnnnnnnnnnnnnnnnnnnnnnnnnnnnnnnnnnnnnnnnnnnnnnnnnnnnnnnnnnnnnnnnnnnnnnnnnnnnnnnnnnnnnnnnnnnnnnnnnnnnnnnnnnnnnnnnnnnnnnnnnnnnnnnnnnnnnnnnnnnnnnnnnnnnnnnnnnnnnnnnnnnnnnnnnnnnnnnnnnnnnnnnnnnnnnnnnnnnnnnnnnnnnnnnnnnnnnnnnnnnnnnnnnnnnnnnnnnnnnnnnnnnnnnnnnnnnnnnnnnnnnnnnnnnnnnnnnnnnnnnnnnnnnnnnnnnnnnnnnnnnnnnnnnnnnnnnnnnnnnnnnnnnnnnnnnnnnnnnnnnnnnnnnnnnnnnnnnnnnnnnnnnnnnnnnnnnnnnnnnnnnnnnnnnnnnnnnnnnnnnnnnnnnnnnnnnnnnnnnnnnnnnnnnnnnnnnnnnnnnnnnnnnnnnnnnnnnnnnnnnnnnnnnnnnnnnnnnnnnnnnnnnnnnnnnnnnnnnnnnnnnnnnnnnnnnnnnnnnnnnnnnnnnnnnnnnnnnnnnnnnnnnnnnnnnnnnnnnnnnnnnnnnnnnnnnnnnnnnnnnnnnnnnnnnnnnnnnnnnnnnnnnnnnnnnnnnnnnnnnnnnnnnnnnnnnnnnnnnnnnnnnnnnnnnnnnnnnnnnnnnnnnnnnnnnnnnnnnnnnnnnnnnnnnnnnnnnnnnnnnnnnnnnnnnnnnnnnnnnnnnnnnnnnnnnnnnnnnnnnnnnnnnnnnnnnnnnnnnnnnnnnnnnnnnnnnnnnnnnnnnnnnnnnnnnnnnnnnnnnnnnnnnnnnnnnnnnnnnnnnnnnnnnnnnnnnnnnnnnnnnnnnnnnnnnnnnnnnnnnnnnnnnnnnnnnnnnnnnnnnnnnnnnnnnnnnnnnnnnnnnnnnnnnnnnnnnnnnnnnnnnnnnnnnnnnnnnnnnnnnnnnnnnnnnnnnnnnnnnnnnnnnnnnnnnnnnnnnnnnnnnnnnnnnnnnnnnnnnnnnnnnnnnnnnnnnnnnnnnnnnnnnnnnnnnnnnnnnnnnnnnnnnnnnnnnnnnnnnnnnnnnnnnnnnnnnnnnnnnnnnnnnnnnnnnnnnnnnnnnnnnnnnnnnnnnnnnnnnnnnnnnnnnnnnnnnnnnnnnnnnnnnnnnnnnnnnnnnnnnnnnnnnnnnnnnnnnnnnnnnnnnnnnnnnnnnnnnnnnnnnnnnnnnnnnnnnnnnnnnnnnnnnnnnnnnnnnnnnnnnnnnnnnnnnnnnnnnnnnnnnnnnnnnnnnnnnnnnnnnnnnnnnnnnnnnnnnnnnnnnnnnnnnnnnnnnnnnnnnnnnnnnnnnnnnnnnnnnnnnnnnnnnnnnnnnnnnnnnnnnnnnnnnnnnnnnnnnnnnnnnnnnnnnnnnnnnnnnnnnnnnnnnnnnnnnnnnnnnnnnnnnnnnnnnnnnnnnnnnnnnnnnnnnnnnnnnnnnnnnnnnnnnnnnnnnnnnnnnnnnnnnnnnnnnnnnnnnnnnnnnnnnnnnnnnnnnnnnnnnnnnnnnnnnnnnnnnnnnnnnnnnnnnnnnnnnnnnnnnnnnnnnnnnnnnnnnnnnnnnnnnnnnnnnnnnnnnnnnnnnnnnnnnnnnnnnnnnnnnnnnnnnnnnnnnnnnnnnnnnnnnnnnnnnnnnnnnnnnnnnnnnnnnnnnnnnnnnnnnnnnnnnnnnnnnnnnnnnnnnnnnnnnnnnnnnnnnnnnnnnnnnnnnnnnnnnnnnnnnnnnnnnnnnnnnnnnnnnnnnnnnnnnnnnnnnnnnnnnnnnnnnnnnnnnnnnnnnnnnnnnnnnnnnnnnnnnnnnnnnnnnnnnnnnnnnnnnnnnnnnnnnnnnnnnnnnnnnnnnnnnnnnnnnnnnnnnnnnnnnnnnnnnnnnnnnnnnnnnnnnnnnnnnnnnnnnnnnnnnnnnnnnnnnnnnnnnnnnnnnnnnnnnnnnnnnnnnnnnnnnnnnnnnnnnnnnnnnnnnnnnnnnnnnnnnnnnnnnnnnnnnnnnnnnnnnnnnnnnnnnnnnnnnnnnnnnnnnnnnnnnnnnnnnnnnnnnnnnnnnnnnnnnnnnnnnnnnnnnnnnnnnnnnnnnnnnnnnnnnnnnnnnnnnnnnnnnnnnnnnnnnnnnnnnnnnnnnnnnnnnnnnnnnnnnnnnnnnnnnnnnnnnnnnnnnnnnnnnnnnnnnnnnnnnnnnnnnnnnnnnnnnnnnnnnnnnnnnnnnnnnnnnnnnnnnnnnnnnnnnnnnnnnnnnnnnnnnnnnnnnnnnnnnnnnnnnnnnnnnnnnnnnnnnnnnnnnnnnnnnnnnnnnnnnnnnnnnnnnnnnnnnnnnnnnnnnnnnnnnnnnnnnnnnnnnnnnnnnnnnnnnnnnnnnnnnnnnnnnnnnnnnnnnnnnnnnnnnnnnnnnnnnnnnnnnnnnnnnnnnnnnnnnnnnnnnnnnnnnnnnnnnnnnnnnnnnnnnnnnnnnnnnnnnnnnnnnnnnnnnnnnnnnnnnnnnnnnnnnnnnnnnnnnnnnnnnnnnnnnnnnnnnnnnnnnnnnnnnnnnnnnnnnnnnnnnnnnnnnnnnnnnnnnnnnnnnnnnnnnnnnnnnnnnnnnnnnnnnnnnnnnnnnnnnnnnnnnnnnnnnnnnnnnnnnnnnnnnnnnnnnnnnnnnnnnnnnnnnnnnnnnnnnnnnnnnnnnnnnnnnnnnnnnnnnnnnnnnnnnnnnnnnnnnnnnnnnnnnnnnnnnnnnnnnnnnnnnnnnnnnnnnnnnnnnnnnnnnnnnnnnnnnnnnnnnnnnnnnnnnnnnnnnnnnnnnnnnnnnnnnnnnnnnnnnnnnnnnnnnnnnnnnnnnnnnnnnnnnnnnnnnnnnnnnnnnnnnnnnnnnnnnnnnnnnnnnnnnnnnnnnnnnnnnnnnnnnnnnnnnnnnnnnnnnnnnnnnnnnnnnnnnnnnnnnnnnnnnnnnnnnnnnnnnnnnnnnnnnnnnnnnnnnnnnnnnnnnnnnnnnnnnnnnnnnnnnnnnnnnnnnnnnnnnnnnnnnnnnnnnnnnnnnnnnnnnnnnnnnnnnnnnnnnnnnnnnnnnnnnnnnnnnnnnnnnnnnnnnnnnnnnnnnnnnnnnnnnnnnnnnnnnnnnnnnnnnnnnnnnnnnnnnnnnnnnnnnnnnnnnnnnnnnnnnnnnnnnnnnnnnnnnnnnnnnnnnnnnnnnnnnnnnnnnnnnnnnnnnnnnnnnnnnnnnnnnnnnnnnnnnnnnnnnnnnnnnnnnnnnnnnnnnnnnnnnnnnnnnnnnnnnnnnnnnnnnnnnnnnnnnnnnnnnnnnnnnnnnnnnnnnnnnnnnnnnnnnnnnnnnnnnnnnnnnnnnnnnnnnnnnnnnnnnnnnnnnnnnnnnnnnnnnnnnnnnnnnnnnnnnnnnnnnnnnnnnnnnnnnnnnnnnnnnnnnnnnnnnnnnnnnnnnnnnnnnnnnnnnnnnnnnnnnnnnnnnnnnnnnnnnnnnnnnnnnnnnnnnnnnnnnnnnnnnnnnnnnnnnnnnnnnnnnnnnnnnnnnnnnnnnnnnnnnnnnnnnnnnnnnnnnnnnnnnnnnnnnnnnnnnnnnnnnnnnnnnnnnnnnnnnnnnnnnnnnnnnnnnnnnnnnnnnnnnnnnnnnnnnnnnnnnnnnnnnnnnnnnnnnnnnnnnnnnnnnnnnnnnnnnnnnnnnnnnnnnnnnnnnnnnnnnnnnnnnnnnnnnnnnnnnnnnnnnnnnnnnnnnnnnnnnnnnnnnnnnnnnnnnnnnnnnnnnnnnnnnnnnnnnnnnnnnnnnnnnnnnnnnnnnnnnnnnnnnnnnnnnnnnnnnnnnnnnnnnnnnnnnnnnnnnnnnnnnnnnnnnnnnnnnnnnnnnnnnnnnnnnnnnnnnnnnnnnnnnnnnnnnnnnnnnnnnnnnnnnnnnnnnnnnnnnnnnnnnnnnnnnnnnnnnnnnnnnnnnnnnnnnnnnnnnnnnnnnnnnnnnnnnnnnnnnnnnnnnnnnnnnnnnnnnnnnnnnnnnnnnnnnnnnnnnnnnnnnnnnnnnnnnnnnnnnnnnnnnnnnnnnnnnnnnnnnnnnnnnnnnnnnnnnnnnnnnnnnnnnnnnnnnnnnnnnnnnnnnnnnnnnnnnnnnnnnnnnnnnnnnnnnnnnnnnnnnnnnnnnnnnnnnnnnnnnnnnnnnnnnnnnnnnnnnnnnnnnnnnnnnnnnnnnnnnnnnnnnnnnnnnnnnnnnnnnnnnnnnnnnnnnnnnnnnnnnnnnnnnnnnnnnnnnnnnnnnnnnnnnnnnnnnnnnnnnnnnnnnnnnnnnnnnnnnnnnnnnnnnnnnnnnnnnnnnnnnnnnnnnnnnnnnnnnnnnnnnnnnnnnnnnnnnnnnnnnnnnnnnnnnnnnnnnnnnnnnnnnnnnnnnnnnnnnnnnnnnnnnnnnnnnnnnnnnnnnnnnnnnnnnnnnnnnnnnnnnnnnnnnnnnnnnnnnnnnnnnnnnnnnnnnnnnnnnnnnnnnnnnnnnnnnnnnnnnnnnnnnnnnnnnnnnnnnnnnnnnnnnnnnnnnnnnnnnnnnnnnnnnnnnnnnnnnnnnnnnnnnnnnnnnnnnnnnnnnnnnnnnnnnnnnnnnnnnnnnnnnnnnnnnnnnnnnnnnnnnnnnnnnnnnnnnnnnnnnnnnnnnnnnnnnnnnnnnnnnnnnnnnnnnnnnnnnnnnnnnnnnnnnnnnnnnnnnnnnnnnnnnnnnnnnnnnnnnnnnnnnnnnnnnnnnnnnnnnnnnnnnnnnnnnnnnnnnnnnnnnnnnnnnnnnnnnnnnnnnnnnnnnnnnnnnnnnnnnnnnnnnnnnnnnnnnnnnnnnnnnnnnnnnnnnnnnnnnnnnnnnnnnnnnnnnnnnnnnnnnnnnnnnnnnnnnnnnnnnnnnnnnnnnnnnnnnnnnnnnnnnnnnnnnnnnnnnnnnnnnnnnnnnnnnnnnnnnnnnnnnnnnnnnnnnnnnnnnnnnnnnnnnnnnnnnnnnnnnnnnnnnnnnnnnnnnnnnnnnnnnnnnnnnnnnnnnnnnnnnnnnnnnnnnnnnnnnnnnnnnnnnnnnnnnnnnnnnnnnnnnnnnnnnnnnnnnnnnnnnnnnnnnnnnnnnnnnnnnnnnnnnnnnnnnnnnnnnnnnnnnnnnnnnnnnnnnnnnnnnnnnnnnnnnnnnnnnnnnnnnnnnnnnnnnnnnnnnnnnnnnnnnnnnnnnnnnnnnnnnnnnnnnnnnnnnnnnnnnnnnnnnnnnnnnnnnnnnnnnnnnnnnnnnnnnnnnnnnnnnnnnnnnnnnnnnnnnnnnnnnnnnnnnnnnnnnnnnnnnnnnnnnnnnnnnnnnnnnnnnnnnnnnnnnnnnnnnnnnnnnnnnnnnnnnnnnnnnnnnnnnnnnnnnnnnnnnnnnnnnnnnnnnnnnnnnnnnnnnnnnnnnnnnnnnnnnnnnnnnnnnnnnnnnnnnnnnnnnnnnnnnnnnnnnnnnnnnnnnnnnnnnnnnnnnnnnnnnnnnnnnnnnnnnnnnnnnnnnnnnnnnnnnnnnnnnnnnnnnnnnnnnnnnnnnnnnnnnnnnnnnnnnnnnnnnnnnnnnnnnnnnnnnnnnnnnnnnnnnnnnnnnnnnnnnnnnnnnnnnnnnnnnnnnnnnnnnnnnnnnnnnnnnnnnnnnnnnnnnnnnnnnnnnnnnnnnnnnnnnnnnnnnnnnnnnnnnnnnnnnnnnnnnnnnnnnnnnnnnnnnnnnnnnnnnnnnnnnnnnnnnnnnnnnnnnnnnnnnnnnnnnnnnnnnnnnnnnnnnnnnnnnnnnnnnnnnnnnnnnnnnnnnnnnnnnnnnnnnnnnnnnnnnnnnnnnnnnnnnnnnnnnnnnnnnnnnnnnnnnnnnnnnnnnnnnnnnnnnnnnnnnnnnnnnnnnnnnnnnnnnnnnnnnnnnnnnnnnnnnnnnnnnnnnnnnnnnnnnnnnnnnnnnnnnnnnnnnnnnnnnnnnnnnnnnnnnnnnnnnnnnnnnnnnnnnnnnnnnnnnnnnnnnnnnnnnnnnnnnnnnnnnnnnnnnnnnnnnatacaacgtggtattagctactaaatctttatactgacttgattttttatagggtaagtccccaatttgagctcgtctttaaagaatattctcgaccttttgcttttttctttttcccattttaaaaattgtggtaaaatacacataatggctgggtgcggtggctcatgcctgtaatcccagcactttgggaggccgaggctggcagatcatttgaggtcaggagttcaagaccagactggacaacatggtgaaaccccatctctattaaaaatacaaaaattagccaggcgtggtggcagatgcctgtagtcccagctactcgggaggctgaggtaggagaatcgcttgaacgtgggaggccgaggttgcagtgagccaaggtcacaccactgcactccagcctgggtgacagtgaaacaccatctgaaaaaaaaaaaatacacataacataaactttaccatcttaatcattttttaagtgtttagttgagtggtatcaaataccttcattatgttgtgcaaccataatcaccatccatctccacaactcttttcatcttgtaaaatagaaactatgacccattgccgggcacggtggctcacgtctgtaatcccagcactttggaaggccgaggcgggtagatcacctggggtcaggagttcgagaccagcctggccaacatgggaaaccccatctctactaaaactacaaaaattagctgggcgtggtgatgggcacctgtattcctagctactcgggaggctgaggtaggagaattgcgtgaacccaggaggcaggggctgcagtgagcctagattgtgccactgcactccagcttgggcgacagggcgagactctcaaaaaaaaaaaaaagaaagaaactatgacccattaaacaataactccccattcagccagcccctggcaaacaccatcctactttctgtctctatggttttgactattttaagtaccccatgtaagcagaatcatctagtatttgactttctgtgactggcttatttcacttagcatagtttccttaaggttcatccacattgtagcatacgagagaatttctttcatttttaaggctacataatatcccattgtatgtatgtaacagtcattcttatccattcatctgtagatgaacacttgggttgcttgcacattttagttatcgaaaatgatgctactatcctggatggccctctgttttttcaaaaagcttcagaattttctcctcacattccaaaattttttagattgtgattggaaatgtattgaatctacagggaaatatgagaactaacaatattataatattgagtcttataattcaagaaaattacgtctgtatatttactttttgtgctctctattccttcctgtatctcaaaacagttcactaattttctcttcagctatgtctaatctacaacacaaactatccattaaatttttattttttattttttttagagacaggggtctcgctctgctgcccaggttggagggcagtggcacaatcccagctcactgcaacatcgaactcctgcactcaaggaatccttccgtctcagcctcccaagtagtgggaatataggtgcacatcaccatgcctggcaaatttttatttttttagaaatggggtctcactatgctgccaagggtggtctccaactgctggcctcaagcaatcctcctacctcagcttcccaaagtatggggattacaggaatgagccaccatgcctggctgtaaattttaaagtttgattattgtacttttcattaatacaagtttttaakaagtactgccttcatctacacaaggtgggaggagaccacatacatttctaactaargagactgaaggtaggtttttcagctcctgcctaagagtcaaatttccctagtcttaaagctctttataactttgtgatttcataaggatattataaaaaatgaaaaagacctgaaatagtaaaagtctactttggtaaataaccctggggttttaaatgttctttcttgttcargtaaaataatgctattcctgtacaaataggtgtttttactaattgagacttcttagcaaaatgtaacatacagatatggtttggctgtgtccccattcaaatgtcagcttgaattgtatctcctagaattcccacatgttgtggaagggacccagggggaggtaactgaatcatgggggctggtcttcccgtgctattcccatgttagtaaataagtctcacaagatctggcgggcttatcaggggtttccgcttttgtttcttcctcattctctcttgccaccgccatgtaagaagtgcctttygccctgcaccacaattgtgagaccttcccccgccacatggaactgtaaatccaattaaacctctttcttttgtaaacggcctggtttcaggtatgtctttatcagcagtgggaaaacggactaatacagtaaattggtaccagtaaagttggatgttgctgaaaagatacccgaaaatgtggaagtgaccttggaactgggtaacagacagaggttggaacagtttggagggctcagaagaagataggaaaatgtaggtaagtttggaacctcgtagagatttgttgaatggcttcgacaaaaatgctgatagtgatatgaacaataaagtccaggctgaggtagtctcagatggagatgaagaacctcttggaagcaaaggtgaactggagcaaaggtgactcttgttatattttagcaaagagactggcagcattttgcccctgccctagagatctgtagaactctgaacttgagagagatgatttagggtatctggcaggagaaatttctaagcagaaaagcattcaagaggtgacttgggtgctgttaaaagcattccgttttaaaagagaaacagcataaaagtttggaaaatttgcagcctgatgattcagtagaaaagaaaaacccattttttgaggagaacctcaagctggctgcagaaatttgcacaagtagcaaggagcctaacgtaatccccaatgtaatccccaagaccatggggaaaatgtaaccagaccatgtcagaggccttcatggcagtccctcccatcacaggcgcggaggcccagggtccctgtgctgtgtgcaacctagggatttggtgccctgtgtcccagctgctccagccttggctgagaggggccaatgtacagctcaggctgtggcttcagagggtgcaagccccaagccttggcagcttccacgtggtggtgagcctgtgggtgcagagaagtcaagaattgaggtttggaaacctccgcccagatttcagaagatgtatggaaatgcctggatgcccaggcaaaagtttgctgcagggatggggccctcatggagaacctctgctagggcagtgaggaagggaaacatggggttggagcccccacacagaatccctactggggcactgcctagtggagctgtgagaagaggccgccatcctccagaccccaaagtggtagatccactgacagcttgcaccatgcacctggaaaagctgcagacactcaatgccagccggtgaaagcagccgggagggaggctgctccctgcaaagtcacaggagtggagctgcctaagaccatgggaacccaccttttgcatcagcgtgacctggatgtgagacctggagtcaaaggagatcattttggagctttaaagtttgaccgccccactggatttcagacttgcatgggcactgtaacccctttattttggccaatttctcccatttggaacggctgtatttacccaatgccagtactccccttgtatctaggaagtaactagtgtgctttgattttacaggctcaaaggcagaagggacttgccttgtctcagatgagactttggactgtggactttggggttaatgctgaaataagactttgggggactgttgagaaggcatgattggttttgaaatgtgagggtatgagatttggaggggccacggctagaatgatatggtttggctgtgtccccattcaaatttcaactttaattgtatctcccaggattcccacgtgttgtggcagggacctagggggaggtaaatgaatcagtgcggccggtctttcccatgctattctcaggatagtgaataagtctcacgagatctgatgggtttatcaggagtttctgcttttgcttcttcctcattctctcttgccgccaccacgtaagaagtgcctttcgccctccaccatgatcgtgagaccttcccagccacatggaactgtaagtccaattaaacctctttmttttgtaaactgcccagtctcaggtatgtctttatgagcagcatgaaaatggactaatacacatacccactagacaaataatgggaccttccattacccacccttcagcttaactattcaatacctggatcagagaaggcagcaccggtgaygtagtgactccaattgctgcattgatagtttccacaactgccagcatctggcagaaatacatcatgtcagccacagtatggaatgtgtcataaaaggactctataggcaaaaatatacattaagggtgaatcagttggtaaattccaacagaactatttctcaaactagattactcctttcgtgaaaataactstaagaaaggaataacaaacatccagtcagattcaagtttcttacttaactaagcaggaagggtgcaggccaatggggtcatgaatagtaagctctaccagttaccagaaagttaacacgtacaccttatatgcctttctcttttttttttttgagatggagtcttactctgtcaccaggctgcagtgcagtggcacgatcttggctcactgcaacccccgcctcctgggttcaagtgattctcctgcctcagcctcccgagtagctgggactacaggcacgcaccaccatgcccagctaatttttgtaattttagtagagatgggggtttcaccatgttgaccaggatggtctcgatctcttgacctcgtgatctgcccacctagacctcccaaagtactgggattacaggcgtgagccaccacgcacagccacctttctaaatttttttaagagtcaaggtcttgctccatcacccagtctagagtacagtgtcatgatcacggcttactgcagcttcaacctcctgggcgcaagagatccttccacttcagcctgttaaagtgctgggattacaggtatgagctactacacctggtccatactttcattatcaggtagaaaaatcctctcccattaatctttcttctcctaaattttattacctatttattcatcaaataaagtttcagaatactttagatcaaattctcaaaaatttcccattggcatttaccaatggaatgccactggtcaaagccagaatcctgctaaacacataaattaatttaagaagaactaatatctttatgatgctctttttattctgttttagaatagttcattttagaacgtatttaggctccaaaagggtgagaacccttttggccttgcataactttggcactggaagtatcacatcaatttatttagttgttagtgaacatttttacaaaaggattctagcccaagatgtggctctggctagctatggatgtgaaccatttttgaccatctctaggcctatattttattacctgttatatggaaagaataccagtcagcttatttcacaaggccatgggaaataagagctatgaaagcacaacgaaaagtagagggtgctgcacaaatgcaggggttattattaacatcaaaggcagagagtgctccctttggtgaatactgggccaaactactgagaaagggaaaattaatccaaaaatgtcttacttgccttttcccaagatacagaatcgcacagtcaggttgacaaagatccaggagaatcccaagaattgcacaagattatacataaacaggtatcctttccttaagtttgtaagagctgtaaagcaaagcaaagcagtaagctattaaaagcaatagtcccagcaggagacaggtgtatgaggcatatctggatgacttcaacsctttttccttcctgaatgctcctaagctcccacacaaatacctggtccaggtcctcaccagcctgggctcctactcccacagagaaacatacaaggaacattgctctccagcatgtattttcagcaggacttcctttcccagccttgaagaataggtatacagacataacaaacccaagaaaaaaatattacccctggtgtgatattatgatatgtgtatatgtatatataggttttcggcaacggtttctggcttataactcccacagcccttgttacagttttttgttataatgttgggacactttaggcctcagacaacagaatctccctctatgaccttccctgccttcctttcagctgcccaaggcacgactctaatctgattgtgggtcctaagaccctcattccagagagggtcttgcctcatactctggaggagggaacactgcacagasaggctgagaagaatctggacagacaggccttgctgggtttaggtcagaccctttttgtccaatcacatttcaacacagttcaacacgcttcagtcatgcctatccgatgaagtctccataaaaggcccaaggggacagggtttagtcagcttccagacagctgaacacacggaggttcctggagggtggcacacctggggagggcatggaagctccgcgccacttcctccatacttcctcctaatctcttcatctgtatccttcataatatcccttataataaatgaacaaatgtgtttccctgagttctgtggagccacgctagcaaatcaatcaaaccacaggagcgggttgtgggaaccgtaatttacagcctattggtcacaagttctggaggttcagactcgggacaggctgggggcaggggtgtgtcttggggactgagccctccatctgtgggaacctgatgctatctctaggtaaacagtgtcagaattgaaccagagggcacccagctggtgtctgctgcagaactcattgcttgcttggtatgtgggggaaaaaacccacccacttggtcacagaagtcttctgtgttgattgttgttgagtaagaaaataggaaaaagcagttgagtgttgtagtgttgtattttttccataacacctggcaaaaaaatgagtggccatctgaagaggcattacaaaaaggaaataaagatttcctcagctccggctcaattttttttttcttttttttttgagacagagtcttgctctgtcacccaggctggagtgcagtggcacaatctcggctcactgcacgctccacctcccaggttcaagcaattctcctgcctcagcctcccgagtagctgagattacaggcttccgccaccacgcccggctaatttttgtattttagcagagacagggtttcatcatgttggccagggtggtcttaaactcctaacctcaggtgatctgcccaccttggcctcccaaagtgctgggattacaggcatgagccaccgtgcctggccctccagtcatcttaatataatccatagtttcttcttttctggaatttctttaaggtcactgaggtcaaactagctcaaagagacagatacagtaaatgaaaaaaacaaccctgatatttggttatatattcactcaaccaagcattaactgaatacctacaatgtgcaaggtactgtgagaagaactactgggatacaaaggtagttcaaggctgccctcagagcttacaatctaaaaactgtaataccaggtggggagtaacaagtaatgtcttgtgaaactttcaaggtgaaaaaacgacattaggctggagaagtaggcatcaagctagtctacatggataaagctggtatctaatccgggctttttttttttttttttgagatagggtctcactctgttcccaggttagaatgcagtggtgggaccatagctctctgcagccctgacctcctggagtcaacccatcctcccacctcaccgcccaagtagttagttctacaggtctgtgccaccacaccttgctaattttatattccattatgttttgtagaaacacagtcttgctacgttgcccagtctgatctcgaactcctggcctaaaagatcctcccgcctcagtctcccaaagtgctgggattagaggcatgagccatcatacttggcctgatctgggctttgaaagatgggcagactgaggacataaccaaagcaggacaatttcaaaccaacatgcaggaaaataagggacattaattttatctgcagcctaagattcatgaagatacagccaattacagagtaaaggaagaaacaagaggctttgacagagtcattgttgagtcaaaggagtagggtaaagaaaaggacagttcttaagaggagatctatggtgttcagattttgctgctacatatttattcctaggctacagatattctgcaaagacatctggttggtcctcaaataatcacatttaataatgtggtcaatcaaaagcagcctaagccaggcacagtggcatatgcctgtaatcccagctacttgggaggctgaggtagaaggatcacttgagcccagtatcttaagatcagcctggacagcatagcaagaccccatctcaaaaaaaaaaaaacaacacagccttatcctaagactccaaaaaatgtcagacttctagcaacatttagctaattaaaagttatttcttcaaaactacaaaaatctattacacttccccaccataaagaacttccttgttcagaaaactttatgaatttaggtaaaacagttaaagctttacctaacacccaaaaaatccatatattagaatttttatctatttttgaagtttatccctttaagacaccaaaacattaatttaaatctcaaagtggcttttttatgttgttattctttgcctccactgaacctctcccctcctcggctttcctgaaagaatattcccctaaggtagtcgctattcaaatattttttaaaattccttctcaaaagaaaccttattcggaatgccaacacataacactcaaaagagagctgctctgactgaggtagacctgtttgtgtgatctactcctccaaagcatctctgggaaccccctggggcaccatggaacacagtttgaaaactactgctccaaaactttcccctcccttatttatggcatgctagataagtaccactaaaatttgaaaaatttcaacttagaacaagtaagaaggacttatttcattctgcttttcagaggtagttttacatacacctgcagttccctcactaagaatgtaagcccttttgagtataggcgctacgatggatccctctggctcttagtcaagggcccagcacaatgcttgccacacagcatgactttaacagatagctgctgaatttaatctaactacatcacccagaagataatacacttacagagcttcctgcttaaagtggttagacggaaacagaaattgatttgttaaaggttaatgaatagcaggactacacagaatactctccatctttcaggctgacaaccacacttatgtatcatacagcctttgagatttcagctgggagaaaaacaccaggctgaaggagtgtagccttggatccatgcaatcatttccacaagtctctgcaggatttggttgccatctgccatgaggccagtccaggagttctttcattctgctacactagccttggtgtactcatgaaataacaaccaaaacacaaaggacacattaaaggtaaggattctgacgtgggtagtgcagaccttaagcactggacctaaaagctttttcataaactcacccacacagctcaccgggatgaaatcattagctctcctgccacatcacaattatccatacttccaacactagcacaagttaactggtaactaccatggcagcagcacaacttactttcaggagagccttcgctttccagtcggagtttatttaggcgctcttcttcctagaatttagacaaaagttttccaagaacacaagttagaattcccagatgcttgcaaaagtccatatgctggctgagtaatctgactccctcaaagccaactcctccagttggggtcagtgcatcattgggagaatattctaggtcatagggccaaacgcctgactcctgcttactaagcagcattagcatcacaggtgcccatccattgttcacaaaattaacccagtgagctggcttccaaactgacaagtgaccttggaatcttaaagctggaaaggacatccagaagatctgtcgcagtcagagaaataaaacagaagtttaaggcaggaggtagactgctattttatttttcaagacttctagaattttagtataatttttccagaagctaagatcatgtttccaacatcactatgaactcacgtttagcttaacagagatacagatggatccatacagaaatatttacaggtgtatgtgtatgcatgggttactatccaaacatatattttcttgttctgtcagtgaagagaacttaaaggcaatggcaacctggtagcaatgagcatacccggcacccagatcttggtttccaatgctattccacaataagaacagagatgcttgaagaaatggctgttccagggctggagcaggaaacatacatgcaagataagcctggagcagcttatactgccagaaagtaaggaagtgctcaaaaaaaaaaaaaaaacagtcccataatgatggcgctttctcaaaaagatacaaaagccaaatgaaagatgggcaggatgaggacataaccaaaggccagttagtgccaaagctggaagaatttgagcaacaaaataaataatattagattataactcaaagtataaaataaatacccatgtactcacatgatataaatgattgaataaataaatgggagacaatagacatgcataattattctcctatgcagaagaattccaaataaattatgtagatactccctccatctaaaggacaggaagcataactccctgctccttaaatgtaggctacacatagtgacttccttccaaggagagccaagaggaaaataaccttatggtagagaaacctgataagcgtcacctcaagccagctaacccatggttaatatcaacagtgatgtgtcacgttgacagtatgtactttttttttttttttttgagactctcgctctgttgcccaggctggagtgcagtggcgtgatctcggctcacggcaagccccgcctcccgagttcacgccattctcctgcctcagcctcctgagcagctccgactacaggcatgcaccaccaygcccggctaattttttgtatttttagtagagacagggtttcactgtgctagccaggatggtctcaatctcctgacctcgtgatccacgcaccttggcctcccaaagtgctgggattacaggtgtgagccaccgtgcccggccgtatgtactcttgatatgatgtgataagaattgcactttacttcagtggtcttctcctcaacatctatcaccttagtctagttgtaagagaaacatcagacagatttcaaccgaaggaaagtctataaaatacatagccaatacttcttgaaaatcacatcaccaggtctttaaatgaatttgtaactttgtagctattctttcagaccgagaggtatctgaagtggcctgaataacgtgggttccccatgatttgtcctcaatggctagatcctaggatccttactaaccttagctctgagctccatttccgcatcagattcatccagccaacgatcaaagtcaggagccaaaaacagtggtcgcttttcctgctttgtgagtctctcccaccactgactcactttcttctgtactgtaatgtttacctgcctctgggtcagtttgtaaacaggctaggagagaaagtgaaaatgtgagaatgccctcttctgttccctgaagcagcaccatgccaggggcgccgtacatagaagctgcaggatatatttattctccttctttctctggtcctgcaagtcctgatgcaaagggaacatctagaccaggggtctccaactcctgggccatggactgatactggtccatggcctgttgggaatcgggccacacaggaggagctgagtggtgggcaagtgagtgaaacttcacctatatttagactcgctctccagactcgctctccatcacttgcattactgcctaagccctgcctcctgtcagatcagcattggcacaagattcacataggagcgtgaactctattgtgaattgtgcatgcaaggaatctaggttgctcactctttatgagactataatgcctgatgatctgtcactgtctcccatcacccccagatgggactgtctagttgcaagaaaacaagctcagggctctcactgattctacattatggtgagttgtattcattatatattacaatgtaataataacagaaataaagtgcacaacaaatgtaatgcatttgaatcaccctgaaaccatccccattccaccatctgtggaaaaagtgccttccacaaaattggtccctggtgccaaaaaggttgatctagaccaacggctggcatggagaactggtaaggacataatgtccttctctgattcccccagtgaatgatacaggaggatatcaggataagaaaggcaaatagttcctggttaggctggagggaactagcatgaacctcctgccacagccacatcatgcaaggtactatgtccaatcaccctctcaagggtactgcatccaattaccctcagcttataaattttcctcccatgaaaatgactgtcctggctcagcagaccccggttttagaaacacctgcatcaagatcagaactgtattggawcagttacagattttttcacaggggtcaatttggggagtcttcccaactaaactcaaattcttataggccattccagctcattgtttgtctacatgtcctgtcccttttctccaaaggaagctccatgacaggttctctgcccactgtaccactggttattattcatgctttctcaaaacaactgagcayctgcgcacggaaatcaagaagctcaagccaccagagctaagtgtaattccagaagccaaaataccccatctattggattctctccctgcttatgagagaagcttcctcaggctctaagggaagggaagttttgatgatatctgcagcattctttctgaaggccagctgccttcaccctttctgatttctatttttctcacctgcaactgtggcaaagtcacatgaaagtaacccctggtgggggcttcaaccactctatgtaactctgttctcaatgggtgccatattcctctgccatcactaaaaccagagaatatcagagctggaaggatcacttagtccagaccttcatttaacacatgagaacaccagaactcgaagaagtkaagagacttgttcaagatcacacygctaataaayggcagggccctgactcaacttggggtctctgactttcccattcctctgcagctaaaacctgggctctgttccaaataaaagaactctattattcccctttggtttttatcttcttctctccacaaaccctgctccccatttcactaaactactggtattcatttcctaaaatgggaagggaagtgagaaaggaaagaacatacctctggtttcacaaggtctaagaactccaggtgaaattyatagacattgtctcctttggcaccatgtccttgagctataaagaaagaaatgtgggttactgcaaacttgagcagagcaaggccatccaaaagccagcttggtgcagttctttcccaagtatgcgaatattacacttttttttttttgagacagagtcttgctctgttgcccaggctggagtgcagtggcatgatctcggctcactgcaagctccgcctcccgggttcatgccattctcctgcctcagcctcccgagtagctgggactacaggctcccgccaccatgcccagataattttttttatttttagtagagacggggtttcaccgtgttaaccaggatggtctcgatctcctgaccttgtgatccacccgcctcagcctcccaaagtgctgggattacagacatgagccactgtacctggcacgaatatcatacttgattgtagccaaaaggccaagaagcatcgtagtccacaaatcttaatgggtcctgttaaaatgtgtgggggcttgtgcgcagagctcctcaacagctagataggccaaatctttgacacaagtttatctccatatgtcctctgatgtcagttttggcgtatttacccaatcttccactgtgaccctgatgataccccacacaaataacaggcaggaaaaagaatagagaaagcaatgccaaaggagccacacggatataaatttaactttcacaattactttggctctaaatctagagcagacaaaaattggkgggtgtatcatcttgactgcagggtacatggaaatgctgggttgtcttggacagctctgaatctaaaacctcccaaccagggagagagaatgaaggcagaagctgactcctcctttagcacatcccaaatggaacaaggaaaaagaaatacaatctttcgcagcttatgaaggacaggtggaactaggagggaagtacctgagttggccaatgccccatccctatgccttgacatggctcctttccccaattctagctggcaccatgcctagatgccagtgactgctggacccagcagctgctgctgaaccacccttccactctcctctctgattcatttaccatttggttcccttctgggactctctttccttatctgatcatatgtagactaataacctgcctaatattcgctacaggtagcaattattctctgtgacgataaattccttamggtaggacagtatataaggtctaagtggcaagatatgcttttatcactttaattttcatgtaaatgtatataattcccaaaaaacctgagctgagtggtgactactctcatcttgaaaagcagatacaaaagccaggctgtactttcatgcaagtatattacagtagatggaatttcacataaagcagaaactctttatgctccaataatcccaggaactggaacagagagcagagagaatcctaccccactgggtgacagtgaatggaaatcccaccctctccagtagagcagtaaatctgctgagggactgaggagaaggcagatagaggcagattcacagaatcagagactgtcagagctgaaaaggcctgagacatcatctagagtgtagtgtttctcaaactggtctgctaatctagtatcagggagccacaaagtctcatcaagaaaatttcttaggaatagtgagaagggatgtaataaataattattatttttttaaatgtttaaaaagaaaaatatgtgctcacttcggcagcacatatactaaaattggaatgatacagagaagattagtatggcccstgtgcaaggatgacacgcaaattcgtgaagcgttccatatttttattaagaaaatgtggcacatatacaccatggaatactatgcagccataaaaaatgatgagttcatgtcctttgtagggacatggatgaaattggaaatcatcattctcagtaaactatcgcaagaacaaaaaaccaaacaccgcatattctcactcataggtgggaattgaacaatgagatcacatggacacaggaaggggaatatcacactctggggactgttgtggggtggggggagtggggagggatagcatcgggagatatacctaatgctagatgacgagttagtgggtgcagcgcaccagcatggcacatgtatacatatgtaactaacctgcacaacgggcacatgtaccctaaaacttaaagtataataaaaaaataataaatttaaaaaaaaaagaaaaatatttaaaaaaaacaaaaacaaaaacaaaaaacaaaaaacaggcacggtggctcacgcctataatcccagcacttcgagaggccgaggtgggcagatcacttgaggtcaggagttcaagaccagcctggacaacatagtgaaaccctgtctctactaaaaatacaaaaattagctggacgtggtggcggatgcctgtaatcccagctactcgggagactgaggcacgagaatcacttgaacccaggaggcggaggttgcagtgagccgaaatcatgccactgcattccagcctgggtgacagagcaagactcaatctcaaaataaataaataaataaattttctattttatgtttccataataatttttttttaaaaaaagcagcatattctggatcatctagatggccacttcataatcaagtactgccatgcaatcagtagctgtatgtgtgtctgtattcacagctgcagtggagccaaatatcacttaaagtgaccatatttaattcttcacgtttctcaatctcgggtccatgagcccttgagagtcctgtggaaacattatttggtgtccacgggtcctcgagtttgagaaacacagattaaaacccagcatcttcattgtacaggtccagagaagtcaataacttgtccaagatagcggcagaattagagctagaagacacgtctcctgatttctaacccaggattctttttttttttttccttcactgtatctactgcctctccatgggggaaacaggattttaaaccaattctttgacttttctaatcatatatttcaaaacaatttagcttacctcatgaggatcagaggcgtgaacatcagcaaaaaacaagtaagacaaatacatttttttaaaaaagggaaaccaccaccacacctccttaactgtgtatagagatgggagcatttgctgggatactgacctttgaaatgcagcacgttttcagtgatgctgatggcagggttctgtgaaaagagaccaaggatgcaagaaggcattttaatgaagagaaaaaatgagattaaacaaggggcttcttcccctcatccctctcccataaggactcaaactcctactctgtgcctcccccagaaatatatttagtcatttattcacatctctgtaggctttctctatgtctgtctgtacctatctaagactgcagactcctgcaagaaggaccctaacctgctctaactgtgcaaacaatcaagtactgaattagtccattctgaaaatggccagtcatgcaaggtgctatgtgagatatgacacgggaatacagagatctccaggactcaacccctgagctgtagaacagaggatccagtgggacagatgaggcactttctgtgagaagatatcaaatagttattaagaaacatatggtcaagacgaaaagggtggtaaaaggcagtaagtgttagcagagttaggagagagagagagcacaacaggaatagagtggtggggaaaagcttcaccaaaggtgagacctgtactgcaacctgaatgataaattaattccaacaggtagagggaagggcagaggattgcaggtggtgaatgaaaatgaaacacgctgtgcctgtgtctctaacttagaggctccagactctcttaacccccaaaggaaacaagactcrggagaggtcaaaattctccagactgctcattgattcccagaagttgctacataccttcaatttagcatcataatgtaaagtgaaactacttaacactttttccagtggatgagaaacaacccaactcctacttccagctcaaggttaacaagcaagaggcagctccttcccagtgtcayggtgtttgtttttcttctgtgggcttagctttctgtgttccccaactacagctgtcatctgaccacaacctcatgagattccaagccagaacaacccaacagagcccctcctgaagtcctaacccacagaaactgtgagagacaataaacgactattgttgctttaagccactacatattgggtgatttgttatgtagcaacagattaacaaataattattaactgcaattatttatttaaatgcttggtagaacttccaggtgaagccatttagacctgcaagtttccctgtgggaagatttttgactactgaatccatgtatttaatggttattgggctatccaggttttctatctcttttatagaaactgtctttatttcttggaatttatccattttatctgatatgaacttgtttaatattttctttcttttttttgaaaaattcacccaggctggagtgcaatggctcagtctcggctcactgtaacctctgcctcccaggttcaggcgattctcctgcctcagcctcctgagtagctggtattacaggcgactgccatcatgcccggctaatttttgtatttttgcagagacgaggtttcaccatgttggccaggctagtcttgaactcctgacctcaggtgatctgcctgcctcggcctcccaaagtgctgggattacaggcatgagctactgtgtccagcctagatgcatataacttaatattgttgtatcttcctggtaaactgaaaccttatcattatgaactgccctttctatctctaaaaatacacttgtgcctaaaagtctattttgtgtgatatcagcatagctactacagaggatcgatctgcatttgcttctgccagggacctaggggtcctaccagttgaggccactttaaactaaatgcatggcttgagggttctcaagtttagagttttggttctcctaaattgtgtgaatttgggctacataacctttgagagccaacttacagttttaacttctcaaggaccttttcttctattaatacttagctaagtgttaaggcaactggagacaggcagatggaatgggcttatttctagttcatcctaaccctaagtgtatagtcctctctgaaatacggtttatggagaagatttcctattacatgttacacctttggtgggtcttgggctttgatctttttttttttttttttttttgagatggaatctcgctttgtcacccaggctggagtacagtggcgccatctcaattcactgcaacctccacctcccaggctcaagcgattcttctgcttcagcctcccgagcagctgggattacaggtgtgcgccaccacacccagctaatttttttttttttttttttttttttcccagcagagatgggattacaccatattggtcaggctggtctcaaactcctgacattgtgatccgcccacctcggcctcccaaagtgctgggactacagctgtgagccaccgcaccaggctgggtttgaccttacttctattgcctgcgccctgttgggctgtcaaaaccaaagttcaagttcacttagttgagcaaatgttcgcaaggcaaaagcagtttccacgttcagcttatctgagttcccaatttcatttctaccktgttaacttttcgatgtttttaagacatttttattcaacacttttagttgtttttattagaaagctcaatctacacaacctagcccatctcttacaagaaaagaaactgtgcctttgcttatgaaaggaggagtgaacagccaggcccggtgccatgcacctatagtcccagctaccggggaggctgaagtgggaggatcacttgaacccaggggttcaaatgcagctaggggaacatacatagcaagtagtcagaccctgtctctaattcttttaaaaaataaaaagagaaagagagtggctgggcaaggtagctcatgcctataatcccaacacttcgggaggcctacgcaggaagatcacttgagcccaggagttcaagaccagcctgaacaacayagaccgtctctacaaaaataaaaaaattagccaagtgtggtggcacatgcctgcggtcccagctacttgggaggctaagctgggaggacaacttgagcccaggaggtcgaagctgcagtgagcttttattgcaccactgcattccagcctggatgacagactaagaccctgtctcaaaaaaaggagtgaagagggaaaagggaatacgaaaattttcaaatcatcttaatcatctttttttttttttttttttgagacagaatctccctctgtcacccagggctggagtgaagtggtgcaatctcggctcactgcagcctccatctcccaggctcaaggatcctcccaccttagcctctcaagtatctgggactacaggtccacatcaccatgcctggctaatatcttttttaaattttttgcagagacaagtctcactatgttgcccaggctggtccygaactcctgggctcaagtaatcctccacctcagcctaccaaactgctgggattacaggcatgagccaccatgcccagccataattttaaaaataacaataaaatcacttacatcacaggtctgctgtaaggattaagttataatagcacacacagaccctggcaactagtaagaattcacattccagttgctttttttcctctgactaaagtgcccatctaagtttccatgcctgttgaacactacttctctttcaaagttcaggtcaaatgttaattcctgttctctcctcctcaccctaacatcagaatcaacagtttccttcctactttgtattcacctttactataatacttatcacactgttccacaatcattgttgatcatttaactgcccctcttgacctgacttctttgatggcagggactgtgtcttattcatttccatatacctaatgcctcaataactgttaagtgaactgaaatcaattcatcccattttcagaatctctggcagaactacaaagagttcacaataaactacctgctatctaaccctttakacaagagtttcctttctcattcaaatcattagtatttatcttcaaatttatgtgattagtatgtgtgcagaagagttaatatagcaagcctgaggctgcagtctttaaaagggcctgcttccaagatcagcctttggctggcatctatctagaaactcggctttcctccatcacctaactaataagggtggtccaatgttcctaaactgtgcctacaaacaatgtgatttatggtgaatatcaactttccttctaggagcctgaaattttggtacatgttaggcagaggttacctaagtaacaagccccaataaaaatcatgggtacttggccgggcgcggtggctcatgcctgtaatcccagcactttgggaggccaaggtgggtggatcatgaggtcaggagttcgagaccagcctgaccaatatggtgaaaccctgtctctactaaaaatacaaaaattagccaggcatgatggcgtgcgcctgtaatcccagctactcaagaggctgaggcaggagaattgcttgaacccaggaggcggaggttgcagtgagccgagatcaggccactgcactccagcctcggtgacagagtgagactccgtctcaaaaaaaaaaaaaatcctgggaactcaatcactaacgggcttccctgggcagaaaagttatacataagtcattgcatttttcgtcgctggtggagtgtgctcaaatataccccctcacaggaggaagaatgataaagaggcttatacgtggatttctccagactccacttgtgctttttttcctttactgatcctgtcctgtattctccagctgtaacaaaccttagtcatgagtacaattatatactaagtcccatgaatccttcgagcaaatcactgagcacactggtggctgccggggaaccccaaaactctgtgtatttttaatgtgatccttttcaccccaatgttttattttgaaaacatttaaatctacaaaaaaattgaaaaactaggccaggcatggtggctcacacctgcaatcccagcactttggaaggccaaagcaggcagatcacttgatgccagtagtttgggaccagcctggactccagcctgggtgacagagcaagaccctgtctcaagtaaaaaaagaaaaaatagtataatataatgaaaactcatataccttctaccaattgattgctaaatgtcatatttggtttttttagggtgggggtagcctccattctacaaaatataatgaaagctcccaatatttgccttttatatgcatagttttttgctgaattatttcaaaatgagctgcagacatcatacttaacctccacatatttcctctcctaagaaattatattatcttgtataattaccaaagctttctaatacctaagaacaataattccatattatctaataaaaaatctacatgaacaattgtctcaaagatgttcaattgtttttgttatttactgtaatgcacgcaaccactctaaaacttaaaacaactattttattatcctacatgattctacaggttgactggggctcagctatatagttctattccatgtgatgttggctggggctatagtatattgggctggaacattcaagacgggtcgctcacttagctcataattgttgctggttgtcatttggtagttcagctaagaccagaataactatatttggccactccatgtggcttgggtctcccgcaacaggactgctcagttccgagagggaatgtctcaagagcaagtggtctaagagagaagaagcggaagctggcagttctcttacaaagagtaagcctggaactggtcacagcatcattctccagcattctattcactaagctgccagagggcctgcccagattcagggaaagaagaaataaattgcgaattttgatggcactcttgatgcagttatcctgaagccactacatttacactttaaaaaaaatccagaatcggccgcaggtggctcacgcctgtaatcccagcactttgggaggccgaggcgggcggatcacaaggtcaggagatagaggccatcctggctaacacggtgaaaccctgtctctactaaaaatacaaaaaaaaaaaaaaattagccgggcctggtggcaggcgcctgtagtcccagctactcaggaggctgaggcaggagaatggcgtgaacccgggaggcggagcttccaatgagctgagacactccagcctgggcgacagagcgagactccgtctcaaaaaaaaaaaaaaaaatccaggatccaatccaggttcatgcattcctcttgattgccatgcctatttttatttaatacagacttacacttttatttattagcccatgccaattgtcttgtaaaatgtatcatattctggatttgtctggccattccttcatattaaccatttttaacaaaaatatttcataggtgatatggttacttatggcatccttatgttaagagggtgacaataaatttgatcattaaattgagaaggtgactgccagaactttccactgtagtgtttccttttgtaattagcaagttacctaataatgtaatctgccattccctcacaacactctttcatccaatggtacagtcaaccattgttaatccttacctgatgcaattttacactggaggtcacaaaattataattttctttctttctttttttttttttttagacagaatttcccttgttgcccaggctggagtgcaatggtgccatctcggctcaccgcaacctccgcctcccgggttcaagcaattctcctgcctcagcctcccgagcagctgggattacagacacgtgcaaccacgcccggctaattttgtatttttagtagagacagggtttctccatgttagtcaggttggtctcaaactcccgacctctggtgatctgctggcctcggactcccaaagtgctgggattacaggcgtgagccaccgcacccggcaacattataattttctaattcaatcattcctttttcattttctagttggcattcttctgtaaaaaggagttttccctttttctcctctccctttttttaattgaaatttttattgagatatggattcacatgaagctctaagaaataaatatacacacctactgtgtacccacaaaaataaaaatttttaaaaaagaaatagtactgagagatcccttgtacacttttcctagtttcccccaatggtagcattttacaaaactatagtataaaatcaaaatcaggatactgccattgacacaacccacctatgttattcagatttcccagttttacttgcattcgcttgcaggtatgtgcatgtgcgtctgtgtgttaagttctatccaatttgatcacctgtataggttcatctaccaactgtcacagtaaagagactgaacagctctagatccctcatgatgccttcgcaaacaccaccagcctgtaccctctctggtctatatttcttttttactttcactatgggctcacggattttctttttatttttttcttttttttgagatggagtcccgctctgtcacccaggctggagtgcagtggcgtaatctcggctcactgcaagctccgcctcccgggttcacgccattctcctgcctcggcctcccgagtagctgggactacaggcgcccaccaccaggcccgggtaatttttttgtatttttagtagagacgaggtttcaccatgttagccaggatggtcttgatctcctgaccttgtgatctgcccacctcggcctcccaaagtgctgagattacaggtgtgatccaccacgccccgccgactcacagattttcttttgtgatccactcagccaaattccattaccattattactcttgttgatgttcaaattgtcacaaacttggccagtagaaatcccttcaaatcaagtcctgtatgattctgacatgaccgtgtagcttttgaagatactgttctttttctggcacagatttggaataattggccattttttcaaggaggcatagtttctttggttggaaatggtaatgtagaagccatgatctaagtacactgaggtatagtcaatgttcatctttcagtgggctagctaggaatttaaaaaacgatgtcatagtgaagtttccaattcaagctcttacaaggcttctccctaccttgttatttaagatttatatcttttacagtgaaaagcttcctaataacattagtacatttatatatttgctttatcccaaaaaagtttcagaattagaatatcaatattttttaccaacaataaacctactaattacttgcagaagtttccctgtggaaaataagaaaaaagaaaatttgtattcaatttaaaaaaaaagaaaagggagaaataacccttgtaagtgtaacatttaattgcagttctttttgtccttagaatatattccactaaaaggggggaaggttgatttttaaaaaggacatgatctactaaagtaccagagtactgtgttcaaatattatgtgtattgattaatttatctgtaagattttgtcatcaatttgatatacagttaggtccttttggttctgtttatttaatttgcttttttcttttctttcttttttttttttttttagagagacagagtcccactttgtcgccaggctggagtgcagtggcacgatctcggtttactgcaacctctgcctcctgggttcaagcgattctcctgcctcagcctcctgagtagctgggattacaggcacatgccatcgcacccagctaatttctgtatttttagtagagacagggtttccccatgttggccaggatggtctcgatctcttgacctcgtcatctgcccgcctcagcctcccaaagtgctgagattacaggcatgagccaccaagcccggcctgttttttttaagacaattttatctttgaatatgtaaaacattcccattgttcaaaattcaaactttataaaatgatttcctcagaagtcttgctcccaaacccatcctcctttaccacattcctattccccacataccggtaaacatttcattcatttctggtttatctattctctgtatatgcgtgttttgcaaaaatttgcaaatatatttagatattcttattttcatccaggcacagtgactgatgcctgtaatcccagcactttgggagaccaaggtgggtagatcgcttgagctcaggagttcaaaaccagcctgggcaacatggtgaaaccctgtctctacaaaaaatacaaaaattagcctggcgtgatggcatgtgcctgtagtcctagctacttgggagactgaggtaggaggttcacttgggcctgagaggtggagactgcagtgagccaggatcacaccactgcactccagcctgggtgacagagtgagaccctgtctcaaacaaacatacaaaacagatattcttttcttttttttttttttttttttgagatggagtctcactctgtcgccaggctggagtgcagtggcatgatctcagctcactgcaacctctgcctcccaggttcaagcgattctcctgcctcagcctcccaagtagctgggactacaggaacataccaccacgcccagctaatttttgtatttttagtagagacaccgtttcaccatgttggccaggatggtctcgatctattgacctcgtggtctgcccacctcggcctcccaaagtgctgggattacaggcgtgagccaccgcacccggccaaaacagatattcttattttcccttctttctatacaaaaattagcatacaatatacattcttatacatcttgctttttttttcacctaaataaatccttatcagctcacaaagaccttactctttcttgttatagctgtataatactcaattgggtgtatgtaaaagtttgtatcatcttctaattcccccttttggggacacagacaatttcaaagaataccaaccaacttgaggttactatgagaccatggtaaaattaaacaaaacaagaccattgcataaatttgtctaatgacaggtcactatgccaaccacaaaataccaaatcatagaactgtccctgctttctgtcaacatccaatctatagcggaccccacttccttagacacccccgccatcacataatcaaagcccaaatcctatataacaaggtcttttttaacaccatcttactgagataccacatgtttccctacgatgtgtgttttccctcactggaacaagcaataaacccaacttatttaactacaaggtgtgttttggtgatctttggctgaacagcattaacagtttaaataaactctcagagagctctttcaataaattaaaaatactcaaagtaataagaaagcttgtatcacagtataatcagcagcatttttcccctcatcatgagggaaaaaaataaaatagtggtgcattttacaatcaattaagtctaagatactataaaattctattttcacccagactactgccctgaactctgtatttgtatagttatatcactagttcacattttcacatggaaattgtttataacaagactctcaaac

SEQ ID NO: 97773 - DNA, 251170 bp, Homo sapiens
agctaaaacaaatagcaataaggaacctgaagaaaacagaactaatgcaacaaaagaaaacttcaaaattacacttaagagaaaaaagtctgtctataaaaaaaaaaacaaaccaacaacagtatgctaaaagacaacatcagtaagaaaacaaaagaaaaacctcggaaattaaaaatgtgacacctggctgggcgcggtggttcacgcctgtaatcccagcactttgggaggtggaggtggaggtgggtggatcacttgaggtcaggaatttgagaccagcctggccaacattgcaaaaccctgtcactattaaaaatacaaaaatgagccaggcatgatggcccgcacctgtagtcccagctactcaggaggctgaggcagtaaaatcacttgaacccaggaggtggagattgcagtgagccaagattggaccattgcactctatctagcctgggcaacagagcaagactccatccccccccaaaaaaaaaaaaaaaaaaaaaaggacttagaatttaaaagagaaagttgagaaaacctcctgcaaaggaaaataaaacaaaactaaatgataaaaataagaaacagataagataaaggaataaaggatgaacccaggcagactaatcaactgatagaaactcctaaaagagacaaaaaaatttttcaaagaaatatttaataatgtaagagtatttcaaaaagctcccaaggatagaggcctctagcttgaaagggcccacataatgcctagcataataagtaaagaataatcattcctgtaattgcagcactttgggaggcgaaggtgggaggacagcttgagcccaggattaggtgcctacagtgagctatgactgtgtgactgcactcctttttcacctgggtgatagagaaagaccctgtctttatcaaaaaagaaaaacaaatctataccaaggcacatcatcatgaaatcagaacaaaatagaaaaagaagagactccaatagcttccaaaattaaaacaatttacatttaaaagattaggagaaagaagagggttgaattttaaaactgcaacccatgaagctagaacacaataagctaaccaaacttttaagagtgggtagatgccgggcgcggtggctcatgcctacaatcctagcactttgggaggccaaggcaggtggattgcctgagctcaggagttttgacaccagcccgggcaacacggtgaaaccctgtctctactaaaatactacaaaattcgctgggcgtggcgttgtgcacctgtagtcccagctactcaggaggctgaggcaggagaattgctagaaccagggaggtggaggttccagtgagctgagcttgtgccactgcactccagcctgggaaacagagtgagactctgtctctaaaaaaaaaaaaaaaaaaaagtgggtagaaaaactttttggatgtgacaggacttatcaggcatcctttctcaggaatttctggaaagacacacccccgtgaagtaaatgaggaaatttctttttttacatggggaaattccccacatagtaagtctacaaaaggcctggagaatgaatccagactggataggaatgtagaggatccaatgggaaaaacaaaaatgcaggataggtatatggcagatatgatggaatatctgcaaagaaattaagggtatgtacatagaaaactatgcaatctattttttaaaaagcaatcatttattccagtagggcaagctgcacaaaaaatgaaatactgtcccagcactttgggaggccgaggcaggtggatcacctgaggtcgggagctcgagaccagcctggccaacatggtgaaatcccatctctactaaaaatacaaaaaattagctaggcatggtggcaggcacctgtaatcccagctacttgggagactgaggtgggagaatagcttgaacccgggaggcaaaggttgcagtgagctgagatgatgccaaggcactccagcctgggcaacagagtgagactctgtctcaagaaaaaaaaaaaaagaaaaagaaaagaaatactgtacattacttggttctgaagtacatagacaccacatggttaaaaggtaaacaatgattactaatttaacaaaaaattatgatttaattacactgggacaatgtagataaattatgttagttaaaaaacaagaattgaatatttaaaaatgataattcaagaaaattagtgtaaaattttattttaaaatatggtaataaacactagaagaatcagctacaggttttaaaagtggttgcatctgagagagaaacaggggtgtgggggagaataagggtgaagaatagttatttttactttgaaaaatattttaaattataacacaaacaagagtttctaaattttgaaagtgcattgcattaataaaaaaattaattgggatatttgttttaacttatcagaacacatgccatttacatcttttaaatttccttaatttctaataaaaaaaaaatcacctctatgcagttagttcacttctcatatacactcaacttcagtttcttccccactccaagcatgctgacattcactacccaaaaacacttctcaagggaaataagttcctgtttatccatttataactttcccctcaaagttctagttcaaggccatttttctttttaacatgagtttgagtttactcaaaatactgtagagtctgagaactaatcagcccacacagggactttttaaatacagcttcctaagtagtctttaatcttctacaaaccaattcattctgcatatagtttacaagtaaatcaatttaaaatactgttttcatcatctctcctttgcacaaggacctgatgattcccctcttctaatgggacagcattcaaactcttttttgtatctgaaggctcccagtctgcccttcttatctcatgttcttagtccttaactccccgaagtgtaccttccacttttgtcaggcagatctttctacctcctcttcataacatgctgttcttacttttatctcttataaatgctctgtccccaaaattgaacttccaagttgaacgtcttcacctaactttttatttatactaaggtcaagctcaagttccatgactctggaagctgcccctttggcctgcactgacccatctcttcttgcttgaattcagacagccacgaatgcttgcttcaaatgaatgtagtttcaaaactgtgttgggtcactatcatggaggtagaggtgtgggagtggtcattgtttcatgcaatgccaaccacagaaaagaaaaataactattacttgaacattttaaaaattcagataattaaacttgaattccttccaagtcaaccttaaaaactcaccatcagtcaattaaacaaaaaaattagaacactgactttttccccactgcaaaataggcccctcttccacaaaacacaacacatggctaatacaatgagactactgtgagtgactgctgcctcaagatgaggcacagaacgagacacattcaagaagggatacgagggatacgagattgcaaggaaataaagggtgtttatatagaaacaaacctggatccactcaaatttatttctttaaagtcatttttaaactttggtattttcactatttttccaaaaaatcacttgctactcatacctcacaaacagtggttttgcatcccaacactaaggctgactttaaagacaaccaatcagctactgcatatccattattatattaatgactaaagttttatcaaaataatcatatttgtacttacttgaaagatacctttactttgggtttaaaatagggtgcattctggtctgccaaaaagacgattaagtcatttcctaaagaaaacaaatatatgatattagaaaaatgtttgttgataagatatctaatcagtggttacaagaaggtttctgggcactgttctcaacaagaaaacttttattctactccagttcatctgccctctcaagcatagtcccactagtccaatggagatgcctaacattatatcacaagttcaatgttcaaagtagcagagaaatagaaaggatgaacatgggaaaaagcagctgatcaagagaaactgaagccagtggattctgcgaggagtcagattggttgacttaaaagaaccatataaagatgccttataactatactacatgtcaagacttgtcttccccgaatctagcaatgctgtcccttgtaaggctgtttggttcattacacagatgcatcacaccaaggatgcagggactcccattgtagatatctgacaaagacataattaagcatgtgagcacaaaatgctgaatcctccaagaccctcctcctatggggccatcctccagagggtgacacattcttggagctcaattagcactcattgagacagacttttggaattgtttaatcaaacacaggccatctttaaagtcaaggctactctctgtatccagtttggacacagcagcaacaggtttggcagtacactgcaaaatgaggagtcaaaaagattgggaaaatattcagggtttgtaagaggttcctgcatccccgcaagggctccaagaagtctggttcaggatcctgtcaggcaagctctgagtagctcttccttccttccttcacagcattgatctttaagcagcacctgcttctgtaggtactcaagaaccctaagaccccctaatgcccactgtcagcatcaagatttacaaaaaagttagtttaacgattgtcaaagcaaagaatttccaagaacaagttagcaaagaaagtagacatttggaacactaaggtgatgaccaagatgaggaaggagtacacgaaagaacaggcagctcaagagagaaatttctgtagtttgagactgctttcccaaggaggcattgggtttatcagtggtccctgcaaaatgcttgtgtgagctgtttagtgtttaggcccttggaagggtacattcgcttcatagaaagttgtggccttgacaaagaaaggggtgggcgaattaggtaggtggggaggcaagaagaagccccctatgagaagagattgtcaggttgcaccttttcatgttcatcaacggggaaggaagactgaagcaaaatagaaaggaatgagtgggccttgggagcgaacgttgaggcaagctacaaagattcctaggaatcaggaagcactttggaaaacaggtgattccatggggaggagggggtaaggtgactgggtgagggccgcagacttcttaggaacaaaactgaggtgctgtcagggcttttgagggtaggtcaaactgtagggtagctgggtcagaacctggggttggaaagggtggtgcaaaaggacaagctgttaagaatgctaaagggaaggccacagggctgggagagaaggaccaggaaatgcagaaggaccggccattgggcaatgggtttggggaacaccgggagaggcacacggacagcgaacagagggagggcccggcaagcactgactttcccgcagcacgaagagatccgtctgcttgtcggagttgaggtccccgaaagccgcaagggtgccccaggcctcggccccaaagagctcggccgtgacgttgtgcagcgcccgcgctgggaccggcccgactcccagtagtgcaagccctgcgaggagcggcgagaagagggcccaggagctcgggagccggcccgccgccgccatggcagcccctcagcccccgcccgccggcccaacgccgcgcttgacgacagccgcaaagcaccgcgttaccggccgagagagtggcgcgcagccccgggacgcgtaagagccgctgccggctcctttttctctctcccactagggctgcccttccgacgctaaaaaagcagtggagctagggtgaaagccgccctcacgctcacttccggcaggcgcgcctcccgacagtgtcgtgcggggggcgtggcccggcattgctgacaggcggccccgggggcggtggccaaggcggcgaccggagcgcgatggcgggggcggcgggactcacggcagaagtgagctggaaggtcttggagcgaagagctcggaccaagcgctcaggtttggctggctggggcgcckccccccacccgagtaccttgggtggtgcttcgcctcaagcgccttggcgggaggcaggtgggggccctgggaatgaacctgtgccccgagttcctccttagaaagcaggtggcggccctggccttgtttctaatatcttcctccacctctaaaaattaggtggcagagccagctccactctgcgtgtgcccccgactctattccgcttgtgagccccactcggaaagtaggcagcggtccggacttcccttagagtcttctaacttaaaaatcgggcggcggcacattcctgggaaagggaatgtgtcttccctgtgaatgtgtctttcctgtgaatgttctctgcaaaagtcagatagcttaatcagaccaagtcagatgtaactacgatctggctgcagaaagccggcgtctgggctccttgctttatgtctyatatcccttttacattccccacaggttctaagcagtagacctgtcatctatctagcagaaactgaaggagactgggcctcagatattgaagagtatagttagggcccagaaagaaaagggcttcttaagtggccccaggttgtgtggtttccaaacccgaaagcatagaggtcagaaggtgccttgcaggcagttttaacagttccaagtgtcccgaactgacttgttcaaattgcaacgtcatgacttgtggcgttattaaaacttcctgtattcctggttggctggatataatcttgaacaaaaggcatgcacttaaacaggaaaggtgaaaggcggaatgcaggttttcagctaaggagcttcccttttaaagaattgatgaagtgtcattattgggggtgggtgtgaaaggtgttagctaggaaaattaactttgcacttgcattgatattaagaaattattttcggacgggcgcggtggctcacgcctgtaatcccagcactttgggaggccgaggcgggcggatcacctgaggtcaggagttcgagaccagcctggccaacctggtaaaaccccatctctactaaaaatacaaaaattacctgggcgtggtggcgggcgcctgtaaccccagctactcgggagtctgaggcagaagaattgcttgaacctgggaggcggaggctgcagtgagtggaggtcgcaccactgcactccagcgtgggcgacagagtgagactccgtctcaaaaaaaaaaaaaattattttctcacctaatatgttctccttacgttttgggcttttcctatttatgaagttcttagttgtctgttgtgcacactgacttttttttttttttttttggagaaagtaaatctaatttctgaaaatctaatttcagaaatcatacaccgaacactctgtttttttataccttacaaaaagttcagctttatatacttagggttatagtaaaattaccatctatgaagtatgagataattttttcaaaaagtagtccttagtactactaagaatcaataaagtgacttggaatagtcacatgtatttgtttcacactttttcttaaattgtttttgtgtgatatagaaatactgagttggctactaacgatgtggctatctggatataaaaagtgttattggattggttatgtctgaacaaagagaataactggagttttcttacagggacctgagtactgcccccaacatatatttttgcaacatttctctttaactttcataagctcatagagttgattttcttcgtcagtctttgtttcctctgaaatgcatgtcataacagtaagctttgaaaaccttaattctcttttcttagctgagaaaaaaaattctagtgttaactgttgttgagtgcagttatttaaatccacttttatgtgcaaagtgcatagtatcaatgttgaatgttcctgtatgtttacatcatagtagtaaagagataccacttgaagttattcctccaaattaatagttaaatttgaggtttcagattcttgtaagtatatgaagtacagaggataaagttaataactcgagttaataacttcctgtatcattaaaagcaatcaacttgattctgtttgttacttttagaagaatatataaatggagctttgttaaacacttgactaacctgactccagtatagagtcctccccacagagttctgagcattgttacatagtagcataattacttcactgcacaacagaggatactacttttatgtaatgtctaataagtggatattatatagtttctrtctcatccatatgagcaagtgtaatttatcaaagcaaagaaaatcacattttcaagtcataaaagagaaaataaaattataatgatcctcagttactgcctttgttgcatactgcatcatgttaataactgctcacactgctttcaattaatttaacactgattgcttctaacctttactaaacagttttaaaattgctatagcttagcctgcgacgcttatgattagagccaacaatttgaaatggcctgctcacctgatgcagtcgtctctccgtcttccgctttcttaaggtctggtaagtgttgtagaccccaaaagggtcacttggtaattttaaatacctttgtttctgaaggttgatttcactataagatatcattatgtctttatttcttctttggtgggcccaggcctgagtacccggctggtgttttgtttaactttgcattgtgttttgaatgtggcctattgtgttcttctcatgtgggatgtgaaaagaacagagagtggagtgcctgccccgatatttgcaagcagaggcagttccttagtgtctgggagctcccattgtcaaatgtgcacatagcatatttcttaaatgatttttgtcttcttgccacaatggaagtaacttctacaaattaggaaattttggtcaacatcccacttatctgttcttcatcagcttactgtgaagcaggttattaatatacacgttttcacagacaggaagcgacttgccccagggaatattttgaggccatgtgctttggcctttatcctgtggcatcctggtgtaagggctggaacagatgttggcacaatggctcttagaccgttgtgttgatgcacccctttgagagctggatgaaagctatggaattgctcttcagacgtgtgcacaggattttggaaacaatttctgggtgattcatggacccagacatgattacctatgcattcccattagcaaccaggcctttggatgtattcagtgtcactttacagaacaagccacacatttagttaggtggccacatagctgaaatgaaaactgaagcatttacagcccttttctgtagttgtggcctaacttgggccatttaaaacctattatgtactagaaaactcggagaagcctgctggtaagagattaccttttctataatgcctcttaagcagaatatttcaagcctcaggactcatgaacaggcaaatgtgagatgagcacccccaaacacagtgaaaactccttggcttcaccatagcctttcagaagtgtttctccctcttcattcattttcgtttatatttcaagtcctgttctggcaagatagaggaggaaaatcttaaagaaaataaataagaaataacttaaggaagaatcaaacaggagaaaacaaaaactctttaaggaactaaaatgatttctatttctaggtgtcatctgctaaatgacaaaatattacatgtaacaatgccaattgatttctgattttatctttgaactaaaagaacaggaggacatatatctctagactctgttttctttccttataagcaccaagctctgttttccatcttggcttttctactaagaaggaaagtggttttaagcactagcacagtcattcagtagtaatggggaaatagaatgtttaaagatagcttttatgcatcaacagtcctgaaaatttctaaacccaagaactgtgctttaacattacatagagtgtttgaaggtatatacaagacgcttttcctgtactgtatcatcaaattgaaatagaatgcaccaagaaacagactagaaaaatatcaaactttagtgttataatccgttttgaagaatgattctttatacattactttcaatgttgacacttttttgggagttcatctaaccaaaacttagtaaaactataaagacacacttaaaatttgtatctgttaaaataataagtaccatacctgctggtgttaggcttaactttgcattgtgttttgaatgtggcctgtcgtgtttgcatttaagtactctgagtggtttgcatttataatttcttacttatttagaaatactccatttatattggaaatgatttgctttcccctattgtagttctttggacattatctttataggcatatgttttattgtgcgatttcatttgacaattattttaaagcacatccttgcttcacagctgagcttttcattggtactttggccagaaactatccagtattgccaaaagtgaaagccagtagtatcttgattttgaaaaatttattttcaatgtacctgcattgttttatgtattttaacccttcatattccttctggatatgtttctgctttttgttttttctttgtttctcctctttatggaatttagtgtgaatcctgtatttctgtgtgtgcatacttgagttgtgctgttactactaatgtactagtatttgctgtggttgaaagaaatttgttttgactgcttaaactaaaagagggatctagatattcaggtttttctttaaagacccttggagtcaaatgtacaaaaccaagaatttataaagaaattcaacagccaaaataaataattattagagaaggaatgtagcattcaataccttagattgcttccgtttctcatgtggccactacagttatattaagttagcatagttggtcagctgtagcaatcaccttggcaatacagttcagttacttggaataatggttatagcatattgtgatgaggtaggaaacggcttggcatttttgcttttattcttaaatgacaaagataatttaagaggttattcctttttataatggctcatgagcttatctaccttggctccctaagtttatcagccagctggtaagtgagcttcaacataggacttgagtcttttcatttacttgtttctctttatgttctttgattaactttcttttgttaatttaatttgatgggcaaatcagtacctgttaaaattttattgtatattctgggcaaaacaaaactttcaattgtatatgcctgatattgttttttttaaggaatttatatagcagtcttgttttcagttaactaatctaaccgtcaactaatcaaaaagattcttgtgattggaagagaacacaggcccgagtctcctgaactcttgtgggttgtggcctcctttaagagcctaatgaaagggtgtacatttggtgttcacgtacacctgggtctgattcaggctctgttgtttactacctatttgatcctgaggaagctatatctttttgagattcagcttcttgctttgtaaaaatgatgttaataaaacctaccaggagagattattgtgaagatcaaacaagatgttatatgcaaaacacctgatatttagtaactgcgcaataaattttagttatctttcctaaaaatatgtgtcttttacaatattgctgatgtgtattaaagactaatgacttatatacaacaaatatgatttcttatctctctcattttggtatctaccctcaaaatagccattttaagtaaatctgtcatgcttaaatacaactagcttgaatcagattactcagaatttaatattaatagagctgtactatttaatatggtccactccattttgtaaatttagcttttattttactctacgtccatcttatttttgtcagtaatcactgtaactctaaagaaattgtttctgatagtttccatggaaactcctattagattgcaggtagagcagttgttattttacgtatacttaaaagatatttttgtctcagatatgcactgtgctcgcttcatgtagcatggaattctcagaagcactccttaattgtatcctacttggacctctgacctcttactaggacctgccctgtaatcttataagatttaggaaatagaggccatatcatatgacttaacccccttggcatgaagcttattgaccctcaggctgtgtcattatgctcagcaaaaatgatgcttcacatttcataagtgaagtggtttcatgaagagcacaacagcttgtctcactgctttagattatcaccagtactcacattgtgcattctaaaagcgattttccttgtgctgttttatcttcagtcttttgtgaaatgagagagtaagaggaactccctagaatttctgattctgatccaggtatctatgcacatttccaaatgggtatatggtgggcatttcaaatgtaaccggaacaaaacagaactcttattttctactcttattcttatcccaatcatgttcttccttaaatatacttcatttcattaaactaaaccattattcttccagctactcaagctaaaaaggttattcctctctttccttcaacctttttattcagttaatctgtaaatctttctactccacctctaaaacacataccaaatttgtttttcttcagctgtactcctacctccctagtccaagccacttttatctctggtccacactacagaaatagcctgaattcctgtttcctcattcttatctcactacagtctgttctctgtcaagcagtgagatgggtctttaagaaatgcaagtcagctcatgtcactttcctgcttaaggccctcctattgtatctgtcattacttagcataaaatctacaatcccaggctcacgcctataatcccagcactgtgggaggccaaggtgggtgggttacctgaggtcagaagttmgagatcagcctggccaacatggtgaaaccctgtctctactaataatacaaaaaattagccaggtatggtggcatgcgcctgtaatctcagctactcgggaagctgagacagaagaatcgcttgaacccaggaggtggaggttgcagtgagctgagatcgtgccattgcactccagcctgggcaacaagatcgaaactgtgtctcacaaaataaaataaataaataaataaaaataaattctacattcccttcctttgaatgacaaagtcccaggtgacatggcttttgcctgcccctctgacctcctcacagaattctcctcttcttctccactgctatctttgggtccataagatgcaatctaatttgcactttaggctctgtagtatagctttttaggctctctctaatagctattttatctgcctggaaagctctctatactgctgtttgggtagcttgttccttctggttgagttttaggttcttatcttaaatgtagcctctttagaaaggctttttctgcccacccaatctaagtagcccccagacacatcactcttaattttaattctctgtagtgtccttattattaggtaatttttcccccttcttagttttcctgttcatcttcatccactagaatataagctatataaaagcagagacttacttgttttgtgcatagctgtatccctaaagtccagaagagtgcctggaacataaaaaatgttcagtaaatcatataatatctatcacactggagactgtcctgcttcttttgagagacagtgtcataatatggttattatatagatgttagactcgtacaactaggttcaaatactagtattgaatcttacaaactgtgaactcaatagcaaagacatggaatcaacctaggtgcccaaaaacagtgggttggataaagaaaatgtggtacatatacaccagggaataattcacagctgtggaaagaatgaaatcatgtcctttgcagcaacatgaatacagctggaggccattatcctaagtgaattaacacaagaacagaaaaccaaatactactgcatgttctcctaagtgggagctaaacattgggtactcatggacataaacatggcaacagtagaaactggggattgctagaggggagagtgagggagaggggcagggcaggggttgaaaaactaactgttgggttctttattcactgcctgaatgatgggatcattcacaccccaaacctcagcatcacgtaatatacccaggtaacaaactygcacrtgtacccctaaacctaaaacaaaatttgaaattattagaaataaataaacmaaatgtttttccccctaaaaccaaacaaattgtgtctaatgttttgcacttaattttccatactatggagtggagataatagtatatccctcataagttcttttgtgaagatgaagtaatgtctggaagtacctagtggtggtagtagtagtactaatgataataatgatttttcatgctatgatgacagcagtgacaactttttaagcagctaatctttattgagtacttaatgtgttacaagtagtgctttacatttaaatctcacagaaatcctcttgcctagaccagtttggttggggagaccctaacccagcggcgctagaggaattaaagacacacacacagaaatacagaggtgtgaagtgggaaatcaggggtctcacagccttcagagctgagagcctctaacagagatttacccacgtatttattcacagcaagccagtcattagcattgtttctgtagatattaaattaactataagtatcctttatgggaaacaagggatgggccgaattaaaggaatgggttgggcaagttaactgcagcaggagcatgtctttaaggcacagatccctcatgctattgttgtatggcttaagaatgcctttaagcggttttaggccctgggcgggccwggtgttccttgccctcattccttaaacccacaactttccagagtgggcgttatggccatcatgaacgtatcgcagtgctgcagagattttgtttatggccagttttggggctggtttatggccagattttgggggcctgttcccaacatcctcttttgtaggtgttattactattcccttttgaaaaactcacagcacagggaagtaaagtaacttacttaaagtcacccaaactctggcagaccctattacccagccactgctgccttccttctcttcatctatagtgcctagtactccataaataaacaacagtggttactactgatgtcttcttgatgtttattgttcttctttcattcatttctaattaactgatgtttattggacctctctgatgtaggaagtttgtaataaataatagtggttgagagagctaatagcctgatggaatttatgcagaactcaaggcgaccagtgcttttgtatacattcactctgtctctctcctggattcctccagttgtttcctactgaactttgctactagagccataacctctccttgtacaatcaccctagtcaatgcacactattgttgcctgggtgatttttctaaaatgaactaacccttaagtggttrcttaacaccactcatcagctctctgtctcctgcagggttgaagtagggacttcaaggaaagcctctctggaagtgatatttaactcctagaaataggaatcagtggagaagttggggtaaggaggactctaggctgaggatcctggggctagatagagctgggtatttaaagcgtactgaaaaggccattatgggtaaagcattgtgaatgacaggaatgggtgagaggaaggcctgggatgggcagggtcttgggagccttgaagatgtttgaattttattataaatggaagggaaggtgaaaatttgaagcagtggagttgtaaggctggattagtattttatgatgattctctgtctgttatgtaaaaatagactggaaggtgacaaaaaggcggggagcaacctcatggccgaagctgtgtgtcatatagctctatgtttaacacctggcaccatgctgggtgcatagggccactcaatctatgtttgatagtgaatggctgtgaaggcacagatattgagtatatcatcattctggattcagaagatgtggccaccttgattatgcattagaatctacatatctctgactcagtaaactcacttttggaagaatattcctgtggcccatttcctgttaaacggagaataaactaactttagaaagtgagtttattgaatcagaggtataaatggtaggtaggttctaatgcataattaattaaggtgcatatatacaaatataaaatgtatatgtgtcacgaggtcaggagatcgagaccaccctggctaacgtggtgaaaccccctctctactaaaaatacaaagaaattagccgggtatggtggcgggcgcctgtagtcccagctactcgcaaggctgaggcaggagaatggcgtgaacccgggaggcgggtcttgcattgagctgagattgcaccactgcactccagcctgggtgacagagagagactccgtctcaaaaaataaaaagtatatgtgcgaaatacatgtgtgtgtatatatagtaaaatcttagatacagttagttttatatcatgatgctattctgttttcacattttaaaatggcatattgacccttctattctgaggaatagtctgcaaagctacacaaggtccttgattctttgcttgattcaggcagaaggatgcatttagacatttaatttacctctgaacagataatggacttttagaaaatatatgcaattaagacatatcttttatggttttgggacacatctattttcaaatccctgattagaaaacaactgcccattgcggtggctcatgcctgtaatcctagcacttcaaaaggccaaggcaggcgggctgcttgagcccaatttgagactagcctgtgcaacatgacgaaaccatctctacaaaaaatacaaaaattaggctgggtgcggtggctcacgcctgtaatcgcagcactttgggaggccgagacgggcggatcacgagatcaggagatcgagaccattctggctaacacagtgaaacctcgtctctactaaaaatacaaaaaagttagcgaggcgtggtggtgggcacctgtaatcccaactactcgggaggccgggcaggagaatggcgtgaacccaggaggcggagcttgcagtgagccgagatcgtgccactgcactccagcctgggcgacagggcgagactccatctcaaaaaaaaaacaaaaattagccaggtgttgtggtgcctgggatggctggttggaggttgtggcaggagggacagcttgagcccgaaaggttgaggctacagtgaggtcgcaccactgcactccagcctgggtgacagagtgagaccctgtctcaaaaataaataaaaagaaaacaagtaatagaaaattgtaactgcatatattacatatttagtcttgaagatgctttctgatggttcattgtagcttctaggatctgtgtttttttttttgtttgtttgtttgtttgtttttgtttttgagacagggtcttgctctctcacccaggctggagtggagtacagtggcactgtcacagttcactgcagcctcggtctcctgtgctcaagcattcccttctgctgggcctataggtgtgcactaccatgcctggctaattttttttttttttttttttttttttttttttttattgtagagacaagtcctcactattttgcccaggctggtctggaactcccagtctcaagcactcctcccaactctgcctcccaaagtgctgagattataggcgtgagccactgcacctggcctctgtgatgtattttgaatacattcatacttgttctcattttctttttcacattaggccttcgttgccttgattagaaatggtttttaaaagatgaaacaattgttgctgttttttattttattatttgttacctttttcttatagactttattagtttattttaccaacaatcacatgattattagtccattaaaaaagaattattctttatgtttaacttactggttttatagctttcttctctttcagttcatatttcacaaattttcttgaggatgttggtttgtgtagatgaacagttgtggtacctaaacattaagtgatttccaacagccttaatgagaatttttttaaagttatttttaattgacaaatagtaattgtatatatttacagggtacaatataatgttttggtatatgcttacagtgttggataattaaatcaggctaattaacaaatctggcccctcacatacttactattttttcgtaatgaaaacatttaaagtctactcttctagcaattttgaaatatataacgttttatgattatagccaccattctgtacagtaggtcactgaagcttttgcctcctatctaactgaaactttgtaccctttggtcaacattcgagaatcttgtgtaataattgaaatttgtcatttttataggttctgatatatgtcatatatgctcttttttcaaaatatatatcattgatttttcatttgtcatataaaatcttttaaagttctgatatatgtcatatatgctcttttttcaaaatatatatcattgatttttcatttgtcatataaaatcttttaaagtttattgttttactccctttgttattaatagcctcacagtgtttacatggccctcctttttggcaatttaagattcaagtcttgtagctcaggactgaaataggcaccagccatagagatgaacacttatgctgttatttggattatagatcaagtcttattgctaaagctgtggatggagactaggaaggacagacacagagtctgggattgggctgttgagctgtggatagttcctcttcgtacatattttagctacctggtatgttttgaaaatatactcatcaggtgcttaacttgtattctttattatatttctgtcttcctccaatagttgaaccagtaaataattttctgtatactaaaaaaaaatgtggtacatttactttgtatattaactttggttgcattaactttgtcggctcacttgtaaatatctgatgattgataagttataaatcaacaatatgtcaaaaagaattagcttgttgtgacttcagtcagtggactattttcttgtttttttttttttgagatggagttttgctcttgttgctcaggctagagtgcaatgatgcaatctcagctcactgcaacctccatctcccaggttcaagcgattctcctgcctcagcctcccaagtagctgggattacaggcatgcgccaccatgcccagccaattttgtatttttaatacaggcagggtttcaccattttggccaggctggtctcgaactcctgatttcaggtgatcctcccgcctcagcctcccagagtgctggtattacaggtgtgtgccactgcgcctggactatttctttcatggggttttctgcttacaggacagcttattgttaactttttataattcgcatctaaacttttaatggcttctgatttaggatgatttcagtctcatctttttttcactgcctgctaaataagttttgtcatgaatttccatctttgtagctaaatgggagtcatgcaagtctaacttcaaaaattaaggacaagagactaaacctttaaatttactgtgatctttgattttaaatgttttgatataagtgtttgctgatatattttgaagatggaagttgggacatctcaagttctagcatgctttttctttctttttctatctcgggaacttgaccacagatctcgatgtcctaatagaggcagccttattatttcctctgtccttaagcaaaaacaatacatttaataagttttgagtaacggaacattctatggctaaatgactccaaagtgggcatcactcttaggctttggccaacttgatgctatagatttgattaggggacttcatctggaaatttgtagtgagaaacccagatggaactctagagaaaatacactgtgcatcataaggctttgctaaatgtaggaaatagaaccatgccccatttggtgacatttctcttagcaaattcccatgcttccaaataacatttaaaaatatgtcgtatttttaaaataattatttaaaaaataatcttaattaagcagctttatttggtattacggtaagcattgatagagagtgttaatcatttctattgatgttcttcctgctttgacagttttcctgttcaaattgagccccttttaactgtggcttatataaacatgtttattttatttttagagtcaggatcttccttgatctcccaggctggaatgcagtcgtgcagtcatagctcattgcagccttgaacttctgggctcaagtgatcttcttgcctcagcctcatgagtaactgggactacaggcatgtgccaccatgcccagctaattttttttttcttgttttagggacaggatcttgctatgttgcccaagctggtctcaagctcctgtcctcaagcaatcctttcttctcagcctctcaaagtgctgggattatatgagtgagccttgatttttaaagtgtaaggccttaactttcatttgtgttaagcagattttatgtagtccactggtagttttcatgataaatatctttaatatagaggtttttaaaataaaagcgtgttttcttaacttacgtatttctaacagaaattattttagttttgtggaatctttttatataaatttctttctgtgcccattcagagatcctcttgtttggttatctttttttcatggaaatacacagtaaggctcaattagtttgttatacccactttatcccaattcttaataggcttgtagctttgataataatcatttgctcaatgacctcaaggataaaaagatctatcaggatgtaaggttttagttattataatttgaagaaataaactatttgagagttagaatttatcagtgcactctttcttctgctgtatctcattttcattatattgatacttatacctaagacctataccaaatttaagtccttcttagttttttaaattctactatttaaatatttcttgaatatttcctcccttatgcattactggtgtcactgtcttaattcaaggccctagaatgattgttttgacccaaactagacttttatgcctagggcttactccctgtctagcagtcatttgctctgccaacagatatatcttctagagtttggatcatatgatgccccagtggctcttcagtttctaaagaataaaatgcaaacctggaatctgctgttcagcatcctccctgttagacttctggatacctatccagcctcctgtcttcctcacattctctgctgcaatgttattaatgtacctggcagttcccaggagggtcactctctttctggcttctgcacctttatcatgaagttccctctgtattaaatagcctttctctgtaagcttggtgcactccataatcttttattctgctctagtgatctcttgtttttacatattttctgacaactcccttctctgcatttcaggtttcaattaattgctctactggttcccatgacattttatacaggcttcttttggctctgatgtcactgcattgctattagataattatatatcttttttctttactaggctatgaaatccttcaggtcatggacaagatttgttgcagctttgtatagcccctgatacaaggcttggtgctggggactcaatgttgaataataatacaagttgaatgaattaattaatcatgttcgaagattagtacagttttggttcagaatgaactttccagcactatgtgttgtctaataatttaaactttttacttggtgaataaaattcagtttatttattttcctgcaggttttgaataagaacatattttcatagtaaaaaaaagtcttctactggtcaagtccgaaaagtttcaaaattyagactcataaaataaatgtaataaatataacaaaatactgacctaggtttataatagctttatgacgtggtgagggcacttttgatttttctattaaactgtggacagcatctccaaggccaaactacatggctctgactgcttttaccccttgtatacaaactttgagctatctctgtgtactgattttttctttccctgaagagaaaatggaagaaatcacatagattattcatctacattgtaatccaaatgtaagtcaccagtagcatgtttattccttcatgcatagggtgagtcagtgctatttaataggccttgtgtgtcatagtgtgaactttacctaagataccgaggaatttgaacttaaccatttaaatttcaggaatatggtaaagaaagagaaaattatatacttttaaataaaatagagaaaagcttcctaaatcttgccatctagagtaagtttcagaataagaagtgatataacatctatttctggaaaagtcttgaacatagtgctaaataatgcactagagaaaaaaatctatgtttttaccttagacctctttaaagcagagtctagcaattatcatgtatttaatttacaagatgagagttatttttattcttgtgaactgcagttgtcttcaactaatatggtattgaaatggaaatagaaagaagtgaaatctaggtaaaggacagatgcgtcaagtaacatgacagctgaaatggttcatttacatggctgacatggacagagtgcagcgaccaataccagaattgcttagaaaccccttcatattttggggaaaattgtcattaaagcagtatttctgatttaaatgttaccttggaagcaggttatatattgctgtgaaatttttttttttttttttttttgctttacctgaaaaaaagaaacaaagcatatttcagtgtttaaatcctaggtcttccacttgctaccagtgtgaccttggttaagttactaaaccccatttaaaaaaaaatctttagaatgataatgatagtaccattattattaggagagttattgtgaggattaaatgaaatcatatgtaaatagctctcaacagtactttgcgtgtggtaaatgctctgatattgttagttcttattaggatgctgataatcatactataatgatattattcttaacctttttgagctctttggttaaaattaaatttatgtgtttatattcattctggcatgttgcatattgacagcacccactaagcatggtgttctgggcacactggtgaattacagtagcataaagaaatgaccttgtccagaataaacagaccaaaataatgaatgtattttaaaaatatcagatccctgaatagagtctggagatcttgtttttggtgttggttttatgcttaacaagctctgcatccttgagcaagttgtgaattccttccacgaaataagggacttagaccagatacttgttaatatttttttctgcttcaaaatattatggcactcaatcattgactgtcgggggagttaggggaaagtacttatacggttttagggccgaggctggatgatttcaaggtagatcttacaaggtggagaactgattgtgattgtgagagttgagctgatgagataatagctttggatttgtcagtacggtgatgcaaagatcttaaagcaagctttgatgaacaagatgttagttttgatatttaagctgttttagttggttcatgatcttactttctagggattgtagagctagattttcctaagacaacaaagctgctgtctaattttgatctctggcatcttcaacatctcacaccctctcttcttccctcccctctyctctctcatttttttttttttcgcaagatagtagtactatcactgtagagccttggatctaattaaattcagatccagttaagcgggtttgggatagggcctgagaaactgctattctaacaagctcccaggtgaggcccttgctgcctgtggatggcctgcactttgaagagcagaagtctatctacagcatcatatttgttgagcagcagtcctttgtgccatcttcatctcttctttgtcttctaattcagattgcagatcttgggctctgaattaagcatcctcatattccaaacttgaacttagtctttgaataaatatgtcattatctgcatccctgattcccactgggcataaccccacagttcctgggtgtgatccatggctgtttttgcagcttcctttcactggtatggcactctgcttctgtcagtttgctggtgtactccaggttctgacttctggcctggatttacctggcccagatccttttactcatctgaacccacttcagggttccatgttgaggccattgctgtacattgctataaacgttaaaatttccaactgttgctcttggaaatgagtatatatatatacatctcctgtctcatctgtttatcgttcatgactacagtaattagtgatcccttctgtgtcctgaggatcatgtagttctcctttcagtagggagctctgcttcaggatgtaatgactgcctccattttcagagagttgcctaaccaattgaatggaaatcagaggtataactggttagcactagaagttaagctgatttccgcccgagtccagtttatttttccacatgtgtatctttgagaaactgatgtgctaattgcttaaaggtctttgtggaggctctttctgatgctggtgggattgggttccttccagcctctttcatatttcatgcagcttataatttaaaagagaacaatagtattaaacactggctttagaagttctttttttcctaagtatccttgtaagattcaacaatattatggaatgaccgtaaaaatagtggtaggtgcttcaagaaatataattttctttgaaaagtagaggaaacagcaaacagtcttcaaactaactacaaaaaactgacaagttcaaggctgatttccattgtagtttcatgttacagaagtagtttagtttcatttgctgtagtataagctgagtaccttcaatatccattgtcataactccagttttcatttcaattttttgctgcaataaaattcttataactaaattataatgcaaattaaagtactgcaaaattttaatagacgtaatgttcacccatagtcacattctttcagtttcgtattacataaaaaactaatagtccataaaaatatggtaaagttaagctacacttagaatagacatgaaaaaaattttaagccaaactagatggtctgaatagcatattgaatgatgaattagaacttaaagaatgcctattatagctttccagttctgtaattttaaatgtatttattagaaagtagattaatttacattttgatgtcttcattataatgtggatgtgacaacttcrtactcattttatacttctctatgagatatttggttcctctcccaagggtcgtgagtttgctttgtctcccacagagacagcatggttttctgggatgtttgacaactagctttagttaggcatgacggttgttagtgacttttcgtgaaattaaggttagctctgaatagtcatgcttcagaaatgatcattcattttggttatgaaatttttcttgaagacttattagcatcactcctgtgtagcacagggtcatattttattggcgcttttatccctcatctgacataattaatgctcttccctctggcatggttagaaaaagtggtaatcttggttttctgcagctcctgctcataatcactaaactacccattgcagcccaaggctgctttaacttcacattatttcacttagttgtctttttctgtttttaaaaattactgattatttaatttgctgatttaaaaatcattatgtgggtcatccattcttggattgatcaagaggattctgacattaacctgacaaagccaattaatccagaaaccattggtttcccacattgtgccccagtcctgtcctaagtgctgaagtagatgacaaaatttaaggcaaagaagagaagacaattcgtatttaatatgcactgtgtgttgctttatttaaaatatttcacttaagcctcacaacatccctgtgaggttatataattttctccacttttcagatgagaagacctagctcagagagagcccaggtcttgaaagttacaaagtgatacagctgtgattgcagcccagttcttcctgttttcaaaacgcttgttgtttccatgaccttttagctatgaagaccttccatgaccttttagctatgaagaccttctgtgaccttttagctatgaagacgttctcccctccagcagtttgttgatactctgagggctggggtaggggaaggcagtttctctcttttacttgatttaacattgggtttaaccttattcactaaagaatgaaagctggcttgtgaaaaatgtggcttggattccgtatgagaaagtttggtcagttaacgattatactataggtaggtctttgcaaggcacttccttagacggattctcaggacagcattggagcaaatcactgaagtctaggggttgtacgtaagtatagtgtgggaaaggctaatgccatctcttccttgtttcacttagccaataaacaaaacttcagtgtgtttctattggaagaaaattaactagcattcattacctacaaactctgtactgtccttcagaagtatatctagttttattctggtttttatttacagtcagcttactttgctaatttatagtttattgtgttttttcctgctaacattcaagacttcccatattcattttaattatacagattataatttctatacaatttctaattgtagtagtaacattcacattaaatgtactgctgaattttgccaagacaagaatatagaacaggcttcatcaaagtgtaaatgagaagtggaaatggtttgggtctatttttcaaaatgctgaatgacttgaaagtattacttctgtacgacttgcgtagaataatgtatgacacaataaaatgcctaatataacatctttatcagtataataacaagacataatacaattaattttttttttgagataggttctgactttatcacccaggctagagtgcagtggcagtgatctccgctcactgcaacctctgcctcctgggctcaagcgattctcccacctcagcctcccatgtaactgggattgcaggcacacaccaccatgcctgactaaattttgtatttttaggagagatggggttttgccatgttgtccaggctggtctggagttcctgggtttaaatgacccacccaccttggcctcccaaagtactgagattataggtgtgaaccaccatgcctggcctattaaataatttcttttttttttttttttttttttggagacagagtctcattctgtcaccctggctggagtgcagtggcgtgatctcagctcactgcaacctccacctcctgggttcaagcgattctcatgcctcagcctcccgagtagctgggattacaggcgcccaccaccacacccagctaagctttgtattttttgtatttttagtagagacgcggtttcactatgttggccatgctggtctcaaactcctgacctcaggtgatccacctgcctcggcctcccaaagtactggtattatgggtgtgagccaccacacctggctctttctgtaaagatttaaagtagtatatagtgaagttcttttcccctccatataattcagttaatatggtgaactaagactctgtcatttaagccttagaagtttggaattttaaatttttacttgtagtataagtatgaaataatgaccctgagtttctcttgagaaatcttattatgtgttcagattagtattattctctataaagtgatccacttgtaaggctacatacgtttattctagtggtgctgccattggtcaaatcgttttttaatcatctttttatatcattcccatctccgtttataagcaatagaataacagaacataagagaatagaatagaacacactcaatagaagagaacaatgaattaccttatagttatagttaaggttattgatgagtgagtcttcacttcatctgcactgattcgtcaccttattcattgtggctgagtcacagtaacttttggtaaggtttagacatcagagtatagtaatttcattttgttagtaaatacttattaagcactcactatgtgccaggcactgttggcactggggttactttggtgaataaaacaattgccatttataacattaaataaccacttctaaatgcatttgtttcctaaaaaggagttccaaaactttatagaaagattagaattgtcagaatacagctctgacctcacagaaatcatacaaaatcatagtatattatgggaaggtagtataaataagaaaggaaaatgaaatagctagttgagtgattgctattcataaggtcaacacatgaaacatcaaccaggtttaatatcctgaaatagattttataggccatgttctttctctaaaggtcactggaagaacttaatacctttttattaaaaataaaatgggaatggtggaatgggcttttcacatattatttggataagttgaataggcaaattttgcttcctttttatgaagttatattatttcatatttgccatttcttattttacatgtgaaatatgtttcttacccaccttgctatccatcatggagaaacgtagactctaaatcttgagggttcaaatgaagtataataataaataggagttgttaaataaaagtatgtatatatgtatgtatgcatatacaaataattttggagcaatctcctgtttaaagcagaaagtgaaagcaaggattaaaggctcaatgcttctcagtgaagcattttttttggtgaggtttcatagtataaggaaaagtgcacatgtacagtttgtcttcacagagccctgttttcaaattcagactgccatttaataacttctctgtgcctccatgtggtatgacaaagccattgtcatttatttatctagagataccagtctcacagctttgtcaggatgatgggatggaataatgtatataaactatcttgtgcaatgcataagtagttaggcattcaaatttcctttttccatttaaaaaattgcacaagtagtaaatgcatataatattttcatatagcatttttacaatcagaactataaagaataaaaatcacactcctttccctagtggtaatcatttttaacaatgtggtgtgtatccttctaggcattttaaagtacttagttatctatatatgcatgtacatttcaaatgttatacatatatagttattgttgcttagcttttcaacacctaggatcatgctaaacatcttttcttctgtaacattacttttccacactgtatttagtctttcataatcatatagaactaccttattccttaaactgtcttaacatacttcattgaatgaaggtgtcataatttatttatttattcctccattgagagcacatttattccataatattttaaatttcggtgtatggtggaactgtgcagaaaataaatcatggtttaagttttgtttcttttgttctcaaagagatatcagtcatcttgaagatgctcacagtgctgaatctatgtatagtatattcaaatctttttaactatagaggttaagatgcatccattctaaagtgaggaagacaaattttccaacttgtctaatcatggaaatcttgctcaggaggtggaactacattattaaatcagagaatgtggatgggacagtagcaggagatagggtagtctgtgagaataaatttgtaaactggtcatcaaaagtttcctgaacactgcttcttggtcaggacttcatacatagcagagcaacttcactgctttctttggttcgttcgtatttatttatctagagataaggtctcactctgtcgccaggctggagtccaggtgcgtgatctttgctcactgcaacctctgcctcctgggctcaagcgatcctcccacctcagcctcctaagtagctaggactacaggcgtgtaccagcacacctggctgatttttaaatttttttgtacagatggggtttcgccatgttgccaaggccgatctgggactcctgggctcaaatgatcctcctgccttggcctcccaaagtgctgggattataggcgtgagccactgtgcctggtccctcaccgctttctgttgaaagtcagtggttgacaaaagattaaaaaaaaaaaagtagtaaaaagaaaaaaaaagtttcctgaaacatattttgtcagcttctgtcctttttcttccttcctactaaacatttattgtcacctaccatgtattagatattgttcctgtaattgatcgtcttccaatgtagtatggaaaataacacattaatcaaatggtgaaaataaaatgtattgtgatcacttttgataaacaagcagtgattaaggttgcagaagatcgaacaattaactgctgtgggaattaaagaaggcctccccgataatgtggatcactcagttcagttcataaatatttaccgagaacctcctatgtgccagcattagagatccaaagttgagaatgtattggatgacttgtcctttcgctagtttgtatcagtgaaggagtaaatcggaattttaagaagaagaaattattgcctgaagatgatgtaatttaaatttcaaaactgcttgaaaatatattgtatcttgtatagatgagtcataggacaaacatatagactgttgttctatgggaatgcttgctgtctcagcagctcaaatattaatgccttaataatttacttaataagccaaagatgtagtttgctgatagactgtatgttcatatacaagcctctttcctctgctctcccatgcctaccccgtctgcaacctttgtgccctcgtcaccctcctgtgtgcatgtatgagtacccggaatatacaaacctcatggaactatgggactctttgacctctatgataaaagatcttcggattatgcttacttcttgattatctttttggggaacatcttggcctagggatttggattattcactgcttctttgtacatacttcttagtttgttaacttctgcaacacagtcttcaaaaattgtacacctcaggctttcagagatttattcctgattctgaaaaattactgttctttacatgtcccataactggaagattatctaatcacaattagctaaggcaggagaagaatctgaagttggaaattagaactggtgaacctcaagttgctcagttcccaaaattagagaatcattaatgaaacacaggtggtaaacactgactgattccttccctggggtaagattctattttcacagatttggtgtatttttctgctagaacccaaaacccaaagaaatctgaaagtatgttgtttgtataatatttttaacttccagtatcagtatccagtagggagtgctatgtaaaatgttttttaaatcaatatattgcttcaggcaatgaggatttttgcagacattaatgcaactatccataaagctctattatctaagctatttgtaaacatcatatgcctgtgataggtttgaaattgtgccttaaaatattatgtctgtgagaaaacatacctagaccaaatgttatattattaggtacaagagtttatatatatatatattttttttttctttccaccttttattttaggttgagggagtacatgtgcagatttgttacatgggaaaattgtgtgttgcaggggtttggtgtacagattatttcatcactcaggtaatgagcatagtacccaataggtagtttttcagtcttcaccctcctcctacccttccaccctcaaagaggcctctgtgtctattgttcccttctttgtgtccacaggtattcagtgtttaacttccacttataaacaagcatatgtggtatttagttatctgtctttgcattaatttgcttagaataacagcctccagctccatccatgttgctacaaaggacgtgattccatttttttatggctgcatggtatttcatggtatataggtaccaccttttgaatgaatccaatgttgatgggctcctgcgttgagtccatgaccctgctattgtgaatagtgctgcagtgaacatacacatgcatgtgtctttatggtaaaatgatttatattcctttgagtatatactcagtgatggggttgctggatcgagtgatagttctaagttctttgagacatctctgaactgttttcgacagtgactgaaataatttatatattcccaccagcagtgtataagcgttccctttttttccgcagctttgccagcatctgttatttttttgactttttaataatagcccctctcactggtgtgagatggtatctcattgtggttctgaattgcatttctctaataatttgtaaggttcagcatttattcatatgcttgttggctgcatgtatctcttctttggagaagtgtctgttcatgtcctttgcccattttttaatagggttgtttagtttttgcttattaatttgtttaaattgcttacagattctggatattagacctttgttggatgcagagtttgcaaatttttttcccattctctagattgtctgtttgctctatcggtagtttcttttgctgtgaagaagctctttagtttaattaggttccaattgtcaatttttgtttttgtttttgttgcaattgcatttggattctttgttataaatctttgccatggcctatgtccagaatgatatttcctagcttttcttctagggtttttatggttttaagttttacatttaagtctttaatccactatgagctgatttttatacatggtaaaagaaagggatccagtttcaatcttctgcatatgactagccaattatcccagtaccatttattgaatagggagtcatttccccaatgcttgttttcttcaatgttgtcaaagatctggtggttgtaggtgtgcagctttatttctggtttctgtagcctgttccattggtctatgtgtctgtttttatactagtaccatgctgttttggttaccgtagctgccttgtggtgtgtttgaaatcaggtagtgtgatgcctccagctttgttcttttcttaggattgctttggctattgcctctcttttggttccatatgaattaaaaaaatttttttttctatttctgtgtaaaatgtcattggtagtttgataggagtatcattgaatttgtaaattgctttgagtagtatggctgtttttttatttgtatttgtatttttttgagacagagtcttgctctgccgcccaggctggagcgcagtggtgcaatcttcactcactgtgaccacctcccaagttcaagtgattctccctgcctcagcctcccgagtatctgggactacaggtgcatgccaccatggctggctaattttttgtatttttagtagagatggggtttcaccatgttagccaggatggtctcgatctcctgacctcgtgaggagaactccagtgagtttagaatttaatgacaaatgtgtgatatgttttgaaacataatttctcttcctccagtactcatttttgctaaaaaacaaaacgaaacaaatcatgataggactgagttgtttgcaacatagactttagtcttatacttatcctgactatttgcataaagtacagcaagaataactatttctacataggctttttagattggtttcgatggaactctgttccacaaggaatctcagataagaccttttaaagctgagcccagccatgggtttgtatcctcaaataccctgtgagttgggtaaccctctcttaaggtcccaagataaacttggagttcgtaggcctgttagaaagtgacattctttactgaccatgggttaggagcactgtacaagaactgcgtaggcaatggtatgaggccagtttttaccatggggcttttattagctatgcaagttgagcttgactctttaaagggaagcataccgttccagtgaaatcttggtaaaacaaccagtttctccaattgtgtcctgctgcaaaagaaaaatggattcttattgcactgatgcaaacatctatattgccataagttaagaatactcacagatagtttccaggttcatgaggaatcaggcagagagaaacaaacatgctccaaattttgttcacaggaatataccttactcaattattaaaggctataaatagtttaaaataagtttccttcacactgaaaaacaaaacaaggatcagcaatatttcaagcagaagtcaaaaataattgcttcagctttctgagttcagtccatttagttcttgatttcttgatattcatgaacatttcagctcttcatgagtcctgtacattttttctttattccaatattacaatctacaaagttatcagaaacctgtatttgagagcacctgtcaaagttctatcacttactataaaccatcttttgaaaagaattagaagaagacaacaattatctgtgaatagaaatgtccagggtagttacagttagaaacataattgacaaagaagtttggtgatctctgtggtttataatagcttaaccttatgtttgctaacatatacttagacattaaattttagaaattccatacagttttggagcaaatattagtattcaccaaaatataacctaaagaagattgaacatcattctggcaatcccatgtaactaaacatgtcagatgatcctgtttacctcttttctggaggctccaggggccctctaaagccttccaaaagccaggtatcaggaaaggcaattatgaggctcaagtttgattttgggaagcctgttaaatatgttagaggattaacacacttgatgttatgaaattgatttccagattaccataaattatttgactgagaaattttaatgaagcaaaaaccttttataaccctttccaaattttgccaaagggcagatcagtgccccaagagtaccctgttgtgctttcattccaatgctcaacccacagagaaaccacataataacccccagaacctagtcaacatgttcacacagaaagcctcttctgcaagaatcatttccacgatccttctgccacttgtttgaaccttcagctttaccttatctaattcaaaacaattctttaaccctagccaatactttacattttcctatcttctaataatctttcattaaaaacacattttactgttcttatacacctagcatgtaaatctatttccagtagtttcaattatgtgttttaatggtacctcctagcaatttgaactttaatgtaaatcctggcaagttgttttaattgtgtgccagatacagccagcataattgactccttccagcataagtaagggtgtggttaattctatatgtctataaggggacagacatatagttctatatgtttgtaaggaagtatatgtcccttacagacatatagaactatgtctatatgtcaattgccttaccagttgtgaagcaagcaagtcaaatagttcttaaaacccaaaaggcagtttgtaaccttaaaacatttagtgagcctagtatctaacctgcataatttagtcctcctatttacatattggtgacatctgcattttactaataatctttaaggctgttgttatttcccaaagattaaagtcacgtgaactaaaaggtaccatagcttttatcttccctttaaaaaatatttcatccaagcacttttcttcctttaggccaattacttagaggtctttttatagacatcacactcaacacatatatagctacactgacaggcagactagaagaagattcagtagttgcaagacctttcatttgccagtctttatgtatctctcataatgtgaagtaatttctgatactcccaaaagtaaaaaatgccagataacacaatgcaaaacagaacagaaccctaaattctgagagggatttatccacttccagttcctggggtttcatgaggaaaacagaggttttttgcaaaatggggtatctggcgccccgtgtttttcccaaggagtcccaggctgttggagcttgaatatctgcttttaattaaactgacttttagccatagcactctttaataaggtccttttaaaatttcttaatacctgactttagccaggccaaacagctgatatttctggctttcaaactttactaaaggctcagagaaagaaaatccaagtcagtttgtggaggggcagggaatcaaaaaatggcaaaggtcctgcagatatcaaactagaaagaactcatttcctaaggcaggattgaactcctggctgccattgtaaaatggtgaggctagaacaaaacattgccacgtggttgcaggccttgctcccaaggatgtaaaacagaatggaggcctgccacaaagtttgctatggaaagatggacaaagtacactagattggctacagattaagaccagcctcacaaatcctttttcacaattaaaactctactgagaatataaacagtgatccttatcattcctagcctagttaaaatgtcttctaaaaggaaaaaaaagctaatttaaaagtcaactgctgatctggtggagaaaaggaaagaaaaaaccagtttaaaatgcctaaagaggaacctcttatttttatgcaaatggatgcctccatcagtgagaaagacttcattactgttcaagggagtgggaccttctggctgggggagcggaaggctctatggatgcatggcagggagagctgcctgctgttgggcacccttggttcacgcaccccagccttggcagggaggggagggtggcgggagctgctgctcgcccttccgtcacaaaaaagaaaggaaaatgccatggagactgaggctgaccttctcaacacctgggagtgacaggggttggggcatggtttcccctgccctcagaagtctgaggatgaaaaggcttaaaaatgagataaaaatagatttggtttgcatctcactcaccctttcttaagccccacgttgggtgctaaactgttgtaggactttctccttagttcacctaaaaatggggtccttgtcayacaaccatgagagattaggcttgcaggcactttaaagggcaagaaaaatttatcgggcaaaaaggaaaacaaaggtaaacagagagtctcagcaaagccaaagtcttgctagctggcttccgcctcatagattgaatcctaggtaccaccctggaacaggggagatcaggctcctccctctggcaaacagtgcgcacttcctgaggctccaccccgttgcacactcctcccagtgtgcaggccagttggaagttctctggggacctctttatgcttgctgtctcattcctgaaatgaggccagtacaccaggagcaggaggggggaagggaagagcagttagaataaacagaaagaggaagaggaacaatttcagcagcacttttcattttaaaagtcactttataaaattttacattttccttttgcaaagaaataactttgtcagaacctcttttagaaacttctaagtatcattgaaaatagctctcctagttattttattttagagctagctttttaaaattgagagtacagataaactagttgaggtattttaaaagtacactatttcgaccgttgtaatttggggtcgtctttagttacgtgtgaccagttttctaaatgttagcatgaagaggcaccataagcattaaatataaatccagctggtgtttctaaaggtgggtcaccctttaaggacaaagtctaggttttagagatagttgtccataattttcgttttccttcctgaatgaccagaaacctagtgggactcatgagagccttttattattttggtcactcaagaacattttagatttatcaattgaaccaagcttcagaatttaactggtttttaaaattacatgtttttcacttaagcctcaaagattcacttcctcttttcaaagaccaaagtttaaactatagaaaaggttgaaaaactccaactagtagttcaaaataaaaccttaacttcagagaaaaatgaaagtcacaaatccgaggtcaacagatctctagagaataacaaatgaaactcttgccttttatagagcttcacttccaacctcaactagttaagaatatgtacaaattgaataaagtcttaatccttaatcaagccaggaggattcagatcccaacaggggccttagcagagattcctgctgactttggcaaggttgggtgaaggaggacttatcgtattggtaccaaggtgctgattgctggtaaagtggtggggctctctagaggtccacttccgatctcatctagggtaccaaaatgttaaccttaaataactagattccgaaaatgtgattcattatagagtattcaagcctaaatctatgtggaagcatagatagaagctgccctgaatatatcttctgattagcatcagttacaggtggattttaaaggaaagaggcagcttctaagttgtgtttccagtaacttatattaatataataaaagttattgattagctctatattgttctttgtatcacaaattccaggaactggaagataatgggtaaggcagctagtcaggaacaaaaatgcctgtaaacatggcccttgggtgtgggtgcataggaaggaaagtgtgattgaagtcccttactcttgtcttcctgagcctggtaagttttgcatacctcacctagctcagtctgctctgagctatttttctcctatcattgataagttttattttactttgtgatgtttgcgtatagacataatgcgaatgggaaaagcatggaaaagaaaaattaacattttacaatttcatttcaattggaacatttagtagaattttctgttattttgtagctctttaatttgctttgggaattcatgctctattaattgctgtctccatttttactggcattgatgctttccagatgtcctatttttgtttaaaatgttaacattgattacttttcctttgacttagatttgtggtattgtttaccataaattgtgtagaacatccttgttaattgtgtagaacatccttgtttaattttatgtagttactttagaaacaatacaatgatgatcactaaaataataacatttatctaaccaagctgttcttgacttatcatgggcgttctttgaatgtataatttagatgattttacttttacccttttctgctatgctttgaacatcttctatttttcctcttactgaatagatacttattttcttgagaggtctgattttccttttgtttatttattgttgcctctaacagaactcctttttttttttttttaagaaaaattagatgacagaatcactatagtcccttagttcttaaatatcctagcacttttaaaaataaatatttttaaatctaaaatcttggtataaatatcatcaaaacaatctctcaaaatcaattcacctaccattgtaatgcaggttgatttaagtttgcatattctatatccatatgctcatgtatcatttaattttaatggaattatatactcagctcttggtgatttatgttttgtatgtaaagcaaaatactacctctactaatagagatctaaataaaaacagaaatgttacccgcaattcttccacctcagcaaaggtgtcccctttaatttttatatatacatatgcacaatttataaattatgattatttgtacctaatttattttctttcatagtgaatgagcttcactgggagtgtatagactcctagagcttattaccttatgctctagcagtggcatattactcctttctgattgccaggctacccatatgcttatacctgcctggagctagttgaatacaggaaggcaagggcatgactggagggggctgggtcctttcctttgaagcaggaaaggagtactgatgttctgtatgttgataggtctctccgttcctcactatggacccattcctgttggtgccattgtgaatactcttgtaagaaaatcttcttttcgctcagagcaagtcttatctacaaattacctatcttttcagcagaagataatgagactgttgcctgaatgtataggccctttctttacgttcttcttattgttactatctgcgtaaacataaaggcttcccaaaaccttggctttaaactaggatgttggacacagcaattttatgagcataaaggctttaattttctttaaaaacagaatcttaatctgtgccaatgtgatttctgccactaggtaaattataggttcatttttgtgctatgttcttagactatatggtatacattacctgaatccagagatggattaattgtgaccttgagttgtttttaatttctgagtgcttttaacaagaatgagagacagtacttagtctatcttttcaacaaaagataatgagactgttgcctgaatgtatacactctttctttactttcttcttaatgttactatctgcctaaacataaaggcttcccaaaaccttggctttaaactagcgtgttggacatagcaattttatgagtataaaggctttaattttctttaaaaacagaatcttaatctgtgccaatgtgatttccccaactaggtaaattataggttcatttttgtgctatgttcttaggctatatggtatacattacctgaatccagaggtggattaattgtgaccttgagatgtttataatttctgattgcttttaacaagaacgagagacagtacatagtctgatggctgaaggttcagatgtctgtctttcagttagcagttgagaaagtgcactagtcaagtgaacaattttctatatccattttgtggcaaattatcatgattattgtgtattttgtagcttttgagcagctgactctgctaacacctttgagtagttttcaaggctgagaagtagaaatgatctgcttatagtacagataataaggcaagaatatcatctccctgggagaaagtagaggattaggaatttcagcatgaaacctagctgaatattcgtggagtggatggctttggagtatgtgaacattatcttctttccttgagggtttgggggtatgattatttgagaaaaatttgtgtaatgaaacattagcataaggaatgaagtttggatttatggtcccataattagacatatttcttaataactagaatctattgacaaatgactaccacatgagtattagtgacacttagttgtttggaccatgtacacatcagttagttggattgagtgctggaggtaagggtgggaatatcccatgacrtttcaagttcttctgtatttattttcaaaggtactttattccccctcttgttcccccagcaagaaggtttacaagtagtaaagtatggtacttcacataaaataatggaagttagattaagcactgcttcttcatttgtttagagtttttctttgtttatctttgtgaaaatgactgaatttgatgggtttttattttttcttttaggctcagtttatgaacctcttaaaagcattaatcttccaagacctgataatgaaactctctgggataagttggaccattattacagaattggtgagtaaaacctgaggaaaacgtgtccttaggtatctgcgattagtattccccttgccctagttaaattatgtacattatgtggatgatattgttctgtcattgggatttggggtactttcagtgcttaagtagctgtgtattccaattgtatgtcgatatcaggactataaaaggaatctggcagatcatatctggcccttgaagaatttgaaaactgtcaccaatatcttctgtgtttttttaatcttcctaaacattaccagatttgagaccttgaggatgtttcttgattaatacacagatatttcatataagtattaatttgctcatttacctaaacatggttcccagatagtcctaaactttttatatccgtttctaattcattgagatacaagagataatcacaagttagtattattaatatcagggcgcttgtgttttgtttgttttattttgtttttccaggaccagccttgcaaattttgtttttcaatgtgagtaagcaactttcagatatgtgtataagggcctcctctttgtttgtcagaccatctattagaatgcatattaatctttttgtcagtttaccttttatgccatttacttgtactaggatggcagaaaacataaaatttgatttctctccccctaagatgatggattttttggtctatttcaacttcatatgaaacttcaatcttacttcttttggtcaagattcttgcttgcattaagttgcccattttattatctttttggcaataactagctaaagagaactaactatatttttttatgtcaattgtgtattttggactcttaggactaattttttacactgggaaaaataataaataccctggttttctgaaagaaatgattatgataagatcaatttagaggctgggcatggtggctcacgcctgtaatcccagcactttgggaggctgaggcgggtggatcacaaggtcaggagtttgagaccagcctgaccaacatggagaaaccccgtctctactaaaaatacaaaaatcagccatgagtggtggtgcactcctgtgatcccagctccagaacagaatgttttctgcctttggaaaactatcctaaaaagtagataacatggctaggtgtgatctctcatgcctgtaatcctagccctttgggagaccagcatgtgaggactgcttgaacccaagagttcgagaccagcctgggcaacataacaagccctccatctctacaaaaagtttaaaaattagcctggcatggtggcgattgcctgtagacccagctacttgggagtctaagttgggaggatcactgaagcccaggggttagaggctgcagtgagcttatgatcatgcaactgcattccagcctgggttatagagtgagaccctgtctcaaaacaaaagggtagttgccaatctagataaggttaatgtaatgcattttaggaaaagcattacccatccatttatagttagatagcaataaaatagtttttagtaaatgtaattttagtgtttgtgttttcctattttagagctcatttataaaagataataaaatattaatttcagacttaagtaaaatgttcataaaaaattatttacttgctgctgtgttcatgttatatatggatggaattcagttttaaaatgttaaacattttcctaacctgtacaataaagtaaaatgaatactgtagactccctctgaagaccaggcacaatttagtcatcagtgaaacacaggattccagcctgttctgtgatcttcccctcgcccttcctacattgttgatcatttactgtagcagttgaggtggctttgtgatttactaaatgtatgctactctttcttgtgcatttgctttaagtttacctattgaactgatttttaaaaaatattatacttagtcttttgcttcatctctttttccctctgtacctgatgttgtcctaataagatttctaacacacattgacattactggagatgtgctaaaggctttttaagtcctaattagctgagtcctttcctaaarctggaaagatttctttatgtagggtggattcccactaaggctggagtgacatgaagttgtttccacatcttcagaagtattgtactatagcaagtttagaaacaaaatcgtcagaagtgggatgaggaaaccaaagaagattaaaacatttagcccaaggaaagtcgctgactgtacagttcattctttgtcttgtcctcaattgcagtcaagtcaacattgctgctgtatcaaagtccaactaccggtctctttcccactaaaacatgcggtggtgaccagaaggccaagatccaggacagcctatactgcgctgctggggcctgggctttggctcttgcatacaggtgagctggtgtgtgttctcctcgtaactttgagagtggataatagggttttgtaggaccaagactaattgagccgctatcttttggctctgctgctgactcactgtgcgacctatgactgctcacatccctttttaggcctctaaaccttttcattttctttttttttttgagatgaggttacccaggctgcaatgcagtggcatgaccttggctcactgcaacctctgccccctgggttcaagcaattctgctgcctcagcctccctactagctgggattacaggcatgcactaccacgcctggctaatttttgtatttttgatagagatggggtttctgttggccaggctggtctcgaaatcttgacctcaagtgatctgccagccttggcctcccaaagtgctgggattacaggtgtgaaccaccatgcccagcctaaaccgtttcatttttctaagagcttatatcagaccagttctaagattttatgactttgtgaccaaaacttcttgtctctaggtttgtaaatcaccatttttagtcattggtagaatgaactacctgcccactctcattgtgttgattggtttcaataatggagagaactgatgatgactaaatgttgcagataataaaattagaaccccaagtacttaacaaatttgttcaaaatgatgcaactcattaatgatagagccagggtcagaattcttttcccctacccaatttctggttttatcactgcacttcagcatagtatctcttattaagtttggtcataagtgaaataattgtataaagttaaaaaaaaaaaagaaatagttagacaatacaaaatttctcctttatttatttcattatatgtagaaagcactgaatgtggatgctaacacataattgtaatacattttaaccataattaagatcagtaagattaactttctgaatattaatttcctgaaagcgatccatagttatgtttctgatttaaaaattgtatcttccacatgaacacgatttatctgtttgaaattactgatgtgttggattttaaaaagaaaatcaaacactgagataagatgcagtagtcttctttagcacacttgaatgctgacatcactaaaagcatttccttacatattctaggtaaggacaatatggctttattaaatgtaaaactggtactgatcttaggagtacagggagcatcagtagcaccttcaccaaatggtgaagccaataatgagacagactgatgttaattgccattcctgatttgacacaatgggaaatacaccttgtgctaacatcttaccaagttatctaacatgagtctacatatgaacaaagctgaattgtggctgtttataagacaacttgcctggactctttaaaaatgtcagtattacagatgactaggaaataagtatgaggatggctagactaaaagagactaaagaaatacaacagccaaatgcaatacatgatccttaattgggtcatgcatttaaaaatactgtaaagtatgaaagtatgtttttgggacacttcagtatttgagccaagactatgtattagatcatatagtatcagtattaaatttcttaggtataataatggtattatggttatgtaggcaaatctccttgttttctagagatacttctgaagtgtgtaggagtgaagggtcatgatgttcgtagcttactttcaaacaatgaagaaaatattatagagaatgcaagctaatgttaaaatggtgaatctaagtgacgaccaaaagacttattcattatagcatccttttaacttttttgtagatttgaaatttttctaaataaaatgtttacaggaaaattgctttaacaaatacaagaggataggcagcatatggacaaaagtcagatattaaccttttcccagaatgcttctaacatcagatagagactttaaagtcctcattttgcaggcacactatctatgtagaatatgcctctattaaaacacttgtgtctgacctcaaggggaaaagtactgtatagagcaaattcatgctaatttttgtgcaatgccagcatgaaaaagaaggtatgatgtgctaatgatgaataacttactttttactgacattcaccatactatgtcaaaataataatcattcttcccaatagtgaatggtatatgcaatctatgatttaactgggaggtaattataatatactttttaaggagagaagtgatactttttaatcatgtgagaatgattgccagatatttttagttaagattaagtgaaacaatgaataaatcacttttattttttagtagtgggtgattctcatccacctttggaaagttactgatttataataaaaagcaacttgtggacagaaggaacatcttaaccaaactaggtttggttaaggtatttaggttaatctaactattaaactaaatagttagattttaggtgttctttatttttaaaagcaagagatgtaaaatatgctcaattgattttaaattaaaaccaaagaatataaagctctatgccaaaatacatcatgtatcatcctggatgtgtgtttagttgaaggcatccttgactatgactaaatgcctgctctgatggtattgaacacactgcagagcaaagaaaggcagcacctaccttaacttgtggctgctacttaaatccaagcggccattgcataacctacagggatagctaataaaaatcagctttagttcataacagtgaatttaaaacaatctgttggtggatttttttccaatagaaatattctttaaagtttcagccaaatcgctgtagaaatattgtatactatttttaaaagaagttggcttgcttccttgaaagaaggaaaaatctgcctaagtttcatcataggatttttttttcattgcagcatttctacttttgctgggaaaatggagtttcactgtgacagaattggtagacatcaccagaacacaggattagccagatagttaaatacttaattatcaaaagctctgcttccttttcaaatgcatttccaattagtttcatgagttatctctctcacccaggcgaattgatgatgacaagggaaggacccatgagctggagcactcasctataaaatgcatgagaggaattctctactgctatatgcgtcaggccgataaggtaaaacattgtggtgtggacgggaattctcccatcattctgaaggattaatttaactagtatcgcaatggtttcttctgaagaagaatgtacttttcaaagggaaagccacatcctagggcggcctagataggttaacagcctttgccattctagcccagggtttgaaatcctgagattgaaggaacaccttaagcaagaggtgattgagaattgttatttagacttggatttgtttgtgttttgcatctggtgttgcttgataaagacccagtttctcaggaacctcacaatatcgataattctaaccaatattttattaaagaatatccttgtcagaattacttttggacatgtgaattgctctggcttaagtgaactttagtttaaaaatgtaacacttcattcatttacatacaaaaaggctaggaattataggcttagaaaacagctttacaggccaggcgcagtggctcacgcctgtaatcccagcactttgggaggccgaagtgggtggatcacgaggtcaagagatcgagaccatcctggccaacatggtgaaaccctgtctctactaaaaatacaaaaattagccgggcatggtggtgtgcacctgtagtctcagctactcgggaggctgaggcaggagaatcgcttgaacctgggaggcggaggttgcagtgagccaagatcatgccaatgcactccagcctggcgacagagcaagtctctgtctcaaaaaacaaaaagaaaaaaaagaaaacagctttacagcgttatgtggaaattaaagaaaataatgtacataacaacatttaaaaaactataaagctctatacaaatataatggctattcccttacttacctacatctctgtgatcccaggtcctaatatagtaagtgcccatacgtgtacatcaatgcatatgggtccctaagaccatccacaggtttgatgcttcattaggaggactcacatgactcatcagatagtcatagttgtggctatggtttattacatgagaggagacaaagcataatcagcaaagggtcaaggtgcatggaacacagtctggaggaagccagatgctagcacctaggagtcctccccagtggggtcacacagatgcacttcattcccccagcaactgattgtgactaattgtaacatatgtaaaatgtctgtcagggaagttcaatagaagcttgagatttttattgctcagggtttttgttagtggttggtcatgtgggtatcctctgtctagcactcaccaaagttccagacatccagaaggaaaccaggtgtgtagtatcaaccatattgttaatgtaaacactttaggtttacatttaggtttagcccctcttgtgagagaatagtggaaaccctttcatgatctgagtgtccacatatcagccaaggggcaaccttacaaacaattctttctgtggttagcagtctcaggcctactatattaactcttttcaggacaatctgcataaatgaatgtactggtttccagtctgcttccaactgtgtgatgttggacaaattatttaatttccatgtgccccgtttttttcctctgttaaatatggataccagtaatactgcccttattaggttttgtaaggattaagaaataactcatgtgagtgagtcagtgttttgcaagaaagccgccttggcgcagtgaaggtgaaggccagcgcactccctggctgaggtgggatcccgaggcctctccagtcccctgagggtgcaccactggcccatctcacccagggcggtgccccagaggtggagcaccagggcacgtgttaggacctgaaagatgatgaactgtgcctggtcagggcaaagctggaggaaactagtggaagtccctagcagtcctgatgtgtaaatcgattggtcatccaacctgggtataggggtgaaagactgatggaaccatctagtgtctggttccctccaaggtttctctcaggatggctggcactcttccaaaacccaccccacatggtttcatctgtaaagtgaatgattggaggttttacgacccaaaggatctccacctactctcacactttagttgggtaagaagcccggcttgctggcgtgtggagccgggtatggaatgtgagtgcctagtgggccgcttctggtaagcagacctggctctgcgggatgaaccgaatgccggattaaggtgcccaatgcccacacactcatcagaccccagaaaaggtgttggttgatacaggaggagggcggccacggaagtcagagtgggtgggggtggggaagggcagagaatgtatagagaacatggtgtctgcccccataccaccctgaacgccctatctcgtctgatcccagaagctaagtagggtcaggcctggtcagtacttggatgagagagagcacatagcacaagggctggtaccgggtgaacatacagtaaatatttgtgtcgttatcattagtagtattccctttcccttctagaccccgtgtttcagatgcgtttccaacttctgtattttagcagagatgcacacaagtaactttgcaggcagttttgatcacttaatattttgtttattttttatcatacaaacatattgttttaatttgcacttgaaaataataggccaggcatggtggctcacgcctaaaatcacagcactttgagaggcagagacgggtggatcgcttgaggccaggagttcgagagcagcctggccaacatggtgaaactccgtctctaccaaaaatacaaaaattagccagatttggtggtgcgcacccatagtcccacctgctcaggaagctgaggcacaaaatcacttgaacctgggagggagaggttgcagtgagctgagatctcattgcttcccagcatgggcaacagaggggaaactgtctcaaaaaaaaaaaaaaaaaagaaaaaagaaaaaagagaaaataataagctgggcatgatggctcacgcctgtaatcccagcactttgggaggctgaggcaggcaggtaatgaggtcaggagttcgagaccagcctgggcaacagagtgagactccgcctcaaaaaaaaaagaaaagaaagaaaaaaaataataaaaagagtgataacaagtcttcttcttcaggcctgtaattcaagtcaaaataaaaaaaaatcattaatattctgctactagaatatggcaacaagaaaatgttatagagaaaaagtatatttattcataagctgataatagagacatatgaaaaacctttaatttgtctattgagatttgtacaaatcaatattgcaaaggtttttcagatgcttgaaataaagtagtatgtcacagattgacatactggaattaaactagtatgtcatatgttatgttgaaataattgtgattaaagttaattttttcctaagtgtgagatgttattgtttgtttcatttgtatcatttcatgaatgcataatgtctttatgaattcaacttttctctctaggacacattgtgaaaatcaaaatcatgactttcatgggtttgccaaacaagctgacaaagtagaattatcagaaggaagtctaataatgtattagtttaaggcaggggtttccaatcttttggcttccctgggccatatgggaaggagaagaattgttttgggccacacataaaatacactaacaccaaccatagctgatgagctaaaaaaagaacaaaattgcaaaacaaatctcataatgttttaagaaagtttacgaatctgtgcttgactgcattcaaagctgtcatgctctgctggttgacaagcttggattaaggttttttccttgtggcacggttagccagttggtttttttattgttgtttggctggttttttgagacaaggtctctctgggtcacccaggcttgaatgcagtggtgtaatcacagctcactgcagccttgacctcccaggctcaatcaaccctcccacctcagcctcccaagtagctggggctacaggcatgcaccaacacacccagctaatttttgtattttttgtagagacagggtttctccatgtttccccaagctggtcttgaactcctgggctcaagcaatccttccacctaagcctcccaaagtgcaagggttacaggcgtgagccaccatgcctggccaacttaagctactttaaattccttaaattataaaggattatcattttttttttcctatgtagctatgatgtagaccattagcacctggccattagccaattgttagtggccttttctactgagatttgactttacaaaggtgttttgactttataatggcatttcttactcaaccttattaaccagtcatcacaattgtaatatgttttcttttgatacagtttgagtgtgacctaaggttgtttttgttttttaattttaaaaatagagacagggtctcactatattgcccaagctggtctcaaactcctgggctcaagcaatccttcyacctcagcctcccaaagtgctaggattacaggcatgagccaccatgtctggcccagttaagctatcttacattctttaaattacaagggattattatttctttcctatgtagctatgatatagaccattaatgtaaatatgaaatgtaaggagtatattattctagtgcatatgagtgtgagggactgactcagggagattgaagcatgcacccagctcaaagcctctcaccataccttcacatcttgttgctgcttgccgttcttttcctcctgtcttggccatttcctttacaatactgttgcaagaggaaatataaacatatcttgaaatgtgaaatatttctgtgttggtcttcccttgaaactgaagcaaagcacattagtagtgttcattcactgtttgacctctagcctcatgttgtcttttgaagtaaaatcatgacctagaaagtctcccttctccacttctattgatttctcatcataaaacatgcttcctgatgtattttctaaaaatactagctaaaagagatattttaaattgattatgaatttgagtgaatacaaagacttattcttgatttatttaaagaatttagagcagtctgttttctgggttttattgtcttgacacttatcttaatgcctgcttattaatgtcagctatgttttacctctcagtgtgcagatacctattctcttatttactgtcttttataattctgcctacagagaggcattcagagtttttcagagttgattcaatctgcaattagtttggagggcagacatttgctttataataggctataaatgttgctgtatctatctactgaaaattttttttaaatgctagtttctaattaatgagaaatcattaacttttataaaatttatttttccaggattcccttatgagaagatttttttctctaaatgaatgttttaaggctataagttaaaaatggatgacaaaatactcaattacctcttcccaaatgataaactgtttattcacaataataaaagttttcaggaaaaatctaagcaaaatacgagtggaagaggcattattctagatttattttagtctagaaacttttgctttaattattatctttatttttatttgccagatgccagaatcatacaaaatactaattagcatcctcttgtttttgactgctttcaagagaactttttgtttgtaattgacatacagcatgccccattaatcttcaaagcttatactttggaccttatttttttctgaaattttaaattacttgtcttttaatggctttaaaactcaaaatgtacttatgtaatcccccatttgagcaactttaatcatttagtagttgcttttcccctgacatagtgattgaatataaattgtcctgctgggttcttgcatgtcttgaagacaaatgacaaacaccaccttgtcaactgcaggagtcactttattaaactgataaaaccttatccttttagatctgtatcaagtggttaaaatgtgttttgcttcaattttacctattttttatataggagctcagaataatattcaggacttcaagataatagtgcaaaaagagtgaccacattgatttctatttgtgtaggttcagattactgccagcagtttcagatattgagaagggatagtcatcttctctgaattaacaccagatggctttgtcactttatcagtagagaacttacatccctaactgtacccattctctaggtcctgattacatactgataggttcagacttttattttgctgattaggttctttaatcataaggagggctgtatttgtttgtgtagggcacttggagatggtaaagatgtaacctccctctagaacaatattgcccaatagaactttttatgagcatacaaatgttccatattactcttgagcaatacagtacccactagtgacatgtggctattgatttcatgaaatgtggccattgtgactgaagagcttaattttttatttaatttaatataattaattgtaatttaatttagtcagtcacatgtagctagtgcctaccatgttggacagcatagcttctagaagcttacaagatattgggactctacagctatactgtttctctactaacaacacttctgacaccaaatgtgtggattttccataccaagcagttcttgaatttgagacaccaactgggtatatacagtttgttgcaattcttccagtaatgacctggagttaaaacagatcctataggttcagactcagtcccacaagactacccccggcttccgacaccaattgtaagtagtagatccccaggctacccacaattctctctgacttggctataataattccttggtgtcaatactttgttataacagctcacagaacttgggagacactttacttactattaccagtttgttttaaaggatataagcaaacaccagatgaagtggtagaaggtgcagaaggtcctgagcacaggatcatctgtccccgtggtatctggggtgcattaccctcttggcatgcagatgtgttcacagacccagaagccctccagacatcatcatctagggttttatagcaaccgtgttatgtaggcatgattgattaaatcactggctattggtgattgactcaatcaccagcttttcctttctgcacgtcccctgaagtaaggagtggaggtgaggagctgaaagttccaaccctctgatcccttggttggttcctctgtcaatcagtcccccatcttgaagctatctagggacctatcaagagtcacattattagcaaaaactcaggtatggttgaaagggacttatatgaacaaacgacattctttttgcccctgttgctcaggaaattcgaagggttcttggagccgtgtgcccagaactaggaaggtagaccaaatgtgtattatatgatttcacagggagatacacacagctagtaaaagtataaaacaggaaaaataattgagtgacaactacattgatgtgggagtccagaggaaggaattttggtgagggttcaaaaagtataaaagaagatttttttaagatagtattttaaggagaagaagaatttttaaagatggagaggaaaagatggttctatatagtttcatagtgaattgaaacaaagcaagaatgcaaccacttaggtattatcatcacttatttctcttatttctctttaaaagagaagtaaattattgcatttacctagaggtatatatctttgaattcatttttttgttcttatttatctcagacttccaggaattagcacagtacttgtcacatcactggcatcagtaaatgtttgccatgttgaattgaacaggccgtaaagaaatgggtggattttttggtccccagagtttttctgttggattatttaggtatttacttattctaaaatggtaaaattttatgtctagctaataaataatggcgtggcctatattctcttagagttggtgccttagtaatgagagtacaatatatatggaaggggaaatgaaagcatgttaacagtagcatacattaaaatttgcgacccttagagaaagaaattgtatttgaaatttgaacacttactgaactagaattggcctgtggtcctttttcattatgagtgtcatgtaggcatttccaaataacagctcagtggaatacaatcactgaaatcctgtctcacaacataaagcagaattttactctaaaacaaaataagatgcaaaacattgcaaaagccattgctactacattaacctgctccatactatacctgagttgctgtgcatgtgaaatatcaattgagaatcatgttaactctatcaagttagtagttatgaactttttgtattttttcttgagaaaaggtaacgtttctgctttgttcggtcctctgccttagctttgttcattaaaaagtttcatgaaaaatagcttttaatctatagtcttggataagtttatgaattactaatgttgtttaattttatatttcattctaggtccagcagtttaagcaggatccacgcccaacaacatgtcttcactctgttttcaatgtgcatacaggagatgagttgctttcctatgaggaatatggtcatcttcaggtaaaaagagattatacattttattctccttatattatatagcatagaacagtgatccccaacctttttggcaccagggactagttttgtggaaaacaagttttccacggatggggtaggggctagatggttttgggatgaaaccgttccatctcatatcatcaggcattagattctcataaggagagcacaacctggatccctcgcatgtgcagctcacaatagggtttgcactcctctgagaatctaatgccactgctgatctgagaggaggcagagctcaggcggtaatgcttgctcactgctgctcacctcctgctgtgcggccccattccaaacaggatgtggacccatagcagtctgtggcccaggggtgggggagccctgtcatagaagatttgaggctgtttaaaaataattttcaaattacattctataaattgttcaaaatagaagtatagaatcaactctgaaacagagaagaaagtgaaatggcagccaccagggctgagttagttgtggcaattgaacatgaaatccgagtgaattcttggtcttcaagcaaaaagggtaaatggatagattataaaattatttatgtgcaaaagaaggaagactacagttctttccgtgacaaaagtttttacatgttatcaaatttagaagaatttcaacatttaggaactaggggaaaaaagacagttcacagtggtgtcatagcaaatcagttttgttacacagcagttcatttcttaatgtgtcatccttcagtgaagctaaaaacatgccactgaaatgtaattccaaaaggtatttctgaagtccataaattttgtcttatataatatattaaattttatacctatgcttagaacacactggaggttttagatatatttttttcattttattcccctctcacatcagtgtattgttttttagctggacagtctgttgtttctgggatacaaatatattctatttatgtttaattgattttctgctcatcatttggttctctgtctttgggacagagtacttaactattcatctattccttactaaataaagagtatctcctttttatagtccctctcactttagatacctgaaatttcttactttagtatgtcttctctaaacacagaaagtgtggtgctctcatttatatgcaggaaagactcttgtacttatttgtaaacagctccttggagagttagtgttacatgaatatgtagtttctcaaccttaacctttaatcagattttatgtgtcttttcctttgataaatatgtttgctatcagaagtagggttttcagaagataatagcttatttatctttgtatcccagattcagctcagtgcttggcacatagttggccttaaataaattttggtcaacctgttatgtggcagtccctttacaacttgccatgtactgacattttcttacagaagcatcccacaagtcagagcagagagctcttagaggtccctgtaaaaggctgcccataggagtgaaatttctttgaagtcatttttgacaggcttgtgtcaatgctgtaagagaacatataggggagcctggcagtgggatgaaacccttctcaccatgcaaccatgttttaagaagagtcactaaaatgttagtgtaagtctaaaaaacctaaaagatgcagactactgcatcttcctgtgtggcccacttggaccttgacaagaccctgatatccaatggactcttgactgccaggaagtcaggagacacccagaatcagcctggttcctcagagggccaccagcagtgccaagccctgggctcctctgcccaaagcctccagggcaccaataattttctgccccaatttcccatctattactcagttgggctggaggagagtcatgggagacatagccactggagctgtcagagggaaataatctatgttagaattctatggaaacaaaattacatcttgctttctctttgtttttaactcaggcttacagtttcctggctgaaagtttttcactgcctttttaaaaatttacttatttaataacagttttattgagatacaattcacgtaacatgtaattcacctatttaaagtatatagtttgatggtttttagtatattcagagtttctcaaccattatcactataaattttagaacattgtcatcaccccagaaagaaacattgtacccattaggttgcaaaaagaaactttgtattccctatattctccaaagccccccagctctaggcagcaaccagtctttctgtccctgtggatttgcctactcttggcatttcatatacaataaatgatctttttgtgactggctttttaaatttagcgttgtgttttcaagatgtattggtcaggattctccaaagggacagaactaataggtggaggagaggagagagggacagagggagggagggagggaaggagaggttggaggaattgacccacacaattatggaggctgagaagtcccatgagaggccatctgcaagctgcaaaagcaaggatgccactaatgtggcttagtccacatctgaaagcctcagaaccatacaagccagtggtgtaactctctgttggaggatgaaggcccaaaagcccagcgagccactgatggaagccctggaaccaaaagctggataacctggagttctgatgtccaaaggcaggagaagaagagtgtatgagagcaagaattcacccttcctctgcctttttgttccatctgggtggcccccagtcaattgggtggcacctgccgaccttgagaataggtcttccccactcagacagccaactcacgtgccagcttcctccaraaacatcctcacagatgtacccagaaataatgctttgccagctgtctaggtatccctttatccagtcaaattgacacctaaaatgaaccacacagggttgtgcctgttgtggcacgtacctttcctgcttctttacctgagacaattcacacatcccattcaggattctgtgagtatccttttttgttaaagtgatattagtatttttttgtttagatcataaaatatctatttttaatacactaaaataatacctcctttgttcataaaactaatttgttcataaacatgttttaaattatattataccattaacattaatatgttcctgcagttgtttacagaaattctgtatttgttgaatatgagactgttttcaagatgcactgcctattgtttatggggtactggcatcatcatagtgtcttgcttaccaaatatcttttttcatttccatgtatttgagatggattggcatttcatactgcctgtggggccagactattccaaagtagagtagaagtactttagacccaaagcttgaaaataaatcttaaaaaacaaatgatatgttcctatttttttcaaagttctttttgccatgtaaagaaaccaaatgatgtagaaacagttgttaacagttttatttgaagccgtttccctaatccagtgttatccattacaatgaatttgagaatttagaattttacatacaaagctgggatttttattatgaactaaattcacaacacctttattcacagtaggaaaggaaatagttttatgacactattagagcaaatgacttgtaattttagccttaattgattaattttataacttgttttggttgtttcctttaaccttttaatgtttctgtttgttgcagataaatgcagtgtcactttatctcctttaccttgtggaaatgatttcctcaggactccagattatctacaacactgatgaggtatgctttccccaaattttctattactaaatttcacctctgaaaatatctatttttttttttagttttcacaacttatttttagtttatgtaaaatgtattcctgttacatttatataatcagatagtagatgttggttgttgaatgaaaaagtctttatatcttcaatgcattgcacttttaaaatgaacacaatgtgtaacaggttgtaaaactttactcccgtgaagactctatttcaggtgatctaaaataaaacatgtaacttttaaaaaattttagtaacaatgaaagcaaaataacatttgcagattttctcaattattgtctttttttttttttttgagatggagtcttgctctgtcacggggctggagtgcagtggtatgatctcagctcactgcaacctctgcctcccaggttcaagcgattcccctgcctcagcctccaaagtatctgggattataggcatgtgccactacgcctggctaattttttgtattttagtagagacggggtttcaccatgttggccaaggcagtcttgatctcctgaccttgtgatccgcccacctcggcctcccaaagtgctgggattacaggagtgagccaccgtgcccggcctctttcttttgttttacatcgttgcatttcataactcaccctttgaaaagtaaagagaaacttttatcctgttatattatttttatttgtaggatctcagtaggattcttcatgtttttcaaaagacaaataccatgttcttattcttattaggaaaattgtaaagaattcatatcccaaagatgagaagcatttctttcacaggcattaatgcttgaacaaacacacaagcacatgcgctgatgtactttgaaatgtgccatagtgggagcaaaaaagcttttattgtttggtacatgcagtgagaactctgtgaaagggtagatgtactatatatgtttgttactattcctctcctgtgatccatgcaagggagaacaattacatcagacactcaacaccaaaattgtcattggaccgtactgagggtactacaaaataggtgcatgtagccctgccctctagtagtttatattctcatacacacttatagtgtatgagtttatagtctcatacaataaataaattctatttagaagtgaagataaataatgaagaagaaattatggtcgtaagaaattaataatacccagtatggtttcttctatttgatttgtcaaagaattctatggtttcatttcatccaaataattgttagtgtttataatattgtgaagtgggattattcaagcatttgggatcagggaggagctgggaaactcctgttttagtccaattttaaggagcatgctaaaatataaaacaaataagggaaaggagctgggaaactcctgttttagatcaatcttaaagagcatgccaatatataaaacaaataaaagaagcatgactctgactgaggagaggaggccttccagaaccagcccacttagcttctcaatttttccacccataatatctccaaagcactgggagaaatatcctagatccctgtggaacatcttatgataaccgtttacaattagtggcaactaatattgcttacaagtggctttgttttgttcagtaatttttttttttttttttgagacagtgtatcactctgtctgcccaggctggagtgcagtaacaccgtttcagctcattgcagcctcaacttcctgggctcaggtgattctcccacctcagcctcctcagtagctgggactgcagatgcacaccaccatgcccggctaatttcttttgtattttttgtagagatgggtttaccatgttgcccaggctgttctcgatctcctgggctcaagcaatcagcccacctcagtctcctaaagtactgggattacatctgggagccactgcacctggccttgtttagtaatttatttttaattgtaaaaattttactttttgctttctcaatatatgtcataattcattttgtatttttatttgtcaactgccatttttcatgaatattatatcactttagccattccatttggttttatatggcttatgtaagctttaaaatttttggatagttccttaccttcttaaactgctttttttaaaaaaatttcttatttgtggtttttcttggccttatggtttttatttactatatgtgaagtttttatgcagctaattatcaatagccttcaatatgtacacttaaaaatcctagagtaataaaacatgtcatttccgctcaccatctttttccttgagattctgtataatgtgttggatcatatggagaggcagtaaatggacctgcatagaatcagttaatgaaattctttttatctaaagatctcagaggattcaattctttgaaaagtggtatgacttggaagccttttcttttttaactgtatcttaggctctggtttggctagttcataaccctaccacatcttcagttcctagttatactcacattttaagacaatctaaggacccaggatgtcagtgggattaccgtttatttccttctctatttactataaaatttaaaatttgccctaatgcttctttttcttaggattgaagaattcagagtttggagatatacatatgtgcacacacacacacatacacatacatatgtaatgaaatataggtactgcattgtctggactttggggtttttgataagcctttgttttgcagctcatcatacctttactggttctgttgtttttataaaatttgtatctatactgtagttcctttgggagagggccatggtcttaagggtcatgtgcacctttacaaaggggcagtgaacctactgagtggccatgtttgtggtgatgaactttgctgcagaatgtattttctaagggcaggcacagtaatgtatgctaattttctaacatctttcgttgcctacacaggcgtaccatgtttccttggtatcagtatttcctagtgtctgtaatagtcttgctgtgtatattggtcatactcattttttattaaaaataaaaactttgaaaaagacaaagttctgtagttctgcccttgtactgctgtttgctttcttcatctagagagaaactcatcatatatgttaaacttagacctaaatataaatttacctaagtcaatccttttgatagagataacttatttacatctgttggaggggggcaaagtaatgaactgctacgtggcgttccatgtctcgtttcatgacattctccattaataaatatactctaaaagtagattcatagaaataagaaagaaatcatttagaagtgggtccagagaaacttacttcatttaaagtcaaagtaccccctcaaatttgtataacaatgaaattttgttttgtgtttgagatacttttttatgtctcttatggaagttgttaagagcacatttaggttgcaagccttataataaaaattgtgcacaaaactgtaggtgcttgttcaacataagacctgtgaaagtcccctttatgaactcaagtgtcatttacttttttttgcaaagatgttttctaccatatgacctagcagctcttttcaagtatgtcatgtttcagattggatgacacatggaatttctctcttattgtattagtcatctttgctatgtaacaaactacctcagaacttagtttaaaagattaaacatttattatttcacagcccatgggtcaggaaatatgggagcagctaagttgggtggtgctggcttggggtctctcatgaagctgcacttaagatgtcagctggctctgcactcatctgaagggtttactgagactggaagacccacttctgagatggctcagtcatatggctgttggcaggaagcctcagtttctccccagctgttattagcaagagacctttccaactgagctgctttgagtgtcctcatgacatagcagatggtttcctccagagcaagtgatccaagaaaacgagataaaaaaatacagtgctttttatgacctagcctcagaagtcacatttatatacagtatcctatttattacacaagtcatccctattcagtgtaggcaggatttacacaagggcttagatactaggagttacgtatgatcaggagccagcctgctatttttagcagtagtttttagttgaacttcgttagagagattttttaaggtgggattttttttccttgtacactaagacttttattttaaagataggtattttattctattattttctattactatttactaagttgttgtgtacatgtttttgtgtacatgttttgtgtacatgttttctctttaaaatattaaattttttttctggcttttatttgttgtatggaagctttgtgtcctagattctaccttttgctatgagatggttatcaggctgaacttgaggggtttctatctcaaaagttggaacaaatcttttctataagtaatcttagaggcattataaggtattcttagctcctgcttgtcatcagtttacacagagaaataagtaagttgttcaaaactatttatggatggtttttcctctaaaaatagaaagataacactgtccttgtttctaaaattatatgtagcaatagtaataatgactaacattatatagaacttatgtgctgtcactgttcaaagtgctttgcatatagaaaaacttatttaatccttacagcaactctgtcaggtaggtacagttactatcttcattttacaaatgaccaaaataatgcagagagccactaagtggcttatcaaggtcgcacatgtagtacgtggcagggcttggatttaaaccaagtagtctgactcaagagttcattttctatgctgacagtgagtgttaratctctgtttaacctgtacagatatgagtgacatatatgtcatgtggcaacatcatattcaagcttcaaaggcagccaaagagacctaaggcttacaggtttattcatgtatagttgtttctatttggtcatgcatccttgcatggattatacaactatctgataaacatttattgagtttccataatgggccaaacagtgagaatataaaaatgaaaaaagaatttagtctgtaacatcatgcagtccatattattgtggggaaaacagagaatgtgttgtgttttcattttcttgataatatcatttgaagctcaaagctttttattaattttgattaagtctcatttatctaattttttgttgttgcttgtgctttaggtgtcataggtcttttaaaatttcttctaatgtggttttgtagtttttaatacattattctttcattcttttaagttcttcctgcatattttattctgtatactaggttaaatggagctttttaattttattatcagaatgttcattgctatcatatagaaattcatttgatttttataaattgatcttgtgttctgcaatcttgaactcgtgtttaagctttaatcgtttttatgagttctttaggttttctatgtagaatattatgtcatttgcatatagtaatagtttacttcttcatatccaatatggatagcttttaaatctttttcttacctaatttccctggatagatgctccaatacaatcttgaaaataagggctgcgagtggacatccttgtcttgttcctgattttagggcaaaaccttttaatctttcaccattaaatgttacctgtgggctgggtgcggtggctcacccctgtaatcccagcacttagggaagccgaggcaggtggatcacatgaggtcaggagttcaagaccagcctgaccaatgtgatgaaaccctgtctctactgaaaaatacaaaaattagcttggcttggtggcgtacacctgtaatcccagctactggagaggctgaaacaggagaattgcttgaacccgggaggcggaggttgtggtaagctgagattgtgccattgccctccagcctgggaaacaagagcgaaactacgtctcaaaaaaaaaaaaggaaagaaaagaaaaatgttatctgtgggtttttttggagatgcccttcatcagattgagaaagtttccttctattcctcgtttcttgagtgctttcatcatggaaagttgttagatttttaatattttttctatatctgttgagatgattatgtgatctttgttttttatttaattaatatatactacttcattgattgattttcttattttgaacccatctaaaatatctgggataaatcttacttggtcatgatgtataatcctttttaaatgtcactgcattcatttgctgatactttgttgagtatttttacattaatagtcataatggatattggtatatatccattctgtgttttgttggtttatatatgtggatgagatacctttgtctggtgttggtaccagggccaataatggactcctaggatgggttaggaaatgtttcctcttctattttttgaaggattggtattaattctttaaatgtttgatagattttatcagtaaagcttgctgggtctgggattttctttatggaaatgtttttgattaccatttctcttcagattttctatttcttcttcagtcagttttagtagtttgtgtttctccaggaatttgtctatttaatctagattatctaatttgttggcacatattagttcatagtatcctatttaagtcctctttatttctctaagattgatgttaatgtcccttatttcatccttcctttaatagtttgagtcttatccctttttttcttggtcagcctagctaaaggtttattgatttttgttagccttttcaaaaaatcaatttttggttttatttttaaaattatttttctcttctccattttatttattttttttttagtctttattatttttttccttctggttggtttaggttcatttttctcttattttttctagtttcttgtgctaaaagattaaattattgacttgagatcattcttctttttaaaatacaggcattttcaattataaatttccctctacttatctgcatgccattagttttgatattctgtggtttttttattcattcatctcaatgtgttttttgatttctctcgtgagtttttctttgacccattgtttatttagtagtacagtttttaattttcacatatttgtgaatttttaaatttctttctgttactgatttataatttcattccatgatggtgggaaaacatccttggtatgatctctgtacattattgaacatggttattcacattattgccttttcaagtcaattttttttttttttttttttagtaatttctgtctctattgattttgtctatttggtgtgacatctttctcaggagttccttttgttctttgtacatgatttccttcagccctttgagcatatttagaatatttgatttaaagtctttgtctagtaagtccagtgtttggactttatcagggacagtgtctattaatttcatttttcagatatacagaccacaatttcttgtttctttgcatgtctcatctttctttgttaaaactggacatttagaataatatattaactccagaaatcaggtctccctacttcaaagtgtggtggtgttgatgtttatatttgtggagttgcctgtttgtttagcatctttcctgaaaattttctgtgaattatgtattctttgtcataggtggccattgaggtctttgctgagttagcttactggtcagttaatgattgaacaggaatttacttaaatgctttgaacgaatcagtctcctagcctttgcagagtttctcactgtatgtgttaggcataacttgaaagctctcataggaagtgcccaattctacttgagctttcacttcctgcttttgtagagcatccagttcagccagaggtgtgggagtattagctcaggtctttacttactataggcccacacctatgtgtgtgcatagctttctgactttccaggaatatgttggagattttcagtggcccccgtggacacttcatcccccaggtttaagaagatttgttttaggcagctgcagtgttaaatggttgcaactgattatttcctttatatgcctagaaaaaaggccatttgcatctatgtgagctctgaggtcatttaaagaaaagmtcttaatgcctgtgttcaaggagctgtcagacattcaaatagtaacagtttactaagatggtgatttgggggagttctaaagctgttctgttcctccttcatgttgttgctagtctgctggtttttcatgtgtactatgattttgtggctgttgatatataaacctactacagagttggggagaagggttgagaatagggcaatttcacataccccaaagctcactctacttagtgaggtttcagccatttttcttgatttaatgctcggatcgttgtatgctcttgttgaatttccggagttctgaaaaagtttgatgagttttgtcaatattcttactgcttgtgtgaacaattggatttcctgaggcctttcctctgctgttccgtgatttggattccgtttgtttttcagtaattattgtttatgtaactttatatttgtaccttcccctactgccaaagaaaacctttttatcctgcagttcagtcattttataagatccattaaccctggagtcccagtgtgttttttaactgccttaaaaaaaatactttaatatgctgcatacattttgctacatttaaacatctatatacaacacttttaatggctgtctgacattctgtaacatgtgtcagaaatatacaaccaggctgggtggggtggctcacgcctgtaatcccagcactttgagaggctgaggctggtggatcacctgaggtcaggagttcgagaccagcctggccaacatagtgaaaccctgtatctactaaaaatacaaaaattacctgggagtggtggtgcgtgcctttttctttgcagtatctgtgtattttgaatcagttactattgaccacatattctcagccaccatgggaatgaagctactaatgataagattaggggctaacgttagtattcatttgtgtttgatctgctaataacattctttgaggatattttttccagttctgaaattccttcattcagtatccccgtgttgcctgactgggaagtcttaaaagggaacactttaatatttttctttttactatatcatgaaaattctacttgactcacttacgatttttaaaaatcttttaaaatttttttaaaaattcttttatgggaatttttaaatcaagttatattatttgttatccagtggtattgaaaagtggctattactttttagttggctttagtattctgagtcaggcaaagtttgtgaattttcagtagaatttttattataattacataaattatccattttttccctaaaatcttgaaatcctgggatgaaagttctttagtattgcatacggttcacttgtcacctgcaggagagggagaattccccaaggacaaactattttaatattttgagcaggaggcagatacagtttagttgagaaaagatttattctttgattttaatatgtctggagtttttacccacaaatgatcactattttaggaaaggggtggctttttcttcaataaggcagagcattaaaaagataactactttctatcagtgttaagagatgtataaataggaaaaaatatatgaaataaggtaaatctatttcaaaatggagagaattggggaaaagcactgtttgaagagatgatgactgtcaatctgaattgaacaaaacacatcttgtacaaaatacataaaaataactcttttctcccctgcctaagaaaactcctagggaacaagagatggaaggaacttgggtccctaaatgaccttatggtgttaatccattaatctgccccaccgtgtgttttatgagctttaaggattttttttgctagccgaaaacaacgcaatgatgaaaagcacaaatctttgttcatcttaagtgaaatgcccaactcttcattattcatctttagatgaagtgcactctgtttgtcatttatagctgtgaatgaaagcccccatgtagggctacacagggagttgtaccagaggacaggtgaacagcaagcttcaacagtagggaacagtttataaaagcataatgaggaagggagggttagctaggtttcttgggctccctatggattagctaatttgagtactttctgtggctcctgtatacgggttttctcactttgtaggatagctggccctggggcagttagggtagatacataatggtccagtgtgagagctaatccgggaagtggttggggtatagatctgctactcaagaagaactaaccagcctctaaccagggcctcaaaattgggttaaaaaaaatgactaggccatctgggtgcggtggctcatgcccgtaatcccagcactttgggaggccaaggcggatggatatctgaggtcaggagttcgagaccagcctggccaacatggtgaaaccctgtctctactaaaaatgcaaaaattatctgggcatggtggcgggcacctgtaatcccagctgctcgcgaggctgaggcagggagaattgcttgaatccgagaggcagagtttgcagtgagccgagatcgtgccattgcactccagcccgggcgacagagtgagattcttctaaaaaaaaaaaaaaattattcaccgttgctgataagctcaaccttcagttcctggaggttgagagttgggactgaaagtttcaatcctgtaatcatatagctggtttccttcccaaccaggccccatcgtcaagagttcaaggctgtagtgaacggtcagggcaccactgaactctagcccgagtgacagagcaagattccatctcttaaacaaaaaagcaaaaagaaaaaaaaatagcttttattttatggtttttcaagaaaaaatgaaaatggaaattgagaaataccatggaacaaaaatgaaaacacatcatatcaatacttgtagcatatagcggaagtgttattggtgagcagtttttagccttgaatgttgtattaggccgttcttgcattgctataaagaaatacctgagactgggtaatttgtaaagaaaaaaggtttaattggctcacaggtctgcaggctctataagcatagcactggcatcagctcagcttctggagaggcctcagggaacttttcctcaaggcagaagacaaaacaggagaaggcaagtcacatggccagagcaggagcaagagggagtggggagggaggtgccacagtcttaaaccaccagatctcatgagaactcacccactatctctaggaaagcactaaggggatggtgctaaaccatttataagaaatctgcctccgtgagttactcgcctctaaccaggtcccacctccaacactgggaattacaattcaacatgagattagaggggacacacatccaaactatatcacatgcagatagtagaaaagagttatgatggaaaattgataagttaaatattagattttaaatgttaggaaaagtatgccttagtaaacacaaagcaagtagaaggaagaaagtaataaagataaatataggaataatggtatcaaatataaaggtaggatagagactctcaaaaccaacagctttattttttaaaaaagattaacaatataaactgacctcttaaaaaatttaccaagcagataaggaagagttaaacagagaaacaatattcacaatgaaaaggagaacataactgtaaataagtagagattaaaagagaaaaaaggaatcttctataagaaagtgcacggcaataaattttaaaactttccaaatggaatgtgttctagaaacaccataatttactgttttgggttgaattatgtcccgtcaaaattcatacattggagctgtagcccctgctacctcagaatgtgactatttggagatataaacatagtgttttaaaggtagggtctttaaagaggtaaattaaaatgaggcccttgggtgaaacctaatccagtctgactggtgtcctcataagggaagtaaattttgatgtagaaaggaataccaggggtgtgtgtgcacaaaggaaaggccacatgaggacaaagcagcaggaggatggccttctgctagccaaagagcaaggtctcaggagaaaccagacctgccaacaccttggtcttagacttcccactgtcagaactgtggaaagagaaatttctgttacttaagccacacggactatggtattttatatggcagccttagcaaagaagtagttactgtaagtgacttagaaagaaatagaataatgaaatagacttataacagttcttaagctttttattgttgttgttatttttgttgcctccaaggaagggaaaactatttaatttaaattctccctaatgtgagaaattaaatactaaagagtaacattttgttgggtagaattgagctttgaagggtcagaccttattgtaatagctaagattttttttgccccttgctctcttgagaaccaatttcacctccctaggaatgcataatcagtagcctttgaagaaagtaaatcatttttcagaaatcttactttttctcttcatcttctccaaaaagagaatagctctctagctagttagttaataggcacattttatcaaagcttaaaggaagatataactcctgccttataaaataggaaaagctcctcaataaattttatgagattggtataattttataaaagttgatgatgttagtatgaataaatcaaattttaaaccaggctcaatttttttttttcgtgtattcttttggaaacatggagaatgagaatgtaaatgagtcatggataaggtatcatgtaaagtttcacttggctacaaataaaagaaaacccatcgaacagtggtttcaataaataaaggactttttctttttttttttttttttattttgacggagtctcactgtctcccaggctggagtgcagtggcatgatctcagttcactgcaacctctgccacccagattcaagcgattcttctgcctcagcctcccaagtaactgggattacaggcacctgccactgcaccgggtaatttttgtgtttttagtagagatggggtttcaccatcttggccagggtgatcttgaactcctgacctcatgatccacccacctcaacctcccaaagtgctgggattacaggcgtgaggaaccatgcctggccaggatttattttatacacaaaaaatgctggggattggaagtgttttcctaggctttaacagtcatcaaggatatggattccttttctatccctctgctgtatttggcatgagacatttatccaaataatcataatataggtggtattcctctaggtatcatgtctacacttgtatgtaagaatcaaaaaagaagaggctttaaagaagtttcttggccaggtgcagtggctcacatctctaatcccaagtctttgggaggctgaggtgggaggatcacttgaagccaaaaatttgagaccagccttggcaataaagcaagaactcatcgctacaaaaatctttaaaaaataattttttttttttttttttttggagacagagtcttgctctgttgccaggctagggtacaatggtgtgatattggctcactgcaatctccgccttctgggttcaagcaattcccctgcctcggcctcccaagtagctgggactacaggcacgcactaccacatctggctaactttttgtattttagtggagacagggtttcaccttgttggccaggatggtctcgatctcctgacctcgtgatccgcccaccttgcctcccaaagtgctgggattacaggcatgagccaccgcacccagcctaaaaaacatacatattttttaagtttctagaagcttggtcccatgacatctgtataatctcattggccagaacttggtcacacaaccattcctgctgctgtggagccttatgaagttaaaaatcagggttttattatcaagaaaggaagagagaccagatattggtggtcagttagcatcatgtgccaggaccaggtagtgtttaatcttagaaatgcaaggatgatttaaaatgggaacatccgttagtgtaactcattacattagcaaattaaggaagaaagaaaaaccatataaccatttcaataggtgcataaaacatatttggcaaagaattcatcacctattcatgaaaagcattctaataaaatggaattttcttaatctaataaaatatatctaccaaaaatctgcagcagatatcacattagaatcagaccctttagtttgagggacaagaaaaggagatactgattatataaactccttttttttttttttttttttccagacagagtcttgctctgtcacccaagctagatggcagtggcatgatctcggcttactgcaacctctgcctcctgagttcaagtaattttcatgtctcagccacctaagtagctgggatcacaggcgtgtgccaccatgcgcaactaatgtttgtatttttagtagagatgtggtttcgcccacccagtagagatgggttttgcccagactgtttttgaactcctggcctcaagtgatccgcctgcctcagcctcccaaagtgctgggattacaggggaaagccactgcgcctggccactaaactcctatttaacattgtacaggtgacctagccaaagcaataaggcaagaagtaataggtgtggatggcaatggcagaaatgaaaaagtttgcatttctagtgaattaaaatgaatttctagtaaattgaaatgaattcttagataaactactaaaagtcattaaaaatatagttgtaaagctggatacatgatcaacatatggagagcaataattttatctatagagcagcaataactagtcagaaaattggtctaatgtaaagtaaatattatactctaaagtacctgggaaagaacctaatagcagatggacaaaattataaaacttggatcataaaatgaagatctaaataaatattagcataaataatgtcaatacacaagaatgcttaataatgtaaagatactgattcttgctatattattaatctctaaactcaacaaaatttccgtagacgtctcaacagatttttaatggaatttgagaaactcatcctaaaatttatttagaagaataaactgtaaaatacacaaggtgattttggagaaggaaaaatatgaagggagacttcctttacctgatataaaccccatacatccatggaaattcaacaatgtgatattagtatggtgctagacatattgtcagtggaacagaattgagggcccagaaatgacttatatacaccccctcccgacacacacatacgtatatggagttagatttatgaaagtgtaggctttccagagccatagggtgacctcttcaataaatggattttcattatttttataaaagatattggaagccactttttatgtgataatcagttcccaggtgtgaattgtgaaaggcacaaaggttatacttttagagcaagggtgttcaaactttttgatctcaaggtcctttatattcttaaaattttgagaacccggtagagtttttgtttgaccttatatgcttacatttgttttgtgtgtgtttacatcccttgatagttactatattagaaagtaaaagatacattgagtgtatttattttattaattttaaaataatccattacaggctaacataaatactgtatttttaataaaaataacttttccaaaataaaaataattgagtgaaaataatagcattgctttacatttttggaaatctctaaattttggcttaatagaagacacttggattctctacccacttttgccatcaatgtattgcaatattacgtatataatgtagccactagaaaactcatgttacgtttgtgagacaatgagaggcaaaatagttttaacttcatggtctcttaattttcctatatcacaatctgagaactactattggagaggaaattttaggagagcatatgtttctgatttcagggaagggaggctttcttcagtaagacataaaagtataaaatgcatacacacataaaatcaatttgatccattaaagtaacaatctgctcatcaaaaaacaacaataaacaaggtgaaaagaaaagccaagacttgagagaagacatttgtaacacaggtatctgacacaagatatgtatctagaataaagaactattacttatcaatttaaaaaaccctcaatttaaaaaacaggaaattaggacccctaattagggaaattcaaatttaaaccccgatcatatgccacttcacatgcatcagacttgtgtaacaagagttagataaccctacttatcagtgaaggatacaaagcattgataattctctgccctcttgaggtgggcataagttcttgtaactaatttggagagcaatttgacaatatctagtaaaattgaaggtgcacttggtgtacaattcaccagttcagcgtttagatgataccctagtgttatggtgttatgggatccttggggtgttgcttttctggccagaaacctctgtggccagtggcacctttgcccaagttttgctccagtccactgggctcattccacttggctcatgctaccaggctggatcccatgcctgccaaggatgagccagatgtggagtggtgaggggtgtatgagcaagtgtagggtctggacactgcacagtcaaatatgctagctgctgcaacggagtgggcagctctaggtgttggcatgggtgccagctctctgtgaggctgcagctggaccaggtgcactgtaagcagcttccacagctggcactggggaatgcagtggcacccagaagcttggagatgtcaggaaccacaggaccccaaagagggagtcagccctggctcagggagctcccacgtctgggctccccaaagggccacaatgtggcaggcaaggggcacgtttcagccctatttgtgttacagctcttttagccccaccattttatgggtcccatgttcttgtcctgygattgggaagagtgaggtatgcagtcaagtggagggtgagcaaaatgaagaagagctttattgagcagtggaacaacttagaggagacctgcagtgggtagcttctttctgcagccaggttatcctgataagtgttcaactcctagcagggaggagaccatggagtgggaagctcccctctgcaagcaggtcatcccatcatctctgcagctctcagcagagaggagtttctggagtgggttgctcctctctgcacctggttgtcctgacatctgcagtttttagcagagaggaagccttggagtaggtagctcctctctgcagctagtcatcccgatgcctgctcagctctggctgagcctggggcttttatgggcctcaggggtgaggaagtgcatgcccattggtccataggcaggctcaaaaaaggcaccacacgttctcaccccagtccacaggactggcagtccagccgccagccttcaggccctccctggcctgaaagtggggcctcaccaggaacctgcccccttctgcccaggaacctgtctgcctcctgcctgttcatggcacctaggctgtaggtgccaagagggcctgcaggccagtgccaggccgccctcaaccctgccttggcttcccttaggtgttcatcaatgcccagagtctggagggggccgaggctgcagggggctggcatgtttgcaccgccctgagcatgtgcacacttggctgggctgttatagcatctgggctcaaccctgactttgctccaagatcatagtgggtactgacagcagggagaagccaagcatcagtagcaggtacttccaagcctgcgagggcagggagggggtttcttgggcccccaagagtatagagatgcctgggtctgcagccacagtttgggcagccacagctgtgccagaggttcagggctcctgcctgctcttggcacccccaagagcacagagagacctgggtccacagccacaacttgggcagctgcagctgcaccagggagggcggggctcctgcctgctctgtggagcaggaggcctgggcccacagccacaacttgggcggctgcagctgcacccaggatggtggggctcccccctcctcccaggccccaagagtacagagataccctggtcttcagctgtggcttgggcggctgcagtggcatctggggagctcccacccaagctcggaaggggtgggactccctcctgttcctggctcccgccaaccccacagagcatgcagcccgggtgtacctacctgctgcagctggcgtgataacagcagccactccagatggcccaccgctgccatcactagcttagagctttcttactagggtaccacagacaggttacagatttgccatggtaatgagtcttcatcctaaaggtgttggtggggcctggacttagccatacctcactggccgataacctctggctgccaggagtcttgtccagttacttcaatgtatgtatagaaataatatttctatatgtaccatgatgtcaaaatgattgggaagctctttcctagagacatactaaaatttcattgcagcactgttgcattaaaaaactgttatggtaggattttaattcataaatgtagaaataaagagggaaatagaaaataacctttaggcaagaactggtgataattagtgtaaacaagatccactgataaatgctgaaattagtacataaaattatgaggagaaacaggatttatacatagttccaaagcatttccctcaagatatttattaactaccaagggaaaggtgataacattacaaagtaggagctactataactaagtgatcatggttgttaccaccagcaagaagatacattgacatcatgaatcctgtgctatggtgctttaagaaagtcacaacattatttctatgatattcttgccaaaaatgcattacttttgtccattcatgggaaagtattagacaaatcaaaattgagggacatgtggcagaataacataaaatttattgaggtcataagaaatgaggaatgagtgaggaagaaataagctaaggagaaatgacagtgaaatacaaggaggactaaaattacttcactttgggtatcagggagagagtttttgaagtaaatcaaggttacgcaaagctttgttgttcctgagcagttactcactgcaggtagggctcggttacactaaagagtgtgtgaaatcataaaaaccttaagcatttagctgtacaagacacaggggagaagaccttttaatcagcacttaccttcattaagacaaattaactgacaaatatctttttgaaacttggggaagagaaatcctgaaatgtttctagtggtaaaggaacagtaaatggaaatcatttgtatagtacccagtattactaatttaacatgtataacaaaaacttcctttaaacttagcatttgtgcttggtctgaattgttttactttagtgaacattcagtggtcatttataaactcagtatctccttatctaatttctccataataaatttcttgttaacaaattatattaccatagatgtttttaggagcctatccctcagaattgaggagttactatacagtttggttatactgatttattatactgattgtttttagtaacatatggagagagagttaaataattgtttgcttttggagttgcagtgaactaaaactgtattttatacaatataagtcccgctctatctctaacttgtttcttagcacacacaccttaaattttataaagtccattaagattttgatttttagtgcaatacttactctaattcaatctcaaacgttattgttgtatttcatttaactctgttttgaaagtatttcagatatttgcattattgtcttaatgatactcttaaaacatactgaaaacaccacagatgacatttggatctgactgttctagctctttccaattagaaatatttctctacatactttttgcagaagtggatatcaaaggtacatgctttcaaagcaaggtaacagaaattagaaattggtatgaagatgcaacaatgggctaacaacattgagtacataaactagagtcaggattgaaaataatacacagaataccctgaccatggaaatggttatgatatttatttatttatttggagatggagtttcactcttgttgcccaggctggagtgcagtggcgcgatctcggctcatagcaacctccggctcccgtgttcaagcgattctcctgtctcagcctcccaagtagctgggattacagtcatgtgccatcacacccagctaattttgtatttttagtagagacagagtttctccatgttggtcaggctggtctcgaacttctgacctcaggtgatccgcccacctcagcctcccaaagtgctgggattacaggcgtgagccaccgcacccggccgatctttatttttatattctagctagcaatgttatacttcctcaagaggccagttcttactaaatcatagtattatttgtgtgagaactacaagaagtttacatttctgagctcagagaagttatacaggaccacagtttcttatgtgaaaaaacatttagaaccaaatatgttttcgatttcaaaacttgctggatttaaataaaagtaatactgttttgataccttttattatatagtaaccccagcatggcttagggcagaatctgcacattaatatttttgcagtaagatgtatacatattcacacaaagtgaggaacataaggcagctaatctcatctcagttctgggttttgctgacaaatgagttaagaaaaaacaattggatttcagaacttgtggcattttagaattgcaaataagagatggtagacctgtgtactagttagaggtgagaaaaaaaacacacttggaacaaaaattaagagccgtggtcttggctctaagtatagtgagagttaggagaaattagagacttcactaagaaaagttttgaacgggggctgaaggaagattcatagaaaagtgttttcatttggaaatgagcaagactaatggccatccagcccaattagaacccaggttcctgtcggaggattgtggaataaatagagttctgtggggacagggtgggaagattatatagaggatttgaatgtcaaatatgagaattgtaatactctgtcagaattcacgaaacttttttgattaaagaagcaatgtgaaaaatagcagccttcctgtggaatgaatatggggttaaaaggaaacatagtagtgtcaaaagacaaaattgcaacaattcaaaagatctaattgacttattagtgactcatgaatcagtggcgtttcttccaaagatctagcaaaggctctccaatgaattatgcttaagaggttggcttcataggcagaaaagggctgaagaaagcagaaacagggaacaaaaagctgattggttgtttcaaagttactttccttataggattaaagtagaaaggacttctttatcatgccagctcagggaaactgggccccttctgattggctgctgtgaatctcctgcttttgtttgttcgtttttcttcagaaaactggcccttttcaatgttcagtttgactgtgtgtcacctagcataagtgactccattctggtttggtctggtttcttgggcctactgcaggagctcagtccaaatcaatgtcctcatataaattttattgaacagtagtcaaagttgatctcaagatttctagactgagagcctggaaaagagtggtctgatggggaaaaaagcagaattgaaaagtgcttcttggtggaagggtttagaacatactgtttaatgggaaattcaagtggaaatatttcaaagcaaaggtacaggttatatgtattcaggattagaatggaaaaatcactgaattgtaagcaggtattgtaaacatacgtggaaaatyctctctctctctctctctctctctctctctttttaagttgaggcaaggtctctctctgtcatccaggctggagtgcagtggcgtgatcacagctcactgtcctcagcctcccaggctcaagcaatcttcccacctcagcctcccgagcagctgggaccacaagcatatgttaccatgcccagctaattttttaattttttttgtacagacagtgtcttgctatgttgcctaggctggtcttgaacttctgggctcaagttaactggctgcctcagcctcccgaagtgctaggattgtaggcatgagacactgcacctagccacaaagctttaaacttagagacctgaaaaactatcaagtattttctgttgtgttataaaatctaaataactttgaagaccatgaaatagctaacatcatgaaagtgagcaggttgtttacacaggaaggtttcccttaaggtatataggcaaggtagcccgagttgggtaagctgaggggaccctgatcaatattcaaaatttaaaaaagtttactgtgggatgtactgttctacccttgggtgaagagattctggaataggtgcatgttttggagaaatctagaaataactcacactctcttctatttctgtgaggccttaacaccctggttgctctttccttcactgaaatgagggaggtatgcttgcccctgagggcaaatgtctctgttggggaggagaatgtaaacatcatggattcaggtgccccagccattcgtccttcatgagataacctgggtagacttatccctgatcaactctttatctctgtgtttgttgactctgagcatagagatttcctggaggccctagaaaacaaggaagcaccattttgagaggctgtggtttcctctgctttgatttctccaccagttccctcccatgtgctttctcccttcctgtagtttctgaaagtttctggtctactgatggaatctcaccttggctttctgtgttattgtttccttcttaaaagtatatacattatattaattatgtgtgtgtaggatgaaggtgagacatgtgtattaccatttcagaagggttttgtgttgaagggtaggcagatgcatgtattcagtttgccatattgaacctaacacgatgactaaatttcaaaccctgtaatcagaacctgtagcccacataagaaattgtccttattaaaataaaggaacgttattaactaagaattcaccataatcttggttttccatagtttcttttgagagtataaattttgtcacatgtctgaaatctttacatggaagctctgactcctggccctttggttggagcccacttccacctgtgagctttgagtttataacaatgtacctgtagctatacaaaaggcaggaggaagattggatttcaggataatgaataaactcagaacttaaggttgacccaacatggaactggcactttacagaacagataagtactttttttttaatatctaaagttttagacttatttaacatttcatagggacatttcagattacacatattatatctagtataaaaacaatgttttatacttgtcttagtgcttaagatgtatagtccttataaacaataatagatacattgttgaagaatgtatctattggatacattccattggagcattgagaagatttaaattttatttctatactgtatattagactctaagcttaagtgagcttaatattagaaaaaatatataatagtattcatagcaatataataattgttgcaggaagtcagggaccccgaacggagggactggctggagccacggcagaggaacataaattgtgaagatttcatgggcatttatcacttcccaaataatacttccataatttcttacatcagtctttattttaatctcttaatcctgttgtctttgtaagctgaggacgtatgtcacgtcaggaccactgtgatgattgtgttagctgtacaaattgattgtaaaatgtgtgtttgaacaatgtgaaatcagtgcaccttgaaaaagaacagaataacagcgatttttagggaacaagggaagacacccataaggtctgactgtctgcagggtcgggcaaaaaaagccatattttacttcttgcagagagcctataaacggacgtgcaagtaggagagatatcactaaattcttttcctagcaaataatattaatattaagaccctaggaaaagaattgcattccttggggaaggtctataaacggccactgtgggagtgtctgtcttatgtggttgagataaggactgaaatatgccctggtctcctgcagtaccctcaggtttattagggtgtggaaaaacctccctcccccctccccggtaaatttgaggtcagaccagttctctgctctcgaactctgttttctgttgtttaaaatgtttatcaagacaatacgtgcacagctgaacatagacccttatcagtagttctgttttgccttttgtcctgtttcctcagaagcatgtgatctttgttctcctttttgccctttgaagcatgtgatcttgtgacctactccctgttcttgcaccacctccccttttgaaatcctaaataaaacttgctggttttgcagctcaagtgggcatcatggtcctaccgatatgtgatgtcacccctggcggcccagctgtaaaattcctctctttgtactctttctctttatttctcagactggccaacacttagggaaaataaaagaacctacattgaaatattggggacgggttcccccaataaaatactggggacaggttcccccgagaaataatcacacgtatttcagtatattaaaaatgtgttgggagacaagtatgtatttggatttcaaatgttatctaattattctctttagtatctaatctaaatgtcctgttttttttttttttttttttttggagatagagtttcactcctgttgcccaggctggagtggcaatggggcgatcttggctcaccacaacctctgcctcctgtgttcaagcgattctcctgcctcagcctcccaagtagctgggattacaggcatacatcaccacgcctggctaatttttatttttttttattatactttaagttctagggtacatgtgcacaacatgcaagtttgtcacatgtgtatacatgtaccgtgttggtttgctgtacccattaactcgtcatttacattaggtatttctcctaatgctaccccttccccatcacaccaccacatgacaggccccggtgtgtgatgttccccaccctgtgtccaagtgttctcattgttcaattcgcacctatgagtgagaacatgtggtgtttggttttctgtccttgcaatagtttgctgagaatgatggtttccagcttcatccatgtccccgcaaaggacatgagctcatccttttttatggctgcatagtattccatggtgtatatgtgccacattttcttaatccagtctatcattgatggacatttgggttggttccaagtctttgctattgtgaatagtgctgcaataaacatgtatctgcatgtgtctttatagtagcatgatttataatcctttgggaatatacccagtaatgggatggctgggtcaaatggtatttctagttctagatccttgaggaatcaccacactgtcttccacaatggttgaactagtttatactcccatcaacagtgtaaaagtgttcctatttctgcacatcttctcctgcatctattgtttcctgactttttaatgattgccattctaactggtgtgaggtgatatctcattgtggttttgatttgcatttctctgacgaccagtgatgatgagcattttttttcatgtgtctgttggctgcataaatgtcttcttttgaaaagtgtctgttcatatcctttgcccactttttgatggggttgtttaatttttttcttgtaaatttaagttctttgtagattctggatattagccctttgtcagatgggtagattgcaaaatttttctcccattctgtaggttgcctgcttactctgatggtagtttcttttgctgtgcagaagctctttagtttaattagataccatttgtctattttggcttttgttaccattgcttttggtgttttagtcattaagtccttgcccatgcctatgtcctgaatggtattgcctaggttttcctctagggtttttatggttttgggtcttatatttaagtctttaattcatcttgaattaattttcctataaggtataaggtataaggaagggatctagtttcagctttctgcgtatggctagccagttttcctagtaccattaaatagggaatcctttccccatttcttctttttgtaaggtttgtcaaagatcagatggttgtagatgtgtggtattatttctgaggcctctgttctgttccagtggtgtctatctctgttttggtaccagtaccatgctgttttggttattgtagccttgtagtatagtttgaagtcaggtagcgtgatgcctccagcttcattttttttgcttaggattctcttggcaatgcgggatcttttttggttccatatgaactttaaagtacttttttccaattctgtgaagaaagtccttggcagcttgttagggatggcattgaatctatgaattaccttgggcagtatggccgttttcacaatattgattcttcctatccatgagcatggaatgttcctccatttatttgtgtcctcttttatttcatttagcagtggtttgtagttttccttaaagaggtccttcagatcccttgtaagttggattcctgggtattttattctctttgtagaaattgtgaatgggagtttgctcatgatttggctctctgtttgtctgttattggtgtataagaatgcttgtgatttttgcacattgattttgtatcctgagactttgctgaagttgcttatcagcttaaggagattttgggctgagacagtggggttttctaaatatacaatcatgtcatctgcaaacagagagaatttgacttcctcttttcctaattgtatatcctttatttccttctcttgcctatttgccctggcccgaacttccaacattatgttgaataggagtggtgagagagggcatccctgtcttgtgccagttttcaaagggaatgcttccagtttttgcccattcagtgtgatattggctgtgggtttgtcataaatagctcttattattttgagatacattccatcaatacctagtttattgagagtttttagcatgaagggctgttggaatattgtcaaaggccttttctgcatctattgagataatggtgtggtttttgtctttggttctgtttatgtgatggatacgtttaatgattcacatgtattgaaccagccttgcatcccagggatgatgccaacttgatcgtgttggataagctttttgatgtgctgctggattcaatttggcagtattttattgaggatttttgcatcgatgttcttcagggatattggtctaaaattctcttttttttcttgtgtctgccaggctttagtatcaggatgatgctggcctcataaaatgagttagagaggattccctctttctctattgattggaatagtttcagaaggcatggtaccagctgctccttgtacctctggtacaattcggctgtgaatccatctggtcctggactttttttggttggtaggctattaattattgcctcaatttcagagcctattattgatctattcagctattcagcttcttcctggtttagtcatgggaggctgtaggtctccaggaatttatcaatttcttctagattttctactttatttgaatagaggtgtttgtagtattctctgatggtagtttgtatttctgtgggatcagtggtgatatcccctttatcatttttattacatctattcttacatctattttttacatctatgtaattattacatccatgtaatacatttattacatctatttttattacaatctattctatacattgattcttctctcttttcttctttattagtcttgctagtcgtctatcaattttgttgatcttttcaaaaaaccagctcctggattcattgattttttgaaggattttttgtttctctatctccttcatttctgctctgatcttagttatttattgccttctcctagcttttgaatgtgtttgctcttgcttttctagttcttttaattgtgatgttagggtgtcgattttggatctttcccagtttctccgataggcatttagtgctataaatttccctctacatactgctttaagtgtgtcccagagattctgttacgttgtgtctttgttttcgttggtttcaaagaacatctttatttctgccttcatttcgttatgtacccagtagtcattcaggagcaggttcttcagtttccatgtagttgtgcggttttgagtgagtttgttgatcctgagtcataagttgatcacactgtggtctcagagacagtttgttgtgattgttgttcttttacatttgctgaggagtgctttacttccacgtatgtggtcaattttgtaataagtgcgatgtgttgctgagaagaatatatattctgttgatttggggtgtagagttctgtagatgtctattacatgcaattgttccagagctgagttcacatcctggatatccttgttacccttctgtcttgttgatctgtctaatattgaccgtggggtgttaaagtctcccattattattgtgtgggagtctaagtctctttgtaagtctctaaggacttgctttatgaatctaggtgctcctgtattgggtgcacatatcatatatttaggatagttaggtgttcttgttgaactgatccctttaccattatgtaatggccttctttgtctcttttgatctttgttggtttaaagtctgttttatcagagactaggattgcaacccctgcttttttttgttttccatttgcttggtagatcttcctccatccttttattttgagcctatgtgcgtctctgcatgtgagatgggtctcctgagtacagcatactgatgagtcttgactctttatccagtttgccagtctgtgtattttaattggggcatttagcccatttacatttaaggttaatattgttatgtgtgaatttgatcctgtcattatgatgcttgctggttattttgcctgttaattgatgcagtttcttcctagcatcgatggtctttccatctggcatgtttttggagtggcttgtactggttgttcctttccatgtttagtgcttccttcaggagctcttgtaaggcaggcctggtggtgataaaatctctcagcatttgcttgtcagtaaaggattttatttctccttcacttatgaagcttagtttggctggatatgtaattctgggttgaaaattcttttctttacgaatggcgaatattggcccccactctcttctggcttgtatggtttctgccgtgaggtctgctgttagtctgatgggcttccctttgtgggtaacccgacctttctctctggctgctgttaatattttttccttcatttcaaccttggtgaatttgacaattatgtgtcttgaggttgctcttttcgaggagtatctttgtggtgttctctgtatttcctgaatttgaatgttggcctcccttgctaggttggggaagttctcctggataatatcttgaagcgtgttttccacttggttccattctctatccctttcaggtacacgaatcaaacgtagatttggtcttttcacatagtcccatatttcttggaggccttgttcgtttctttttactcttttttctctaaatatctcttctcacttcatttcattcatttgatcttcaatcactgataccctttcttccacttgatcgaattggctactgaagcttgtgcatgtgtcacgtagttcttgtgccatggttttcagctccatcagatcagttgaggtcttctctacactgttkattctagttagccattcatataatcttttttcaaagtttttagcttccttgcaatgggttctaacatcctccgttagctcggataattttgttattaccaactttctgaagcctacttctttgaactcgtcaaagtcattctccatccagcttttttccgttgctggtgaggagctacggttctttggagaagggtcactcctgtttttagaactttcagcttttctgctctggtttctccccgtctttgtggctttacctacctttggtctttatgatggtgacctacagatggggttttggtgtggatgtccttttcgttgatgtcgatgctattcctttctgtttgttagttttccttctaacaggcccctcagctgcagctctgttggggtttgctggaggtccactccagaccctgtttccctgggtatcaccagtggaggctgcagaacagcaaatattgcagaacaacaaatamtgctgcctgaaccttcctctggaagctttgactcagaggggcacccagctgtatgaggtgttagtcagcccctactcggacgtgtctccaagttaggctacatgggggtcagggacccacttgaggaggcagtttgtctgttcttagagggcaaacactgtgctgggagaaccactgccctcttcagagctgttggactgggacgtttaactctgcagaagtttcagctgcctttttttcacctatgccatgcccccacaagtggagtctacagaagcaggggtcctccttgagctgtggtgggctccacctatagcttcctggctgctttgtttacctactcaagcctccacaatggtggacccccctcccccagccaggcttgctgccgtgcagttcgatctyggactgccgttctaacagtgagcaaggctccatggccatgggacccgctgagcaaggtgcaggatataatctcctggtgtgccgtttgccaagaccagtggaaaagcacagtatttaggtgacagtgtcccaatttttctggtacagtctgtcaaggcttcccttggctaggaaagggaaattccctgaccccttgcacttcctgggtgaagcgatgccccaccctgcttcagctcgccttccgtgggctgcatccactgtccgactattcccaatgaggtgaaccggttatctcagttggaaatgcagaaatcacccgtcttctgtgttgatcatgctgggagctgaagaccggagctgttcgtattcggctgtcttggaatggacccctaatttttgtattttttagtaragatgagtttctgcatgttggtcatgctggtctcaaactcccaacctcatgtaatccctcccctcagcctcccaaattgctgggattacaggcatgagccaccacacccggcctatgtcctgttattgagtatgtccttatgtttcatttctttttcttttaggtctcttttattcaaaaccttgtattttgtgtggaaagagtttaccgtgtgcctgactttggtgtctgggaaagaggaagcaaatataataatggcagcacagagctacattcgaggtaatttgctgatttctgaggttttttttttaaattaaatgtatggaatttgaatatgaagaaatactgaagcattagattggaactgtgattcatatgttaatttgtagcaatttttttctacctatgatgcagatggaagtcacttaaaattaacacaaaagagcccatcctcagtacccataaacagatgcaagaaagaagtaggtgtctttcccaacctcccaaggtgtcagtacatgcatgtcagccctcatcattaatccacagcttggcctttctgctcaaccaagtcattttctttttcctctttgaaattacctcatttgaaatgtcaagtacattaaaattttcaaacaccagttgtatatgcactgaatataaaatttccttccatgttatagagctgatttttatcctgaccacggatgcttacactgttcacataaaacttaacattcattgttaccagtaaggtgtgtgatcaacatcttgagctgtggtttactgcgtttgaataagcaacaatagctgataactgatgttagtagtttatgaatttcttttaatccttagggttaaggaagtagctttagtgactgattgtacctttcctaaatcctagttttatgcctaggaratcatattttaataacaaaataatatagttcaataagtcctatccatgttgcactaaaaratgtaaraatttaagctaaaagttatcactgtcagtttggattattgggacttaaawtaagtaaagaaacagtctagaggctgggcacggtggctcacgcctgtaatccgggcactttgggaggccgaggtgggcagatcatgaggccaggagtttaagaccagcgtggccaacatggtgaaaccctgtctttaccaaaaatacaaaaagtagctgggcatggtggtgcgtgcctgtaatcccagcaactggggaggctgaggcaggagaatggcttgaatccaggaggtggaggttgcagtgaaccaagattgtgccactgcactccagcctgggtgacagagcaagactccgtctcaaaaaaaaaaaaaaaagaaacactgtagaaaacactggttgagaggaacccaaagtgttctctattttatgatagactaatcacacacacaaaaataagatgacataagatatttagtaaatcaaaaaccagctccagatcactagctgtgtaaccctcaacaagttatgtgacctttttatgattcagttttctcatctgtaaaataaagataataatttctactttatgtcattgttataataattgttgtcattgttgtaatagtatatataaagcatttgaatgtgtagcataagaactagaatgctagtgtacttacacatttaggaacattttaataaaaaataaaaaatatttaaattaaaaggactttcagattaatccttaactgacgtggaaacctttttctttaggttttgtgattcatgtgaggaatttttacagtatagaccagaatagtatcaatcaatgaaaaagtcagtgaagtagaggaataatttgtggtaaagctcatttcagacattaaacagattctggcaaatactaaaattaaatagatgatgttataattcagccctcatccaaattaagttctcaacattccagattatcactcaaattataagaaatttgatctgataagatgatttttaaaatttaccttttcagtacatatgattatcagatatcttccttgtttcttaataagcatttaatatatgtcwgtctgaccccattgccatattttcagcgtgaaatatttggaatagaagtttttctgtttataaaaactgcagtaggccagatgcagtggctcacacctgtaatccaacactttgggaggccgaggcgggcagatcacctgacaccgggggtttgagattggtctgaccaacatggtgacaacctgtctctacttaaaaaaaaatacaaaaattagcctggcatggtggcatgcgcctgtaatcccagctacttgggaggctggggcaggagactctcttgaacctgggaggtggaggttgcagtgagccgagatcgtgccactgcactccagcctgggtgacagaatgagactccatcacaaaaagaaagaaaaaaaaatgctaacctgtagtaaactcagaaagaaccttaaataaaagttaytactgaccctagaaagtgaggatgtcagaaggtccctggtgacaaaacaggctccaacttgtattcctataactgaggtggcagtctttaaattgattcattaaggtttttatttgaaggcttgaaaaatcattatgtgatttttttttgccatcgtttgcatgcaaaattaatctttttgtagtaggccgattttgttcaaatggatgagagatgaagtttgtcgtttaagtttggatgatgggttttatactttatttgacattgatgttctacttgtccatggtataacactttaaaattccccaaaagaactttaaccttaattttttatttgaaagtttccaaggtcaggtcttcacaagcctgttttgaatctatcacctctgatgtccaaaggatacattttgaaactgcgagagagttgaactccatgtgctcacggaggtagtgatggctgtggtagtgggcggccagtatccttctgtgcttaggcctgtgtagtggaatgtagagctgctactagcctgggatcaagtcacacctcttagtctgtctctgctgtaggataccccagatctatttgggattaattggatctattctttactgtttagtgcagtatccttgttatatcctgaaactgttctcataatttcagacagcttgaattaatacatagtaatacttgccataagtacttacacttccctttgtagtctgacactttctctgccgctctcctttctctgtgctatacagtcatctgtaccaggagtcagagagaaaacagagcataatctgagtgttgccttggtgctcactagggcctcagctgaagtgactggctcttcctttccttgccacactgagtacatcccttctaagctgtgaatccattttgtcctgggcttttgttggttggtaggcttttattggttattggctgttacgaggatgatcctggcctcataaagtgagttagggaggagtccctcttttctgttgtttggaatactttcagaaggagtggtaccagctccactttgtacctctggtagaattcaggtgtgagtccgtctggtcctggggtttttttggttggtaggctattaattactgcctcaatttcagaacttgttatcagtctattcagggattcgacttcttcctggtttagtcttgggagggtgtatgtgtccagcaatttatccatttcttctagattttctagtttatttgcgtagaggtgtttatagtattctctgatggtaatttctatttctgtgggatcagtgatgatatctcctttatcattttttattgtgtctatttgattcttctctcttttcttctttattagtcttggtagtggtctatttcgttaatcttttcaaaaaaccagctcttggattccttgatttttttgaagggttttttgtgtctctatctccttcagttctgctctgatcttagttatttcttgtcttctgctagcttttgaatttgtttgctcttgcttctctagttcttttaattgtgaagttagggcgtcgattttagatctttcccactttctcctgtgggcatttggtgctataaattttcctctaaacacggctttagctgtgtcccagagattctggtacattgtgtctttgttctcattggtttcaaagaacttatttatttctgccttcattttgtaatttacccagtagtcattcaggagcaagttcttcagtttccatgtagttttgtggttttgagtgagtttcttaatcctgagttctaatttgattgcactgtggtttgagagacagtttgttatgattgccattcttttgcatttgctgaggagtattttacttccaattatgtggtcaattttagaataagtgcgatgtggtgctgagaagaatgtatattctgttgatttggtggggagagttttgtagatgtctgttaggtccacttggtccagagctaagttcaagtcctgaatatccttgttaattttctgtctcgttatttgtctaatattgacagtcgggtgttaaagtcttccactattattgtgtgggagtgtaagtctctttgtaggtctctaagggcttgctttatgaatctgggtgctcctgtattgggtgcacatatatataggatagttagctcttcttgttgcattgatcactttaccattatgtaatggccttctttgtctttcttgatctttgttgatttaaagtctgttttatcagagactaggattgccaccctgctttcttttttttctttccatttgcttggtaaatactcctccatccgtttattttgagcctatgtgtctttgcacatgagatggatctcctgaatacagcacactgatgggtctttactctttatccagttttccagtctctgttttttaactggggcatttagcccatttacatttaaggttaatattggtatttcagaattggatcctgtcattatgatgttagctggttgttttgcccgttacttcatgcagtttcttcatagtgtcgatggtctttaccatttggcatgtttttgcagtggctggtattggtttttcctttccatatgtagtgcttccttcaggagctcttgtaaggcaggcctggtggtgacaaaatctctcagaatttgctcgtctgtaaaggattttatttctcctttgcttatgaagcttagtttggctggatatgaaattctgggtttaaaattcttttctttaagaatgttgaggccgtggtggctcacacctgtaatcccagcactttgggaagtcaagtcaggtggatcacaaggtcaggagttcgagaccagcctggccaagatggtgataccttgtctctactaaaaatacaaaaattagccgagtgtggtggcgggtgcctgtaatcccagcaattcgggaggctgaggcagagaattgcttgaacccattgaaatcaagaggcagagtttgtggtgagccaagattgtgtcactgtgacaaagaccccatctcaaacacacacacacacacacacacacacacacaccaaaaaacaaagaatgttgaatattgatccccactctctcctggcatgtagggtttctgcagagagatctgctgttagtctgatgggcttccctttgtgggtaacccaacctttctctctggctgcccttaacattttttccttcatttcaaccttggtgagtctgacaattatgtgtcttggggttgttcttctcaaggagtatctttgtggtgttctctgtatttcctgaatttgaatttgttcagtcttgctaggttggggaagttctcctggataatatctcgaagagtgttttccagcctggttccattctccccattactttcaggtacaccaaccaaacataggtttggtctttccacatagtcccatattttttggaagctttgttcattccttttcattattttttctctaatcttgtcttctcgctttatttcattaagttgatcttcaatctctgatatcctttcttccgcttgatcgattcggctcttgataacktgtgtatgtgtcatgaagttctcgtactgtgtttttcagtttcgtcaggtcatttatgttcttctctaagctggttattctagttagcaattcatctaacctgttttcaaagttgttagcttccttgcatttggttagaacatagtcctttagctcagaggagcttgttattacccaccttctgaagcctacttctgtcagttcatcaaacattctccatccagttttgttcccttgctggcaaggacttgtgatcctttggaggagaagaggctaatggtttttggaagtttcagcgtttttgcactggtttctccccctgttcgtcgatttatctacctttagtcttttatgttggtgaccttcagatggggtctctgagtggacatcctttttgttaagatattgatgctattcctttctgtttattagttttgcttctaacagtcagggccctctgccacaggtctgctggactttgctggaggtccactccagaccctgtttgcctgggtatcaccagcggaggcwgcagaacgtcaaagattgccacctgtttcttcctctggaaggtttgtcccagaggggcacccgccagatgccagctggatctctcctgtatgagatatctgtcggcccctgctgggaaatgtctcccagtcaggagacacaggtgtcaggaacccacctgaggaggcagtctgacccttagcagacttgaggtccactgctctcttcacagcttgcaagaagggacgtttaagtctgctgaagctgcgcccacagctgccccttccctctgtcccagggagatggaagttttatgtataagcccctgactgtggctgctgcctttttttcagagatgccctacccagagaggaggaatctagagaggcagtctggctacagcagctttgctgagctgtggtggactctgcccagttggaacttccccatgactttgtttacactgtgaggggaaaactacctactcaagcctcagtaatggtgtacgcccctttccccaccaagctggagtgtcccaggtcaacttcagactgctgtgctggcaacgagaatttcaagccagtggatcttagcttgctgggctctatgggggtgggatctgctgagctagaccacttggtgccctggcttcagccccctttccaggggagtgaacggttctgtctccgcggagttccaggtgccactggtgtatgaaaaaaatctcctgcagctagctcggtgtcttcccaaatggccacccagttttgtgcttgaaacccagggccctggtggtgtaggcacctaagggaatctcctggtctgtgtgttgcaaagactatgggaaaagtgtagtatctgggccagattgtatcgttcctcgcagcatagtccctcaccgcttcctttggctaggggagggagttccctgaagccttgcatttcctgggagaggcgacgccccaccctgcttcagctcgctctctgtgggctgcacccactatctaaccagtcccagtgagatgagctggatacctcagttggaaatgcagaaatcacccgccttctgcattggtcttgctgggagctgcagaccagagctgttcctatttggccatcttgccagactcctgacttttagctttttaaagtggttttatgttctattctcttcgcttttctaataaagaaagccatcactaaaatatcagataaataacaatcatagcaccactttactcagtttaagaggctttcagtgacccttttattccatatggtgcttattacttaaggtaactacttagtcttcttaagtcatttttgatattttcttcatcgaactatgatagaagctactgtccaaccattctgcttcattttatgtatctttgccatactgaacaattcacttgtattttttgaaaccatagtactgtgaagtccttgttcttctaggaaatgtgattggtagctcagggatttaaaacagtgttaatgaacagaagattgtgaatttagttctcatgcctgccagttacttttgtgaattccatggtaggtgtgaaattaaatagatagacctatcttttccataaaagctttgatttatgcaacaaatcactatctcccaaacaaatgttgctttattttagctctcttcagtgaatattagaataaagatgttaaggtaccatcttgcaataatcaaatcagtcaatgttctattgatattagtcatctgctattaatatgttcaatagcttataatagaataatttagtttcttgagagtgtcttgtaccattaaaatattttgaatttcttacaacaatatatattgccaacaatagaaattgccattaaaatgtaagatcatgttggcttaggattgacttggcgatgtgggctcgtttttggttccatatgaactttaaagtagttttttccaattctgtgaagaaagtcgttggtagcttgatggggatggcattgaatctataaattaccatgggcagtatggccattttcacgatattgattcttcctacccatgagcatggaatgttcttccatttctttgtatcctcttttatttcattgagcagtggtttgtaattctccttgaagaggtccttcatgtcccttgtaagttggattcctaggtattttattctctttgaagccattgtgaatgggagttcactcatgatttggctgtttgtctgttattggtgtctaagaatgcttgtgatttttgtacattgattttgtatcctgagactttgctgaagttgcttatcagcttgagattttgggctgagacaatggagttttctagatatacaatcatgtcatctgcaaacagggacagtttgatttcctcttttcctaattgaatgccctttatttccttctcctgcctaattgccctggccagaacttttaacactatgttgaataggagtggtgagagagggcatccctgtcttgtgcccatattcaaagggaatgcttccagtttttgcccattcagtatgatattggctgtgggtttgtcatagatagctcttattattttgagatatgtctcatcaatacctaatttattgagagtttttagcatgaagcgttgttgaattttgtccaaggccttttctgcatctattgagataatcatgtggtttttgtcgttggttctgtttatatgctggattacatttattgattttcatatattgaaccagccttgcatcccagggatgaagcccacttgatcatggtggataagctttttgatgtgctgctggattcggtttgccagtatttcattgaggatttttgcatcaatgttcatcaaggatattggtctaaaattctcttttttggttgtgtctctgccaggctttggtatcaggatgatgctggcctcataaagtgagttagggaggattccctctttttctattgattggaatagcttcagaaggaatggtaccagctcctccttgtacctcaggtagaattcgrctgtgaatccatctggtcctggactctttttggttggcaagctattgattattgccacaatttcagatcctgttattggtctattcagagatgcaacttcttcgtggtttagtcttgggagggtgtatgtgtcaaggaatttatccatttcagaaatatagatcaatggaacagaacagagccctcagaaataatgccgcgtatctacaactacttgatctttgacaaacctgagaaaaacaagcaatggggaaaggattccctatttaataaatggtgctgggaaaactggctagccatatgtagaaatctgaaactggatcccttccttacaccttatacaaaaattaattcaagatggattaaagacttacacgttagacctaaagccataaaaaccctagaagaaaacctaggcattaccattcaggacataggcatgggcaaggacttcatgtctaaaacaccaaaagcaatggcaacaaaagccaaaattgacaaatgggacctaattaaactaaagagcttctgcacagcaaaagaaactaccaccagagtgaacaggcagcctacaaaatgggagaaaattttcgcaacctactcatctgacaaagggctaatatccagaatctacaatgaactcaaacaaattgacaagaaaaaaacaaacaaccccatcaaaaagtgggcaaaggacatgaacagacacttctcaaaagaagacatttatgcagccaaaaagcacatgaaaaaatgctcaccatcactggccatcagagaaatgcaaatcaaaaccacagtgagataccatctcacaccagttagaatggcgatcattaaaaagtcaggaaacaacaggtgctggagaggatgtggagaaataggaacacttttacactgttggtgagactgtaaactagttcaaccattgtggaagtcagtgtggcgattcctcagggatctagaactagaaataccatttgacccagccatcccattactgggtatattcccaaggaattataaatcatgctgctataaagacacatgcacacatatgtttattgcggtactattcacaatagcaaagacttggaaccaacccaaatgtccaacaatgatagactggattaagaaaatgtggcacatatacaccatggaatactatgcagccataaaaaatgatgagttcatgtcctttgtagggacatggatgaaattggaaatcatcattctcagtaaactatcgcaaggacaaaaaaccaaacactgcatgttctcactcataggtgggacttgaacaatgagaacacatggacacaggaaggggaacatcactctggggactgttgtggggtcgggggaggggggagggatagcattaggagatatatctaatgctaaatgacgagttaatgggtgcagcacaccagcatggcacaggtatacatatgtaactaacctgcacgttgtgcacatgtaccctaaaacttaaagtataataataataaaataaaaataaatttaaaaaaatgtgaggtcatgttatgattgtgtttgggtttctaaatagcttgctgttgccagagatttgaataactagtggataataaattaacatatttgtgaattttactctagttcagatacagtatttgtttctgtcttttgtttgtttttgttgttttgagacagagtctcactctgttgctctggctggagtgcagtggtgcgatcttggctcactgcaacctctgctcttgggttcaagcaagtctcctgcctcagcctctctagtagctgggattacaggcatgtgctaccaagcctggagaatatttgtatttgtagtagagacagggtttcgccatgttggccaggctggtcttgagcccctgacctcaagtggtcttgcccaccttggcctcccaaagtgctgggattacaggcatgagccactgtgcccagccttgtttcttttaaaatgccacatttagatgacaatttccaaattcatcccatagctgtttttttataccattaaagacagaaccttggactggctacattgtgtttctaagtactgaatttcatatgtgttcgccttttgaataagttattttctctttacatttcaaaatactgtaaatatttaataaaatatgtacctcacactgtaggaggaagttttatggtattactgggttaactgaatgtaagtttttatgcattggggcctaagggagctcctgggtcatcgggaacacattcttaaggaagaaagcaagttaacaatgaatgtttttacacaaacagtccaaatatacaaccccaaggggcttttctaacccttagggtctaaggctctaaaattcttgttccagtactaccgtaatttggttactattttacagtattcaaaattgtaattggcctaattgttctgggtacatggtagagttagcaaactgacttaagcttttttccagttacctattgttgcaaataaacccaaacttagaggcataaaaacaacaacaatcttttattattattgtcttacattattatttattattaagatggtagactgggttaagctaggcagtttttgctcagggtctctaatgtgtttgtcatcattgtgactggggctgggcttatcttgaaggctttgtcactcaggtatctgagtgttgactaagaccttggcaggacctgtccactggaaggcctatgtgaagtttttccatataggcttcctaacagcatggtggctgggctccaaggcccagaatcccaggcagagagttaggtgggagctgttttcctgtctatgacctagactcagaagtcatgcagtgtaaactccaccacatcctatttgttagagtcactaaggccagcccatagtctagcaggggatattagactccatctcttgatggggaggagtgtcaaagaatttcagatgtgctttaaaccaccacgggtccttcacttggattttactcctttaggttccagcccttgttatttctctccaaaaaaaactttggacctgcaaagagcctgctgccattagtgtgctaacagtaccatatgaattgtcatgaaatttgtttaacctgtggaagcaagtacttccttcactggcagggaaccttcactagcagtgatatgctaggctgcagattagattcattaggatagtatcttaaatccagattattggctcaattattcttgaaaaatcagggtaaattggtcagcatagattctagtagggtacaaagttttcaccaaagagcagaagtaagagtggattttaaagccgctctgggcttgttccctcatcttaaaagtagaggagattaacaaaagaagtgtaagacttgtataggttcttgtacttgtatattgaaaactgcaaagaaatgttgagagatattaaaggagacctaaataaatggaaagacatcctatgtttatgtaatctatgtaaaaaatccaactatctttgttgcagaaattgacgagctgattataaaatgcacaggaaaggttagggaaccaggctagccaaaacaacctcgaaaaagaacagaactggactcacacttttcaatttcaaaacttactgcaaagctacaataattaaaatagtgtggttctggcataaggacaaggagatcggtgaaacagaattaagagtacagaaataaacccacacatctgtaatcaatcgattttcatgaatgtgcaaagacaattcagggggaaaggatagttttcaacaaatagtgctgggacagctggatgtccacatacagaggaatgaatctggacccctatttcacaccatatacaaaaattaatatgaaagagatcaaagacctatacctatatgtaagagttaaaagtatagaattcttttttactccaaaaatttatatatttattttatatcaattgaaaagtaataatatgttatgatagggatggaaagatagaagatatattttgtgggaagatttttgcaaatatgtatatatggtataaggaaaaggaaaatgggatgacctgggatgttggaaggtgctcattcggtgttcaactaaaaacaagtgatttaaaaacatgatccatggtggttgtcttagtttaaggtgccacatgttcattcttttgccaagaaatttacttatttttggaaagaacctgaggatttaatccaaattcagcaaaattctgcaaacattttgggaaaattgttctcagtggaatactttaggaaatgaaagaaaagraagagtcaaatgtgactatggagatttgaatcttcagtaacttaaaaaacagtgggcaggtagctgggtggacccattccagatgggcctgggcatcattgtacagttgtgattttcttgtaaaccaccatgactctcactggcttggattaaagaggttgctctgttttcactaaagccttctggctattatcacaactctgagttcttcccaaagaggaaagtgatgtcttttccaaatatcatgaggcggttttcaatgagaaattgtacaagagaaaccttttttgtgaattctcttttttaaagtcagagtcatcacactggactttttgtgaatgcattttctagttttgagctgcaggaagtggacagctgaaraatgcttggggctatacatgttgataaattataagcttttatctgattggatgaggaatattcagtgtgtacactccaaaaaggtatctcaagagaacaacattggcagctggtctaaaagcctctggatagcaattattttctcctcttcattcccttgatgaatacaccaagccattcatcatagagactggatgaaaatatacttccttggatattctttcatttaagaatgatgtttccagaagaatggactcaaattgtccaagttcactttatctgcagaatttagtttctcctttagggctcgatatgattttatatttgccaattttctgaagataccttctgttgagtggccctttttggttgctttttaaaaaggcatatccagagaggggtgggtatgttgtcattctcacaaacatctgtgagagaagctccaaagagctggcctagctttaaggctggtagagtcatgcataggttgtcctggcaagtgttagacccctgccaaaagaagggctcctgaaagatggaaggagagatggagttcactgtccctgtggcaggagcataatggcttgaggatggctcattttaattctgtaagaatgcttgtgcccaatgagtggacatggggcctttttcatgccagaagtgacccacagctggtaatcttcagagcccaaaatgtggccacgaagttcgccatgggccagcccaagagaagggacctcccagtagagatgtggccattccccactttgtccacatagctagctgtccacaggttgttcagcactattttattttttatcttaaaggatttcctgcacttggtagacaaaagcaacaaattgctgaacaaaaagagatgcagcttctgcctcctccagcctctgttgagttgagaatcagcagggtaagatcagcaccctccagtgatgtggttttgtcattgtgggtgtccatcttggaaaaaggactttcccttagttaaaaatacattattgcttaaacatgctaacagtcatctgaaccttcagtgagttgtaaacttcttgctgatggaaggtcttgcctcagtcttgatggctgctgactgatcaggctgatggttgctgaagattggaatggctgtgacactttctcaaaataagacaacaatgaagtttgccacattgaaggactcttcctttcacaatagatttctctgtaacacatgatgctgtttgatagcattatacccacattagaacttttctcaaaatcagagtcagtcctcccaaaccctgccactgctttatcagctaagtatgtgaagcattctaaatcctttgttgtcaactcaataatattcacagctgtttaccaggggtaaatttcatctcaagaaccactttctttgctcatccataagaatcaattcctcatccattcaagttttatcttgagtttacaggaatttagtctcattttatggtccacttctaattctagttcttttgctatttccaccacatctgctcactcttcttccattgaagtcttgaactcctcacgcttatccatgacatttggaatcagcttcttccaaactcctgttagtattgacattttgacttcctctcatgaatcttgaatgttcttagtggcatctagaatggcgagtccttccctgattttcagtttactttgctcaaatccatcagaggaatcactatctatggcagctgttgccttgcaagacatttcttaaataataaaacttgaaagtaaaattaatccttgatccatggaactgcagaatgaatgttgtgttagtagaaatgaaaacattaatctccttgtgcatctccattagagctcttggataaccaggtatattgtcaataagtagtaatattttcaagggaatcatttttttctgagcatcaggtcttaccagtgggcttaaaatattcaggaaaccatgctgtaaaaagatgtgctgtcattcagactttgttgttccatttctagagcatagagtaggtttaacattctttcttaatatttgaaccctactttctttttttctttttccttttaaaattgtatttctatttagggatacaaatggtttttggttacatggatgaattttatactgaggaagtctgggcgttaagggtacccatcacccaaataatgtacattgtactcagtatgtaattatttatccctcagccccctytcaccctccagtyttytgagcctccagtgtcccctataccattctgtatgcctttgtgtacccttcatttagctcccacttgcaagggagaagatgtggcatttggtttttcattcctgagatacttcacctaggataaggcccccaattgcatccagattgctgcaaaagacattatttcattcttttttttttttttttttttggctgagtagcaatccatggtgtgtgtgtgtttgtcacatttttttttaatccacttatgggttgataggcacttaagttgattctatgtctttataattttgaattatgctgtgataaatatacacatgcaggtatcttttttatataatgactttttttcctttggtagatacccagtagtgggattgctggattgaatggtagatctacttttagttcttggagaaatttccatactgtctttcataaatatcgtactaactttcattcccatcaatagtgtataagtgttcccgtttcactgcatccacaccaacatctgttgttttttgactttttaataatggtaattctggctggagtaaggaggtatctcactgtggttttaatatgcatttccctgatgattactgacattagtggcatttttttcatgttggttggccatttgtgtatcttttgagaaatgtctgctcttgtcgtttgcccactttttaatgggattttttcctttcttgctgatttgcttgagttccttatggactctgtagataccctgtagtgggattgctggatccattggtggtttagttacatgtcatttacaggtttttgttacatttgcttttggggtcttagtcataagttctttgcctaggccaatgtccagaagagtttttccaggttttcttctagaatttttatgatttcaggttttagacttatgtctttaatccatcttgagttaatttttgtatatagtgaaagataggaatccattttcattctttgcatgttgttgttcaattttcccagcaccatttattgaatggagtattctttccccagtgtgtgtttttatgtgctttgctaaagatgagttggttttaggtatttggcttatttctgggctgtttattctgttccattggtctgtgtgtctttttttttttttcccccaggagatggtgagttttattttgtcttgtctggatagaggtttgatttgctctctaatgttccagggtgcagagaaagtaggagaaagcacaggatgttgaggtctatttggtgtaatcttctccctcgttttcattttcaccatcaacggagacagcagcatacttgcttgcagaactgaacttggaagctagattttccttgggtttatatggctcaggtgcagatctggactcttgatcctttttgccatctttcctatctgactccgttcagtggtctttgttccctctgtctcctggaccatggctagagttcccagtttggtctttggggacattcatcccatctactttattttcatcttttcttgctgttccttcctcagatggttgagctggagctacttttcccccaccacttgtagggattgctgctctgtatctgagctctgtgatagagcaggagggttagaacttcacttcacccaagcattctcctttggtggaggggctggcattacctttaggggctgatcaggtttgggagttttagaagttggagagtgacagtcttcctccttattgagtgtttcattttctaaagacttctcactctccctcgtgcatttctgccggatgtggcagaggtcccggtctgtgatgactcacttcctgtcctcgaccatccctgttcctgagtttcttcactttgccagtttgggtgtctctcccgaggccatcgttctagttttggctcatccagctgatgctgcaacttctcttgttccttctgtagctgttctacttctctttctctagcagctgtgtcaatgggctttgtccctccaaagacagaagcagcttgactggactgggaggtactagcagaggaattatcttccttaggagtactctgaggctttagattcagtttgggtctttgtgggggacctctatcatcacgcctataatcatcccaagagtaatcatctctggagctctatgaccgatcatcccgtctgttggatcagtcttcatcacagtcctcacctcctctgtagtcatcatccctgtggtacccactgccaaatgcttttttgccattgcctatctgggaatcatagcctctatcataatctctgctgccttggtcatcatagcgatcccagtcgccgtatcaatccatatccctgcatgggccatcccaatactcatcacaataccaatctgaatcataacgatctcgatacttgtctccaaagctatcatcacctcttctaggtgagtagtcatcaaagctgtctgtggcaggacgagcccttcagtctgtatctgttttgtcataatcccmatttctatcacagccagaagaatgatcattcctgtctttatcctgtgcttgatcagcaacgtccactcaaattctcctgttacctagagactcttcattgagactcagggcactgagcagggaatccaggtcctcaaattcagcataaccaaaacctttcaacttctctggattgctgggttcacgtggtaaaagcactgcactgatatttagtcctctaaagaattctttaatgtactcttctgtcacatcatagggtaggttccctagaaaagcaatgtagggtgacaatttgggaagatggctccagtcgatattgggttcccaagcagcccctggagcagtgggaaggatggaacggtcaattggaggtgccctatacacatcttcatcattactgttccaagttgttgaaatatctccttccaggtcatctgtttcatgagcccagctgactggtttggaaacataagtgcttcctccaccagtccctccatcctcagccagagagtctgttagggagagagtcttccccttcttattcttcttttttgcttagttcttgaaggtcaataatgggtcacactggaaactggtattgttgaggctgccatgttgggagaggctttgtgtgtctatttttgtactgttttagttactatagccttgtagtataattttaagtcaggtaatgtgatatctccagatttcttctttttgctttggattactttgactattcaggatggtttttggttgcatatgaaccttaggattgtttttttctaaatctgtgaaaaaatgaccttagtattttgataggagttgcattgaatctatagattgctttgggcagtattgtcagtttcacaatattgattcttccaatccctgagcatggcatgtttttccatttgtgtcatctttgatttctttcgtcactgttttgtagttcttttttttttcttcgcaactattgtaaatgggattgagttattgatttgattctcagcttgttcgttattgatacatagcagtgctatggatttgtgtactttgattttgtaacctgagacattactgaatttataaaatctgggagtcttttagaggagtctttagagttttctaggtgtaaaatcagagatataaaaagagatagtttgacttcctctttttcaatttacatgccctttatttctgtcttttgcctgattgctctggctaggacttccagtgctatgttgaatagaagtgatgaaagcaggcattcttgtcttgttctagttcttaggcggaaaggctttcaccttctccctattcaatatgatgttggctgtggatttgtcttattttggcttttgtaattttaaggtatatttcttctatgcctagtttgttcaaggtttttatcatgaagggatgctggattttatcgaatgctttttccgcatcttttaaaataatcgtatggtttctgttttttattctgtttatgtgatgaatcaatttattgacttgcatttgttgaaccatccttgtatccctgggatgaagcccagttgatcaggttgaattatcttttcaacgcgctgttggattcagtttgctagtattttattgaggctttttgcatctgtatttattaggaattttggtctgtatttctttattgttgttgttatgtcctttccttgctttggtatcagggtgataccgactttgtagaatgagtgagggaatcctgctctgtcttttggaatagttttactaggattggtaccagttatttgaaatgtctggtagaattcagctgtgaatatgtctgatcctagtctttatcttgttgggagatgttttgttactgattgaatctcactccttgttactgatcagctcaagatttctttatctttttgattcaagcttaggaggttgtgtgtttctaggaatctatccatttcctgtagattttctagcttgtgcacatagaagtgttcatagtagtcttgcatgatcttttgtatttctgcagtatcagttataatgtctgcattttcatttctgattcagtttgtttgaatcttctctcttcttttcttgattagctagtggtctgtcatttttgtttatgttttcaaagaaccaacctgttgtttcattgatcttttgtattgtcttttggtttcaatttcatttagttctactctgatctctcttgtttttcttctgctagctttgggtttggtttgttgtttctctggtttcttgaggtgtgacattatgttgccagtctttgatctttctgtctttttgatgtaggcatttagcattataaacttttctcatagcgctgcttttgctgtatcccaggaatttgggtaacttgtgtcactgttattattcatttcaaaattttttaaaatttcatcttgattatattgttgactcaaaaatcattcaggagcatatggtttaattttcatgtatttgtgtagttttgagagttccccttagaattaatttctagttttgttctgctgtagtctaagaagatacttggtatgattttgattttttaaatttattgcgatttgtgttgtgtcctgttatatggtctatcttggaaaatgttccatgtgctgatgagaatgtataccctgcagttttcaggtagaatgttctgtgaatgtctgttaggtccatttgttttagagtccagtttatgtccagtgtttctttgttgacattctacctcagtgatctatgtagtgctgtcaatgaagtgttgaagtctcctactattattgtcttgctgtctacctctcttcttaggtctagcagaatttgtttgatgactatgggtgctccagtgttagctgcatatgtatttagaattattatatcttcttgttgaattgttctgttataatataatgactttctttgtctttttatttaaagtctgttttttctcatataaaatagctactcctgctctcttttggtgtccattcatgtgtaatatatttttttccatatctttccttgactctacaagaatctttctatgggttaggtgggtctcttgaaggcagcagatgtttggtctgtgttttttaaaatccattctgccaatctgtatcttttaagtggggcattacaccatttacattcgaaaatagtattgatatggagctactcttgcagtcatcatattgattgttacctagttgctttgttttctttactgtgttattgttataagccctttcatttatgtatgtgtctatatatgtatttatttgttgggatggagtcactctgtcacccaggctggagtgcagtggcatgatcttggctcactacaaactctgccctcccaggcttaagcgatcctcctacctcagcctccccagtagctgggacttacaggtgcacgccaccacgcctggctaatttttgtatttttagtaaagacgatgtttcacccatgttgaccaggctggtcttgaacttctgacctcaagtgatccacctgcctcggcctcccaaagtgctggtattacaggcatgagccaccatgcctggcctagccctttcatttagatgtttagaactccattgagcatttcttatagagctggcctactggtgacggattccctcagcatttgcttttctttgaaagtctttattttgccttcatttcttaaacttagttttgctctgtgcagaattcttgtctgacagctcttctgtttgaggagactaaagataggacctgaatcccttctgccttacaagatttcagctgagaagttagtctgatagtttttcctttatcatttatttgatgcttttatctcactgcccttagaattcttgcctttgcattggctttagatagcctgatgaccatatgccttggtgatctccttttttcaatgaatctcccaggagttttttgagcttctggtatttggatgtctaaatctctagcaagattaggaaagtttttgtcagttattccttgaagtaggttttctaaactttttgctttttcttctccctgaggaacaactttgattcttagatttggatgttttacatggtcccgtatttcttggagattttatttgtttctttgtattctttttccttaatttttgtctgactggtttaatttgaaagccttgccttcagactctgaaattctttcttctacttgatccagtctgttgttaaaaatttccactgcattttgtaactccctaaatgagtccttcatttccagaagttctgttttttttttaatatcgacctctctagaaaatttcattcatatcctgtattttttttttatttctttatattggttttcaactttctcttggatctcattgagtaactttataatgaatattttgacttctttatctggtatttcaaagatttaattttgttttggatccattgctggagagttagtatgtattggggagggggtagtattgtaaataaaactgttttttcatattgccagaattatttttctggtttcttcccatctggataaactattttttattattattattgaatttacttttgatttgactgggttcttttttttycccccgttaaggatgtgactttaatgtgtatcatttgtaatcacctagcttcagctctgggtgctttcagtggcaaagtctctgttgagtttcttggttatagagaatctgtgtgtgatggctttctcaggtgctggttttagtagtagtgtacttagtgtgtgggaaggttcactgtctcctgtggggccagagtggcagagrtctcaggaagcttatcttgttccccagtagtgtgtactactctcctccccaagtctttttttcactagggtagaatacttcagcctttaggccagtaggaggcacccatgggtgaaaaccagctgcagctgaagcaggtggtgggtatatgcagtaccccagtggtggacaaaagtctcaaccttgacagaggcagctgggggcagggagctcccagtgaaatgcactgaggtcttcactgtgggaggggagggagccacctcagcttcactaccaggccagcaggaaagcaacctccctgtcgttccccctcatccctatattctggacatttagatcagacaagcacctctgtccatctgcaggaacactgacattccatatccagagacagtgggactctatctctcatgaaagcctgagcccagagggcactcctcccaaggcgatgcagtcaccccaaagtgcttgagaaaggtcctccataggtctactctcactgagctcctgtgggagaaggcccagctgtatctgcgttgttgaacaagagggagagaagccccttcacaagtaccggggctcctccactgctagagtagaaccttagtctttccccacggagcccagtactgcacctgttcctctgctgaaagaaacttcccataggcaggaagttgtggtactcaaggttcatactttggtttcttttgtcccaaggggtgttccctttgtgtggtgcactccccattcccatgggaatggtgatctatgcgggccagactactgtgaatccagctgcttatctgggtttagccacctcagggactgccacaatccaggcctgtgctggagaatcttggcaagggatatagtcatggggaagacacaagggctgaaggtcctcaagcaaaacaaatgatccacaatgggtgcacacccagtatgttgcctgctactacagctcaggaccagagggaaagggaggggactttgtgtgagcaaggacccaagaagtccccagattgcagcccactccagcatttggactcatgagggcagcgaagctctccttgagtttggataccagcagtcaaaggctagagaataccctttccacagaatacttgagtctctcagggtttgatactcttccagcttcttgttactttctcttatgtgcatgttgtggattcttccagtgaattctccgatggactccagccctctccctgtaacactctatttgggatgtgactatttatttatgattttgtttctttcttctgaggtgaattggttactagcatctatagtcaaccatctggagaagctctggagaagctctttagtgcttcaggctatggacaggtctgcggaatgtgtaatggtttggtccctactcttagctccagagatgggtgatgttgggtggagctgggcaaggctgacctgtcctctcatctcataagggcaggttcaagcaccaactctgatggtggcagtaggggagtggcatagactctgtaagatttccttggttataagtagccttagtgcagtggctttctcaattgtcagatgtagtagtaatgtactgggtacatgaacaggcccaaggcctcctgagcagcctgattggtgtgagtaatagtgttagctgaggtcatgcaaaagttttctccttcctgagcaccgtgttatgatgttagcagacattgtagagggctgtgtcagttgacctccaactacaatttagggacttgttgaggccattatcttgctcatacaaggtcctttccctttctgcctggtcctaagctgtaggagtgggcaccatactggatgcgtacccattgcagaagtttgttctgctcaagtaccttcaacccttgtgtcttctcatcactagatcccttgtaaacagcccccaataccagactggcttgagacagctgcacaggatagacaaattcagaggagcagtaggattcacagtgaagtggcactagcaggagagagccagctacagtggtggccttggggatttatacttggcttatgttaccctggggaaacactcatatcccaggcaatgggcagggtcatggaactccctaaagtccctgtctgtggtgttaggctaggggcatagcctgtggggcctggatcaggcaagtcctcactctggctcaccaggtgtggactcaggctgtgaccccagtggcgatccgagggcagttccctggccactggggtaatgttccacggaggagcggaactgcctctgttgcataaaagaatcctcagggaggggagaggggtaacaggcagcagtgagacccacccagctctcactttcttaacacattgggtctcacactcacagacttctggcaacagctgggtcccaggcagtctgccctcagcatgcaaaactgcccctggttgtaagtccttctgcccaagacaaagaccaaggcttccaggccacacccctcccagtttgcctgcaaagcaggggctcccagcacctgcctctgtggcaaaagcctgcttcctgctcacctctcatttctgatcaatggggtttatacccacagtagattagattgcttattttagttggcagcttcttccaacctgtgaccactgtctgagttagctggcagaattctgtgaggtcccttatgaagtaggatcagcaatggcttccctccatccctgctagggtgtgggagtgcacgcaaaacaatttttttttcttttatatgtgaagtcttgctctgttgcccaagctggattgcagtggtgcgatcttggctcactgcaacctccacctcccgggtccaagcgattctcctgtctcagcctcctgagtagctgagattacaggcatgcaccgccacacccagctaatttttgtatttttagtagagacagggtttcgccatgttgaccaggctggtcttgaactcttgacctcaggtgacccacccgtttcagcctcccaaagttctgggattacaggcatgagccatcacttctcatatgctccttgtggctcaccaaatcagcaccagtgcttggtagggttgagacattcccctgtggcctggattgcccagttccccagtgtcaatgtgtaatcatggaggcagtctccccsctttcacaccctggagacatattttcacctgactcaccatgtaggttgccacccacagctttcaaagtgtctgaagtttctttcattttttctgttgagttactgtgtttcttcttggataaaagtttacagcataaatctctgcacgttattttgctctttgcaagtgggtgaggcatgctaacaatgcctccaatctggagcctgggtagtttataaagaaaagaggtttatttggctcacagttttgcaggctgtatatacaagaagctcaggacagaagactaagtggaactggagtatagaaatcacatgacaagagagggaataataggtgccaggttcttttcaacaaccagttctcacgggaactcagactaagaactcactcaatcccatgggaatgacaccaagccattcatgaggatcctgacacctcccaccttgccacacctccaacattggggatcagatttcaacatgagacttggcaggatcaaacaaaccacattcaaatcatagcatatgtcatctgcaaagaaacagtttcatttctacctttctcagctatattctttttatttccttttcttgccctattttaccacatagaacttccagtactatgttagtcatggtgagagcagacatttttgttttgagagggagcattcagtttttctttcaccatcaagtagagttagctgtagaagttttgtaaatcaaattgcagaatttatacaaatggccaacaagcatgtgaaaaaatgctcaacatcactaatcatcagagaaatgcaaattaaaaccacagtgatatattgttacaccagtcagaatagctgttattaaaaagtcaaaaactaacatattggaagggtttggagaaaagggaacactgatacattgttggtgggaatgtaaattaacacaacctctatggaaaacagtatggaggtttctcgaataacttaaaatagcactacctttcaatccagtaatcccactactggatatctacccaaaagaaaggaaattattatatcaaaaagataacctgtactcatatgtttatcgcagcataattcacaattgcaaagatatgaatcaacctacgtattcatcaacagatgattggataaagaaaatgtgtatatgtacacaaaaaaatactgttcagccataaaatgaatgaaatcacatcttttatagcaacatggatgacactggaggctattatctttagtaaaactaaactaactcagaaagagaaagtcaaatactatatattctcacttaaaagtgggagctaaataatgtgtacacatggacatagagtgtggaatgatagacattggagcctggagagggtggaagggtgggaagagtttgaaggataagaaattacttaatagatacaatgaacattattcaggcaatggttacactaaaagcccaggcctgatgtggtggctaatgcctgtaatcccagcactttgggaggccgagacaggcggatcacctgaggttgggagttcaagaccagcctgatcaacatgaagaaaccctgtctctactaaaaatacaaaatcagccgggtgtggtggtgcatgcctgtactcccagctactcaggaggctgaggcaggagaatcacttgaacccgggaggcggaggttgtggtgagccgagatcgcgccattgcactccagcttgggcaacaagagcgaaactctgtctcaaaaaacaaaacaaaacaaaacaacaacagcaaaaaaaacccagacttcatcactatgcactatttccatgtaacaaaactgcacttgtgccccttaaatttttatagattaaaagaaagacacatcattaaagaaattgtggaatttccctctattcctagttttctgagagttttgtcataaatagatgttgaattttgtttgatgcattttctgcatcaattgatatgaccatgttattttgttttgctttagccagttaacatggtaattatattaattgggtttttattattgaaccggccttgtttccctggagtaaaccctacttagtcatggtgataattcagcttacatattgctgaatattgtttgcaaatgtgtttttaaggattttgaatgtcaatgctcatttagttcctctgtatccttgctggttttctgtctagttgttctaccaattgttgagagaaaaggagaaaagtgtgcaagtatccaactataactgtggttttgtctattctttcagttctgtcagttttatttcacacattttgcaactctggcgcatacacatttaggattgctatgtcttcttcgtggattgatctttttcattatgtattataatatccttctctgtctctgataattttctttgctctaaagtctcctttatctattattaatatagtcactcctgcattattttgattgtgtgatatatctttttccatcctttaactttaagcatgtctatattgttatatttgaggggacttttttatagacaatacataggtgagccatattttaactctgcaaatctctttctttcaattggtgtatttcatgcttttaaatttaattaatttctcatatgtttgggcttcagtctgccattttcttttttatttgtcttttttaatgttatttttaactgttttccaccttttcttaacttagctgatgccattttattgatttttttgtttgtttattctatttttcatctttctgttttatttttcctaccttcctgtgggtacttaaagatttttttaaaatctctttttgatttatcaatagtggttttgwttgtatcattttgtataactttttagtgattgctgtaggtaacacttcagtgtagtgatgtcatcattttattagttcaaatgaagtatagaaaacttactttcatttatgtcttattaccattctgaatttataatagttatcttaaatatttcctccatacacatttagaatcatatcagacagtgttataatttttgcttcaactgtcaaaattcaagaggagaagaaacatgtattgtatttacccatatttatgcttaccatgttttttgtttctttttggtgttctgatatatgttttttcctctttttaaaaaattacctttctgtttagagaatggagtttatccattctttcagggtaggtctgctggtgatagaatctcttattttccttcatctgagattgtcttggyttcttcctgattgctaagtgatgtatttactggtataactttctgagtgggtagtttttttctttcaatcactggaaactcttgtgccacatcctagccttcatggtttctaataaacaatccgttgtcattctaattatttttcccctataggtaatgtgttatctctggctactgtcaagatttttttctttgtctttaattttcagaagttacgatgtgtcttagcatggacattttaaaatttattctgtttgtgtttcactcagcttcttgaatctgtaggtttatggctcttgctaagtgggaattttctgctttgccctctgtctctctcctttaggaactcaggtgacatgaatgttagatactttgttatgatcccacaaatccctgaggcsctgatcatttttttccattctattttctttgttttgatcaaattggataatttctgttgttctgtcttccagtttgtttattctttcctctgtcctcatcattctgctgttgagcctatctactgaactttttatttacactattatatttctcaattttaaaaactttgctgatactttctgtttcttacttaaggatttctggttttttgatttgtttcaagcatgttcgtaattgcttattgaagcacttttatcatggctgctttaaaatctttgtcagataattctaacaactctttcttctcaacgttagcatccattgattgtatttttttcatttggtttgagatctttcagtttccaggtatgaggagtgttttttgattgacgtataggtattttgggcataatagtataagaccctagatcttattttaactttctgttttagctgtattttcttataccactctggtagaagaaggggtgagggcacatcacctcattactgccaggtaggaatataaggccattatttttgttgacatccaggtccccagtaggcctccactaatacctccttgctgggaaatataggagtgcttcattactggttctcatttggcctccatttatagggcaggagaaaaggtgtgacctcttgattggtgatgaaatggtttcttatcacctattggaaatgaaagtgttgacttcttccttgtagttttctgacaccaccatgactaagagagttgggagttgagcattgtgcctcatgatagactcaggaatgtagaagtctcggtttctactcagcctttgctggaatggatgggggtagggtaaagttttttctgagtggttattgtctaaaagttttatttttgctaggctgctcttctcctgtcctttggctagagagacaggcttttgttggggattttttgtatgcatgtgctggcatttctcagtggttggctcctttgactttaagactggtataaataaggcaaaaaggaaacccagggcagttaccatagtgtcgttcatagagtcctgaagttcatagctagactgccttctacccatgtttctaagtctttttrtgtttgttttatatgtaatgtccaagcttcttggttgtacttagtgagaagactagggaaaattatgtctactccatcttcccatccatgtatctttaaaataagtgtctgacctatttattgtcctgcaataaaagtgatgatttcttaaaaacaggttatgaaacaacttataggatgtagatgatgatgacatgaatagcttagaacagtagctctcaaacttaaagtgcattcaaacacctggaaggctttttaacactgattatggagccctactcccaagaagaaatgggaactagcatttctaacaagttcccaggtaatactgaaggtgctgctctggggaccatagtttgataatctgtttcagagaaatgctgaatagatgacagatcattagctttaaatgatattaatggcaaatacacttgctttgagtaaaacaaataaaaatttgtaataattaaactgagtattagatataaaatatttaaaggtagatacttaaaagatgatatcatatttttaatgaaatgggtcttcccattttccagcactatagtatatggcatttgagaggccaaaagagtaggacactaagggaaatagtattcattttattataaagggaagaatatagcaaaaaataagagataaggtgatcagttgttctgtgagcataaaataatgcctattttttggatgttaggcaagagtgtttgaaggatactttaagccacactctgatagttgtatgatatgcaagatctttcttaagactcagatttgatgtcagaaaagctccattacattgatctgaactaatgatttcctgctaattactgcacttatcatcataatataccttcctctaaagttcgtctttttttcttgagttagtgaataaaaatgattctggaattaaaactactcccatcaatagtatgaccattagtttagatcaaggtgaacctagaaatatttttcccaggtgatcactaactataaaaaagaaaaattaaaatagtgaaatgtcagaatgaggtctcttagacattattcttcttacagaagttgttataaatgttaataaagaaatttgctcgtgaatattcatcagataatggttctgattttgtagccacatacattagagtaataaagcatttccttttctcttttagctcggttggtttagcaaaagcagctctagaagcaattaatggattcaacctttttggcaaccaggtaaaaaataagacccccagaatctttgattatttgaattgcacatttaattaatttggctattcattaacaaagtcatttccttataatcagagaatgtccaaaatttatgtagaagctcatgcttgaacttttcctttgaaaatgatttgccagttaaattttagttttctaactaaagaccattgcttaatttctttaaaaaaaaaaaaaaaaagaaaattttttttgataaagaattctgatttccttggttcagtgacttttccctcaaatctattactcattttgtagaaggtttcacattttttaatgtatttggcattgtatatatatatttttatgtcagttttcatgttggtttcaatgtaatgtatttcaatgtatatctcatgtagaagagaatttgtgtgatgtgtttagccagataattgggagttttgatcctagcttcaccttcaactggctataatcaaatgtctaaaatctcattttctctggggatgaaaaaaaaaccctgaaggtcgtcttaaattttcattagatctttaaccagtttttatactgaaagaatctaatcaagtgaccatggattgagttgtcagtggaaaggaataaaatgtaggaatagaggttactactctggatcaagaagtaggccaattttctttagcagtttttataaagattcctaagatggtgaagtaaagtgaagtttctaactgagaataaaattaatcctaagctactgaaatgctaagtcagtaaagaaacattttaggaggttacacagttgtgcaaaaaaaacgacatggtttttgttatggcaattataatactatctactcaagtcttgaatttaagaatgtttttaattgtagtatattaatgcagccacctctcttctccttcttacgtacacaagcactcttctcatcccaactccctctagaggatggatgggctctgtctatatgaaggtcatgaggaattaccacacactctggatcacccattttcatattcctggatggatggatggatggatgaatagatagacagacaggagtaggaggataaaatgactttaaagaatggcattatattaggggtcaggagacaggatcactgcatgctctgtactcaattccaccagtgagtatggctatttaactaagcctcagcttcctcgtctaaaaaaataaagataatgataataggacctaactcaggaggttttcatgcaaataaaagttagttagcatagtgctttgcagagattaaacttttaataaatgccatctcttgttgctattgttttttttatttttgttttttgagacaaagtctcgctcttgtctcccaggctggagtgcgatggcgcgatctcggctcactgcgacctccgcctcccgggttcaagcagttcttctgcctcggacccccgagtagctgggattacaggcggctgccaccacgcccggctaatttttgtatttttagttgagacggggtttcaccatgttggccaggctggtctcgaactcctgacctcaggtgatccacccatctcggcctcccaaagtgctgggatcacaggcatgagccactatgcgcggccgactcttgttgctattatttatgaagtaatagtaatacaaaggaagggaaatgagaaagaactgaaagctttctagagcatatatcaaggagactgagaggaggcatggattaaaccagagctgatgttaacagcagtctggaaaggtacaggtcttgctaacctggcttctgtgacataccaaatactgagctgaatggagctgagtgtctcttggttggctgttacatggtagtagccagctcttttttgcaatagtgtcatctcctttgaagtacctgagtcttagtgtatgttgcttacatacctgtatgcaccccttcctattgtgtgtatactcacacacatacatacaagctacatttcctaactctacccatctttcagtgctctacttttcccaggaagctttcataaattgctcagctataattctaaaatcgctaaattactttactctgcatttggattctgagttataactgtattgctgatattgttcctcagccagtttctcaatcttgactatgcattggaatcatttgaggaattaaaaaaaatactcatatatgagctctacttccagggattctgatttaattggtgtagggggaggccttggcattgagattttttggaacttctcaggaattctaatatacaatcaagggcgagaacaactgctctaagccgagttaatttttggccttgttcaggtcacgtctatttccagtggagctatgcaccaaatatttgctgaattgactactacttgattgtttcagatagaaatatggacagataatgtcttctttctttctttctttcttttttgagacagcttcttgctcttgtcacccaggctggagtgcagtggcacgatctcggctcactgcaatctccacctcctgggttcaagcgattctcctgcctcagcctcccgagtagctgggagtacaggcatgtgccaccacacccgactaatttttggatttttaatagaggtggggtttcaccacgttggccaggctggtcttgaactccttacctcaggtgatccacccgccttggcctcccaaagtgctgggattacagccatgagccaccacgccgggccatgtcttatttctttagccacaagaatatcacatgttgccagtaaagtcccttcatcttccatttttacaaggtagtgtcagtgtccttgttttacaaattccctttcgtctcttttttctgatgtggagaattgcagaaatatgactttgaaaatgttactattaccacctctacagcagttaaattaataatgtgcctgctaaacagtggcacatttaaaagtgcatgtgatctttttagtgtttaatcattttataatgtcattgtatatacttaaaagagctgtgatctaattaaaagtcagttgctgggaaaagaattgacataaagaaatgcttttattcaaatgaaaatccatagaaaccacctcaagacttgagggatttcagatcatattgatattcactgttatttctaaaggccattggtataaggttttggaagacctgatcgtgtgtctttaactaaattaattagaactttcaaaaagtacattccttcttggtggcaactcaagagagatggtagagcccctctctcaaaatgaatgatcggaagattgaggtagtgtttctcagatcacaccacacaggggcaaaaccaggagtaaaaccaatgccactccataatgaatctattaatagaagatcaatttgttggtatgggaaatttcagctgttggacactttctacttttagaattgggagctgtgcattttctttgaaaactcttaagctgttttttgcttaataattattgagcttctgaaagaggtatccatttcacaaatagtgtgaaaggcttgccttttgcccctggcttcagcatatgagataaaacaaatgttaattttatttttacgggcagttgttgggtggtaaagttttttgctttggttatgattattatgcgttcctatacttcctcctttttttccaataataacttattattcaaggaaaaaaaaaacactttaaatctttttctgaaactattttccaaatttatttttctttgggacactgagaataagatgtgataaaaaggcctagtttccataatgatttgtttacaataaaagccaatttggggcagagctacatttagaaacatatataatcctcaatatgggaatcacatatttcatcatgatctcaaatatattctgtataaatttcatgacaaatatatttaaatattatttaaataatgtttgataatatttaaacagtaatattttagtctatcagaatttattttcatcaaatgtcatagtcatagtaagcaacagttttgtgattcctgggtttgagtctcagctctgctcttttgagaccctgaaaattcatgttcaaatttatctttctctgtagtttgagaattcctttcacagtatgtgcatgaggacgaagaagcttgggttgtgagaggggctgctggaaagagctgttgggtcagtaagcaaaagttggctatttacacatctattgccaccacagccttggtgcagaagggaaattcctatcagtaaataccctttccggaagaatacatttctccaggctctgctacagagctcagtgacagcctcataactgaactaggggagaaaatctcctgaccatagttttgcggtgtggttttgttccagaataagaatgtgaagatcatgtacgataggtagatccaatgaccagttgtaccttgttttattttttgagtctagatgagggcagcaagtcccttagctcaggctctgagaagtgattaatgaagaaaagaaagatcagtcttcaaattgttttctttttaattgagaccagtgagatcagcaaagtcttatgtttacagttggtacccttggccttagggactgtctcaaaagtggttgttctggtcatgggattaagggaagtgcagtgcagcccttccccaccactggaactcaagtccccatgacagtggtcaggtttcagaatcatcttccagtcccagtgcatttactagactaaaacaattatagaaacttggctagggagtaaagtttgagctgtcagtcttaaaataagctctttaggtggagtcaggatattatggcagaattataatgttttcaggaaatggaagatgaaaataaaatatccaaagttaatctgatactctgaagtgacatatacatataaaacatcctttcatattcctatccttaattggggaaatcaagatactgacaaatgagccgagaccagaatctaaaaggtaatgactagagagattgctcatgttatgcaaagtgttcaaagcagtgcagacatctagcttcctttgaaatttgcaggccttaaattaatgtgtctgattatttaaagtaggtgataattaattccatttgtgggttctccttgatgactcttaaaaagacttgcttctggattgggaatagctgcccatgacctggggagattttaccctcctggaaatctggaccgtaatgcctaaagcatgggatatttttgtaagaagacagccaaacaatatagttaatcaccctttggtcttggtgttaaaatatggtaacattataagattatttttccctttgggcatatttcttaggttggcagagaaaaattgagagctgaataaatactttgatgaatttagacaaataagccatttatttacggccagaaaatagaagttggctgtttacattaatcaagtaacatagagaattgccaaatttgccatttcacttcattatttataaattatcctacttagattgtatcttttgaaaatttaattccaggcagatagtttggtatgcaattaactttattaattcttggcctaaagataaattatagctcctattttttgtgtattcataggctcctaacatattatatccatttatttctctgctgttttgttctaactaccctacttgctcccatttcaccaaaattcagagcctagctatggtcctcaccttctctatgaagtgccccaacttccctggggacttgttttataattttcttctcccccttaaaccactaactttggtgaaactaagtcatgtgttgtggtatgctgcctttttgttttcttaataatcttgttcaggactgttgcctgggtcagcttcttgagagcacaggtcaaatttgatcttgtctgttttcctgaaagcagagtgcacagtaccttgccagcggcagctgctgctgaaccagtagagatgggaggttggaactccggagtgacagaaaggacagtttaccattcatctggtggttgagagacagcctcaccgaatcactgttcatttattaatttacttgtcagattttaaaaagattttaaaatgatattctgaatgagaaatcattctattttatgagctaattttcatgtacaaacatgggctactaggaaaaaaatacctctagtgaatctgacatctggatatggggtctggtgctgctagattttgaagttcagtgtaggtgattggttggagatatttttgtttcagtttgaatgcatctgtgaagttgttgagaattaggatgagattcagaaaatagtattaaagtaacatgaaatttataattctcttctccctttccccatgtatttttctgagtattctccttattcccatccagttctatgtgatttcaaatatttagctccccagtaaagctgttgaatatggaatgcactagttttaacctggttagcagatagattaagattttctgttacacctatttgtttcattcaagcttttttttttcttacttgaaatatatatatgtgtgtgtgcatatatacgtatatgggggaattgtataaaaaatatatatatgggggaattgtataatctagtgtttaaagaatgggcctctgtgtcagagacttgattttgaaactttactctgttaaagtaagtcttaatgtccttttcagtaaaatggggaaaacaatatctacatacggatgttaaatgagacaatccatgtgacacataaagcatagtgcctgatgtggtgaatatttgttcagattagttgctttattgttatttgagattctcctgtcttcatattttaatccagtattcttttacattcatctagattgtatctaaatttgtttagtttgatcatatagtcaatatttatgaggaatgtacaactcggattttatgaatctgcattctcattctttgtcatgttagctaaactaattgtattttcattaaaataaatgtcactaatatattggctatcttgtaatcagtacattttgatttataagaaagtcaaggaaaactagggaaaacaaaaataacatttttatgattataaaattaatgtttattgcaggatatttgagaaatattgaaagtacaaacaaaatttaaatcttctggaactccacactcaagatgcagacaatgtcagtatttttgtgaagttttcacagtcaaaatgccaaagttctacaagtcttttttcttaatttaggaaatgtttttctttttctctstccagggctgttcgtggtcagttatatttgtggatctcgatgctcacaatcgcaacaggcaaactttgtgctcgctgttacccagagaatcaagatcacatgtgagacatttaataaygataaatttaacatgaactattgtttatgatttctatgtagttatatcttaatttccagtaaagtactctaaaatgttagtgatcgtccagaagggataagaggacatgatagatattgccccttactcctctggcctggggaggtcttagcaagtggacaagagttgtggacacggctgctttggcctttgaatcttttgcaggagaatagaaaaacagacttttcttttgggggagtagcaacattaggccaaggtgaattatttttttgccatggtatattagaaaaatatttttcatagtgtatatatcttttggataaaataaccttccattccttatttctgttctctcattcaattcactttttccccttgcctgatcaacttctgtatgcttatcctacctgattgcagaattttctagggactatttgtggttctgttatttagaaaacacccaaagtggaataatttagttattcaaaacaactcttttatgtaagtaatgtaagattatcattaaaaaaaaaaaagctccccaaataagcaaataatataatacccactcatgccactactctaatacaatcttgacaacatttgggtatatatgttttcacttatttttagacatatataatatttttattttacaaagctataagagtactttttatattgattgataacctagctctgtgaatggatattggatattgtcccataccagtaaacagatttctacaatataaattttaatagttgctaatttactcaactaattgttggacatttaggttgtttcctctttttcattattataagcaaattgttgtgaaaaactaagttgtgacaactgttaaatttttgcgcaccattttaattaatattttgacatttgagcccgttgaatcttgaaaatactatcaacaaataaagttttatctcctctgtaaggtttcctggaacatgccatagaaacatctgtctgatcctgggagcagagcgtgctcacttttgactgcataacctcactggcttttcatctctatcattctccttgrgctgtgttgatcacatcgctgtggacactcacagtctctctttctcattgcctccagaatacagatgctgccctgctcccctgcatcagttatcctgcatttgccctggatgatgaagttctttttagccagacacttgataaagtggttagaaaattaaaaggaaaatatggatttaaacgtttcttgagagatgggtatagaacatcattggaagatcccaacagatgctactacaagccagctgaaattaaggtattaaaaaatattccatggtaatcgcatatcagagcaatcaaaagcacagattcaggagactgaccattgggtttgaattctggctctgctacttactagctatgtggccctgggccagttaattaatctctgtctgtgtttaattttttcatttgtaaaataataatagtacctatatcatgaggttcttatgacgattaaataacttacataaaagtgcttagaatagtgcttggcacatagtgaatgctcagtaagtgttagctcttattaccagtgaggtatttactgataatgggccatgttcatttattgggtgaataatttttctattgcattttcagtcctatgtttgcctgatccatactatttgtcttatataatattaaatacctgtttgtaatattcctttcattctattaagcaaattcttttattaaaactgataggccattccatcttcccttatctgtttcatttagacactttcttttaaaatatagtcctctaaatgtttagttttaaaatattttgtatttcaaaacacatataccactatatgtagttttatactagctgcttttaagccatctagaaaatagcaccccaaaaaagtaagaagtcawgcacattgctgaagactttgctttaatgtagtgtattgaaaggtattttggttttttgtttctttccttttgagatggagtcttgctctgttgcccaggctggagagcagtggcatgatctcagctcactgtaacctccacctcctgggttcaagcaattctcctgcctcagcttcctgagtagctgggattacaggcacatgccacaatgcccagcccagctaatttttttgtgtttttagtagagatggggtttcaccatgttggccaggctggtcttcaactcctgaccaagtgatctgccctcctaggcctcctaaagtgctgggattacaagcgtgagccactgtgcctggctgaaaggtattttgtatgcatgggcataattggctcactcactgaaggtaggtaaggtccctaggaatctgtatgtagaaaatatgtaggcaacattataccttttaagttgtttggcaattaacatactattttaaaatttaacatacacttttgcagaaaaactagacaagctatttatcattttatttaactttttttttttttttttaatagagaccagatctccctatgttgcccaggctggactggaactccagggctcaagtgattctcctgcctcagcctcccaagtagctcggactacaggcatacaccaccacatccagctttatttaatttcacggttgactatcacttggaaaccattttattgtgtgcacttttgaaattttagcagtgttggcagtgttacagtctgttaggttgggccaaaagatccatttatctcttaaacaccttcaaatgtttctttcctatttaatacattttctgtgccaatatttacagcacttacatttgaattggaccacctgcaactaactaccacctcgcacacttccaactttggatctgtccagcaagctttcttgctttggatctgtccagcaagctttcttcaccttctgctgagcaccactaaggaaagccacagcactgtgggtaggagctgccccacagtcaggagatctttcttggttcagcctcatcattgctgtcggttcttgtcagtcctgctatctgactctgccaggaactccccatgaaagcttttccagctttttcctgtttgtactcaagttcgcagactttcctttttattttctacttgatagcctttcatttctgcatggtctcctccactgtgtctttccttcatccatacttacctccatctctcttgcctcacagaaggagctctctgttctaaggctaacccatcctgtgtataccccatcctattctcttttcctttcttgacaccctcacttgttttcttctgtgatagaaggatatctatttctctttcttttttctcctcatctccatttctacttctctgtcttgtttccccaacttaaattagcttttttcgtcattaagcacattgatgtttatcattaagaaaccaaacgaaacccttcctcagccctttccctgtccacctccatcctctttctcttggtgccacacatctgaaaagcatggcctctacttggtgtctccttgtttacatcccgcttactctttccccttacaaactggcttacttctgagcactccccagtagctgtgctggcttcaatccatttacattactgagtcggagtggatgcttttctgatctcgtttcacagaacttggcatttgagtgtctttgctgagtcttgtttgttggaacattctccattggctgtgacccctttctttattctccacttctctcacttacttcttagtctcctttgcaggttcctcctcttctgccccctcttaaaccttgctcttctcctagggcccatccacagccctagctctcttcattctggctgtgaactcttagcttcagctatagctattaaccacagatctccatccctaactcatacctctcctcaagtgcccaccccctgtatgcagctgccttgtgaacatcctcgcttagatgtcttacagtttgcctgtattcagcttccactcctgtgcccgagccctatacctgagagtcattctaggcacttccttctcacccatctacctttgtcaatcaccaaggctggcagatttagcctcctaaaaatcctaaaattctgttttttcctctctattactccctggtttaggctagtggatctggggcgattttgccctccaggagacatttgacaatgtctgcagacattttgggttatcacaatatagtaggtactactgacatctggaaggtagatactaggaatgctactaaacattcctgcaccacacaggacagcccaacaacaaagaattatttggccacaatgtcagtagtgctgaagttgagaaagctcagtttaggttgtcatcttttctctttggattttgctccagcagaattccagctggtcctgttttttgccctacaactctcttcggtattaccagctgctcagtctagcaagtaaatataatgagtaaatttgatcctgctgagtattcacctgtggttctcttttatttccagaccaaagtcttagctacttagcatgacctgcaaggcccttcccgatctggctggcctggcccatctgttgggtttcagttttcactacttcgtccttgcttattgcagaaatactgaattgctggtagattctttaacatactttgtgattctgtgcatctgtggtttgtaactgttacttcctttgccttgagttaccttagctcatctccccagtgaattccatccagcgttagctgaaacatctcctttcctgtaaacattccctgattccaaggcagactcaggtgttccactccctatgagcctgacataccatgtgtagatatttcctactgcatagtagttgtttatttacatgctggcctccctattaggctgtgagcctctgagggaagttctctgtcttttgtcttagtagctctctgtctagttggttccaggcattagtaagtattcagtaaatatttattgaaggactgcagtttgatggactgaatgagtgagcttttgaataataagatctgaggaaaaatttttttwaaaaaaggacaaggaaactgcttacaaaatcagttcaactttattgctataaacaaatctttgacatatcgcctaactatagttcttctaatgtaattgttagtggctggccacagtggttcatgcctgtaatgtctgtaatcccagcactttgggaggccaagataagaggatctcttgaggccaggggtttgagcagcttgggcaacagagggaggagaccacatctctgagaagaaagaaagaaagaaaaagaggggggggagggagagagagagagagaaaggaaggaaggagaaagaagaaagggagagggagagagagagagggagggagagagagagagagggagaaagaaagaaagagggaaggagggagggagggagggaggaagggaaagaaagaaagagagagagagacagagatagccagatatagtggtttgtgtctatagtcccagccctcccacttgggaggctgagkcaggaaaaaggatcccttgagcccaggagggcaaggctgcagagagccgtgattgtgccactgcactccagcctgggccacagagtgagatcttgtctcaaaataataataataatttaattgttagtgtaaaatttaatgttttattttctgttttagctatttgatggcattgaatgtgaatttcccatatttttcctttatatgatgattgatggtaagtaagctttttcctgaaatttaagcaagctttttcctgaaatttaagctgtaggatttaagtggtttaaagaagagcagaaataaattatgactcttttcagctagaaaaatagactgcgcttcagtgatgttaattgccctgcatttgtatatactactcttttgctttctgagtgaatgctaaatcatttaaagaattaaaaaaacacttggaagcatttaaaaaatgatagcatatatattttcttcatatttacaaagaaaaatttttattagtagaaatcattaatactgtaatccatgataatgtgaatgtctgtaacatttatacttaggaatagggaaaattcaattaaaattcagttttcaattctaaatgctaacatgactttctaaaaccaatttcttggaaaaatatcacacagatttgcattttttttccactttaattttaccattggcatagaaaattaccaaaataattgtaactgggctaatrtattttttctaaggtaaaatttttgagatccttattaagctcagctgctattggattttatattttatattttaggagtttttagaggcaatcctaagcaagtacaggaatatcaggatcttttgactccagtacttcatcataccacagaaggtatagttgtttttttaagaaattcttcctaccaacatttcctgaatgtttatttgaaatgtataagtgagtcctttgtaaaaaacaataatttgtattaaattgaaaaaaatgaatgatccctgatatgaaatcagaaagaagattaagcaagacaaagatggaaatgaatctaggtggacatggcaatagtcattccaaaatagtttgtcaggtggactgagttccttcatctgttatttactatgtaactccattactctgtatagaaagtgactagtttttatacaggtcaccaaaaatgctatagtcaggtgagtgcccctcctgcggagggctacctggagaggttctgctcttgtctaaaggcactagaattgccgagaatattctggccccctctttggagttttttctggggtccttagcattgtattttgaacatctgccatggtgctaaaacatcgtcctttgaggatggatttaatatttgagaaatggtcagaaggcccagtcttaggagtaagggtatattggtttcagtcaaacaccagcagggaccctcaaaaaacatagctgaattttctgtataactggaaaaccaattttcaaaggaattccaaatgagatgttctagatgtctttggggctttaaagtattgacaatcacagcagtgagccccattcctatctcacatgaaatttgtgatattctttggggttttccacagatatctcagagtaaatacttaatattatatgctcactaacatgcttgtaatgttaaaagttgtgaaatgtttatggataaacattgatttcaaagtgaatattaatttttaaaagttatctttgtctttatgctacaaataatcacttgtccaatgtgagaaataatgtattaaattttgtaatgcatgtaatatttgaaatcctttgaagcagatcttttaatatttagtattagatctttgatgcattgagatgtagtagtttaatgtacctcacttcaggcttcatcatgttcagagagtgatgttcaaagtattatctgtatatcatagaccttcttactgattttagacacaaatattgttgattgatatgtaaggaagcaaaattttagggaaatctgtgcaatttcattagaaaaattaagtttactgtgggctaatattgcaaaaagtctcctgtagcatcctacatagattgttgattattttcccattatatcatccacaaagattctactattaaataataattttagttcctaccaacccatttttaaatggtcacgggggagatggctttttctcttcggtgatattgaatggtagataatgggcttaatgtttaaatggggatttctttgctctagcaatggctcagagttataattcttcatttaagattacacagtatctcatttgtgaagcttctacagaataatcctattaaaaatagcttcctctgtggctctaagtatttgcatactgtgtatttgttgattcatttaaaggtattaaaattaaatgttgttgagggagattatgtactcattgttagccaaagcataacaatctgctgttgaattagtgttttaagtcaatttttttctccatgattttcactggcaatatctgaaaggaaccagaatatccagctttctatagcttatcaaatctgttgcctcctgtataagaattctctctccctgctttctaatcattacagtgtcttgaagggaaattttgggaaagacagtaattttgatatggttcggctgtatccccacccaaagctcagcttgaattacagtaattcccatgtgtcaagggtggggccaggtggagataattgaatcatggggggcggtttcccccatactgttctcatagtagtgaataagtctcaggagatctgatggttttgtaaatgcataagccctcttgcctgccaccatataaaacgtacctttgctcttccttcgccttccaccatgattgtgaggcctccccagccatgtggaactgtgaggccattaaaactccttcctttataaattacccagtcttgggtatatctttattagtagcatgagaatggactaatacagatttgttatattttaaatacttatttttaaactccataggatatcctgttgtaccaaagtactattatgtgccagctgactttgtagaatawgaaaaaaataaccctggtagtcaaaaaygatttcctagcaactgtggccgtgatggaaaactgtttctttggggacaagcactttatatcatcgcaaaactcctgggtaagtggagaagattgggaatggtatttttttccttgttattaagctattagaaataaatatgcctttgctggtgtttatgttggatttgggtggygtttcatggtcttgagaggtctttagggagtttcctagtatctagtgrtatattaatatatctatttcactgaatgatgatggacagtttctggaaagaaagcgaaataggtatgggtaccatttgtgatcatttagggggctgcatttggcttactatataggtttcctgcagaagattatagaaactttgagttacttttatatgatatattaaaaattctgacttaagaaaacagtaacagtcatgcttggtcatacctttagtagaccacttgccaaaatgtattggtcatctcaaagttcttttctttccaataaatatatattggcaattttagttggaggtttaataggaccattattcattattctttgaagaattatttttcatcttctcctacaacttgaactgaatcatagcactcttggacactttgaaatgaagacaaatttgataaacacagaaaaagcattatgcattcttcctgcaaattccttgttcaaattttaaatgttgttagcatttacatcaaaaaggctatcactttagagtcagaattcctttatggcaaaatatattgaaataggctaactgtaaatactgtacctgcactaaaataactgcctactgtataaaatactgttatgatttttgttgtttctagcattactgcataaatgctaataaatttgtgccgtaagagtaatcatcttcggtttttaaaaaaatattccattagggaagaatatttcacaggacagatttccaatttgagctttacataaaatgatatgtaagaacaggcagaagctaaccaaataagtgaaaactaagttaatgctgttttcagtttgctcctttcctaactatattttctgggtctccatatatacctaatgctaatttaagaacatgaagaaacattttcttcctcctttaaagggacagctttttgacaaggtgttgatattatttataggctttccttttagaatttccaaagcgggggggaaagacacatgaaatagttttcttttttcttttttctttttttttttttttttttagtgattccgcttttaatttatagtcgtatgactaagatgttttgaatataagcctatccgtatgccagatataaatttcaggaactcttaatgtctcttttacagaaactctacctctatcctgatgtaattaggttaagaaaattaaaggccacggtccagaaaactaacttccacaaatgcaacaaaaggaaaaatttctccartaacctctgtgcaatgggaaatctttcttttaagtaccaagtcaatttcttcaactgtacaatgtattctaatttgaaggttttcaaatataatatagtaacaacaaaatataataaaattaaaactatcagaaaacagagtaaatggtataattcaaataatgactaaaataaaatgacattatggattttgtaatcaacctataattatatatttaaattttgctttacatacataagatcacagctgaggttaaccataatttcaaattttatcaccmgccacttgtgctattttatcacatttgaaaatattcactcatattatttacctcaaacagtgatctataaatttgtttagactataatagttaaggaccttttcttcttccagataacttgaaaaattaaatgatgtattgaacatactactaaagaaactttactttttgattatggtctctgcattgaagatctgtaggaatttttctttaataattttcaaatcttcccatgacctctctgttcatagaaatatcatctttgaaataacctgtgtgaatactttataaatcaaaaatggattcacatgaccatattaccataatcaccaattttaacactctcctacatattttctatatcacttttcttgattataaaatgtcagtaatatgaacacgccctcgatatagcagaatatttaattacatcagtttcccatcaacacaccaaagtcacttaataattatattggccatttccactgatcggcaggaggctcttccactaatggcgcccatggtttccactccctcatttttcttgccagatttagttcatgttcagcctaaagaatcacctcttctaattgactgccttgaagttggtcttctaattttttaacatctggttccgctttaaccatagccagcttctcatttgtaatctgttctgtatactttctatatgctgcatttttagggatttcctcaagaacgtcaagaatctttgtgtacaatattcttagcctctcatgtggagtattgcacacagccaatcccacaaggccagtggtcttcttcagcacaccctccctgacagcgccaacgattcgatcaacacatgaaatagttttcttagaatcaacccaagttgggaaggttatctctggttagaatgttatttccgtctcactagcataattacaaagaagctttgttgttacagttaagtaaaacatattttagtagagtactagttaacttatgtaaggataagaattttaacattagaattataggtttttatgttctatatttggaaattacaaatgagcatgaggaatttttttctgtgattctgaggctaaaaactggcacctgggatctgggatatgaaattaaaaccttctttatcctgctttttgccatatatccagcctgggtttagtacaactagaaagaatgttgtttgagcaaagcctctagataaaattgacaaggctagtgaattgagaaggtggaattgactacaccctacataagcaaattgagctttaaaaaaagaaaaagattgacaatagtatcagtaaaaaagcattgaactttccgtaataaatgtgttgaatgtagacaggtcttgagtgaagatagtattttctcatattaagaccagagtgaacagaagtagtacaggtcatgcctccatttctgtttcatgaccaaaaagaagaagaaatactgcagagctgccgttaaagaaagtcagtttctcttttccctgctgatcttctgaaaaggcagtgagaacatgaagaaggtattttgcatactatgaaaccacatacatatctccagctgaaaaaaagaaatattgcatattcattagtagtctagcctagctttgttatctggttaacaacccactggttaagacaaataacatctcagaaaattgaatcatttagttgctcttaactgttgtatactagccctaagaaccatcagacttctatggattttcattaagattccagatacaaatttacttaaaaagtctttattcattaaaggagcctcagctggatctctgcttgacaacattttgtggacagctaattgtggttactatttttacatgaaaataatatarcagtgaatctttaaaaatatagtatatgactttcactaattcaggccagtttgtatctcagtgaagtctaataatattttgctttatgtatgcctaagtaaataattatataacaaaactctgtgacttctattcaattgttaaagaaaagacacagtatgctatttcctgaaccaaggcctgaactccccactgtgctcttaaaaaataagttaattattcacagtatttccttttctcttataaaatttatacttttagaaaatcaatattttctatatagctggtaaatatattataaacatgtacactttaaaccccgtaagacgtatcttaagatatatttgacgtgtcttagaataaaatggtcattagttatactttcaactgttattcaaatttgaaagtttagaaaccattcatgtaagaccagtctaaagaaagcagagtacctttttgagctatttgcaaaaataaataaccttaaaagtacagtcattcattgcttaatggtagggctacattctgagaattgtgtcattaggtgatttttagcctacgacgtacctagcctatatgatatagcctattgctcctagactataaacttgtagaacatgttactatactgagtactgtggacaattgtaacacaatggtaagtatctgtgtacctaacatatttaaacatagaaaatgtttatacgtgaagatgtctatacatgaagatacagtattgtaatcttatgggacatctttatgcatcatcacatgattgtatttattgcattaaaaatcacttgaggctgggtgcagtggctcacgcctgtgtcccagcatttggggaggctgaggcaggcagatggcttgagcccaggagttcgcgactagcctcgctagtagatgggactacaggtgtgtgccgccacgcctggctaattttttgtattcttagtagagatggggtttcaccgtgttacccaggctagtctcgaactcctgagctctgcccgccagccatgatggtgcatggctgtagtcccagctactcaggaggctgaggccagaggatcacctgagccctggaggtcaaggttgtggtgagccatgattgcaccactgcactgtagcctgggcaatagagtgagaccctgtctcaaaaaattgcttgaaaatcttgatgtttgaattgaaattttttttgagattcagaaaactaaagaaatataaagttaatgataacattactctaaaaccattagataaccattataaaggccattatataactttaatatatgttcttattcactatgtcctaaaaagagatactaacatatcagcttttaaaaatctgacttctagggccaggtgtggtggctcatgcctgtaatcccagcactttggaaggccgaggcaggcggatcatgaggtcaggagatcaagactatcctggctaacacagtgaaaccccatctctactaaaaatacaaaaaattagccagccatgatggcacgcacctgtagtcccaattactcaggaggctgaggcaggagaatcgcttgaacctgggaggcggaggttgcagtgagccaagatcatgccactgcactccagcctgggtgacagagcaagactccatctcaaaaaaaaaaaaaactgacttctagacttcagcttgtcttttccatatatgcaactaacttttcttatcctgtacatcagacattcatagtgatgatcttcattcaggtactactacattatcccagctcattaaagattagaactttacatattgtataatttaaggcaggtgaatacaataatttttttagggtggatattttgaaaacattaataaacattaatggttaaaacaagatatattctcttggtaaacttaaatattaagcaattttagttaactacaactttctctccaatatacacaaactcccagaatactcaggttaatgaaaatttgcttgaatctcacaacagaattttttttaagagacaagagagtttcactctgtcacctaggctggagtgcagtggtaccatcatagctcaatggagtcccaaactcctgggctcaagtgatcctcctacctcagcctcctgagtagctgggactatggccacagatcaccatgcctggcaggatctttttcttttggggatgggtattatttaatttccttggaacactaacaagctacttttaaagtgataaaatggatatagaagtactttaaaatatccaaagtgttatatatatacgaagttcccaacttaatttcttgggttcccaaagttctttggtaagtgattgtttggaagccaatttatttttcctgtagaaattatattttaaatgattattaacacccagcaaacttgtaaccatggggttacagattatttctctgacattatcatctttttcttctactttctccctccctagcttctcttccttttttttttttttttttttcttttcttacatttttcctgtgctgtagtgaaaggtgaagagtttgtggattatgagcttaggaatcagacagtccaggatttgaatgtaaaatctgccacttactacctgtgtgatctgagttttcttaacttccatgagcattaattttttatttttatgttataaggattagctggtaasgaaatacacataaagcatttactatgggacaaatacatgtttaaatggttcttccactttctgttcatactttaccattcatctacttgttgatctctgcttctatttatagaggcctactctttgatagtgactatggatatccagtagctcactaacaagagttataggaaatacttctctctgtctctctctctctctctaagggcaacctaattattctgacaaaccacttcctaattccagtgtatgtaacaaaaataagtccttttgcatttgattttattcatgacatttcttgcccaattgatctcaaatataaaagctactgagtaaacctggaaatctaatgctttttaaacttaaaatcattcatcaagtgtcccctagtgtatgtatataaggacataagaaactgaggtcttgattttctttgatctgttgtcttcaaatgcagttgactcttcaggatagcacgtggttttcttactgctccgttcaagataaaatgaatagaaaagagtgtacaggtatatttttacatgttggttgctaagagatttcccagttgttgcacttcaggaaacttcaagaatattttcattatctttctcatgttacccatgtgatggctagtgacctaaagtgggatttctgtgcagcaggcattataaacatcgggaagcacatgtagtattactttaaaggcttcacctgggaagactttctttagctttatgtataaataactgactttctttttttttttttttttggagatggagtctcgctgtgtcgcccaggctggtgtgcagtggcactatctcggctcactgcaacctctgcctccagggttcaagcaatcctcctgcctcagcctcccaagtagctggggctacaggtgctcaccaccacgcccggctaattttttgtatttttattggaggcggggtttcaccatgttgcccaggctggtctcgaactcctgagctcgggcaatctgcccgccttggcctcccaaagtgctgggattacaggcatgagccaccacgcttggccaataactgactttcttatatgtcacattctgtgctctgcctcttacaaacatcatcctaagtaatcctcctaacatctctctgagatgggtactatgtggcataggtgaggaaactaaggcccataagagtttaacaactcacccaaggttacagagctcatgactagcagagtttattgatttatcaggagtctacagggtgcttgtgtcacctgtaacctctgtggcattaaatattcctattaaaagcaaaaacattgctaacctaataagataataaattgagtcttgttttcatttatattctgactattagaaacatatttcttagtcactcttctgtgaattgtctagtaattttttttgcccatttaatcttggttttatggtttttcttatcagcctacatgaatgttttatatattaagtgtataaaacctctctgatattttcctagtttgtttgcctttaaattttgcttttgctatattttcatgagcagaagttaaaatctttacacactcagatctaccagtgttttcctatttagtttttgctgtggaatttaccatttaattttagaaagtccatccttgttaatcagttgactaaaatgcatacacacacacacacacatgtatttggaattttctggtataatatgaggttaaggatctgcattttctttttctccaaatagctcatttcataatacatgtgttactaatatgtgtcaccacagctgagaatcagctaggctttgaagtacataattttaccctgtaagtatctgctgagcctattttagtatgtcctatgtaatttttgtgttatgacaaaaaatacttgctctgttaagttttctttaaattattatttcattaaagaaacagatttttcttaatattttctttttacgctggacagtttttgcttggggtgagcccagggtatattttataaaccttctgtgaaaaaaaaattaattaacttaattcctattttctaaggatttaaagacagatatctccattttgtagaaattcttgattatcttggaggtgtggtgctgtactgtaaatgtagaaagccattatctcttaccctcgttcttttattttcatttgaaatattctgtagtttgttggatataagttctttcaggattgtcactcttcaccagaaaatcagtttcattgaattggcacaataaagaactctatttttgcctcctgaatgataaaaatcaatgcagtggggaaaaaatgtgcccataaacttgaccttttaatgatatttctcacatttaccattatggaaattaaagtaatgattatggcaattagtgtttctgtatttgctaaccgactaatttattattctgcttagtaagtgtattgagtgcctactaggtgctggtggctctgctaggtactgggcatcatgtataagaagcatacagtctatgagtttatacatgagcacgtggtgtaagtgggaacatcaagctagatgaagtgtggcacaaagagaaacacgaaggaaatgcaaagaaataagcttttggaagacttggttaaccattcaattcttaccaattttaatagattagcatttatgctttacaaggatataaggtttcttaatttatctgtcactatttataaataacaaaatactgtaataaagatagaatttagtttctatagcatgacagtgaaaacttgttcgttttagaaattttttcacatctcagtgatcatacaattgagatacggaaataatttactgcctatctagaatatcagtgtactaatcaaccctgtatcatgagctaaactgaaattagtacattaaagttatatgtcgatatctgctttcattggtttggtttaaattttgaaaaagtgtattttttttttcagagagaaaggagaacatttgtaatatgcaacctgatttcgataggaaaaatgtaacatgtctaaatagttttttttatttcatcctccttctgctattattttcacctatgttatgtagaatgtcagtgttcttaaagggcaggattagtatgtgattaagagcccagactctgggagtcgactgactgtgtctcagctttgctctataccaaccaccaggaagttgcctaaacactcaggtgcctctggttcatcatctataaagtgataaggttgttgtgaggattaatgaatgaatatatgtgaaatacttaaaacaatgcctggagcttaataactgtgtaggtattgctgctgctgcagaggcagcggtggctctggcagactctgcttctactcttcctccttcttgttattctactgttaatactactttaattattattgaaaagatcttccaagagttactaaaatcctttggtgattttgtctcaaataacaatgcagatgtgcctggaagataccccaggatagaaatctagtatagaaatattcctaaaactgcaaataaatttataaccattggttccttgctctgtcatattcactacctaaaagcaatttataaatagctatggaaaatgaactgtaatctttttagtaaatattatacatgggtacatttatacaaaactcagcatagtattgtttttaagtgatcagtgtagagccaaagatcaagaatgaaataaacatgttttatagcttacatgcagtaaaaatgaagaagtgtgccgactcactttagaagttggatttttgtttttgtttttgttcaattaatttgcacatgtgtgagcataactaagataactttacagatgcggacttgctgggttggaaaatacgctcactgtaaatttgtgtagataactgacaacttgcactccaaggaggttttgcagaattgcatttcaggggcttttcctaccactaccacccctcccctgcatgttctcttccaggcccatggagaaatcctgctgtagtgagtgagcctctggtgctgatggttatccttcaagtgtgttacagcagaagacagcagagaaccacagacttagtgccttcctccccactgcctctcactctaaatttccatcctcgttataccctaggattttatcaaaagttgccataaggaactaccatgttaaaagggcttccatttttatagtgcaacagcaattgaggatgttgccttcatgttggtcagtgccccataaaaaaacgccccttctcagaaatctcttttagaattttgtatcaggaaacattatttcttaacaaactgatttccttcctattatttttctgatttttctgaaagaaatctgacttctttcctattatttttaaaatagctttattgagatgtgatttacataccatatattttacctatttaaagtttacaattcagtgatttttggtatatttatagagttgtgcaaccatcactgccatcagttttacaatgttttcatcatctccctgccaaaaaacctcatgcccagtagtagtcactcctcatttccttctcatcacttcaccctcttcccccagcactaggcaatggctagcctactctctaattctatagatttgcctatttgggacctttcatgtaactcgaaactgataatggacctttgtgtctggcttctttcacttaacataatattttcaaggtttatccatgttgtagcatgtttcagcgattcattccttttttatggcagaacaatattccattgtatatatacattacattttatttacccattcatcaggagatgaacatttgggttgtttgcacttcttagctattatgaataatgctgctataaactttatataaaattattgtttaacatatttttcatttctcttgggtgtatacctaggcatgtaattgctgggtctatgctaagtcttacgtttaacattttgagcaacttccagactgttttccaaagctgctgtatcattttgctttcccatcaacactatttgagggtttctgtttctccacatctttgccaacacttgttcttacctattttctttttttaattgtagccttcctaatggatatgaagtgatacctcattgtggttttgattagcatttcccaaatgactaatgttgtgcattttttcatgtgcttattggtaatttgtatatctcctttggagaaaagcctatatagacactgtggctattttttaatgggktttttttttctttttattattatgttgttatgaattctttatatcttctaggtgtaaatcccttacaagatatctgatttgtgaatgttttctcaccattctttgggctgttatttcactttcttgatggatcttttgaggcaccagaaagttataattttgatgaaatccaatttatctctttacttcttttatcacttttgttatgatgccatagttttgtctaaatcagtcacaaagacttacttctatattgtcttctaacagttttatagttttaactcttacatttaactctttgatctattttgagttgattttatatatggtgtgaggaaaaggtccagcttcattcttttgcatttgaatatccaattgtctcagcactatttgtcaataaaaaaactttttttggctgggcatggtggctcacgcctgtaatcccaacacttttggaggctgaggtttgaggccaagagtttgagaccagcctggccaacatggcaaaaccttgtctctacaaaaaacacaaaaattaaccaggcatggtggtaaatgcctgtaatcccagctactcaggagactgaggcaccagaattgcttgaacttgggaggtgaaagttgcgattgtgccactgcactccacctgagcaacagagcaagactctgtctcaaaacaaaacaaagaaaaatcctttctctccctactgaattgttttggcaccctgtcaaaaatcagttgactatacatgcaagggtttatttttggactctgtattctatttctgtctctatccttatgctaatgccacactattaattaccatagcctttgtcctttccaatctgatactttttattactttttctttcccaatttccctggctggaacctccagttcaatgttgaatagaagtggtgagagtggatatccttgtcttattcctgatccttgggggaaagcattcagtcttttaccattgagtgtgagtgtgatattagctgtagctttttcatagattccctttattaggttgaatacattttcttctgttcctactttgttgaatgctttttattcaaggatgttgaattttgtcaaatgctttttctcagtctgttgaagtgatcacatagtgttttcccctttattttgttgatatggtctattagtaattaactttgtgatgttaagccatccttgcatttgtgggatagattctacttggttatgatgtgtaatcccttctttatgttactggattgggtttgctagtattttgttgaggatttttgtgtctatattcatacagattttgctttgtaattttcttgtgatactttgattttggtattagaataatactgacctcttagaatgagttgggaggtgttccctcttttttgtgggtggggggggggcacagtttgtgaaaggttggttttaatttttctttaactgcttggtagaattcaccagtgacgccatctagtcctgaactatgtgtggatgtgtgtgtgtgtttgtgtgtgtgtgtgtgtgtgtgtgtaaagtttcaatcactttatgtactttttaccaagctgtttagattttctattccttcttgagtcagttttggtagtttgtgtctttccgggaataattcatccatttcatctaggttatctaatttgatggcatgtatttgttgatattattctcttataatcctttagttctgtagtaatgtttctttcttgaattcttgatttagtaatttgagtcttctttcttcttttcttggtcaatctagctaaaggtttgcaagttttattgagctttttaagaaactacttttgattttcttgattctgtattgtttttctatactgtttcattaatttccactctaatctttattatttccttccttctgttgcttttgatttagtttgctctttttcatccactgtctttttttgtttgtttgttttgttttgagatggagtctctctctgttgcccaggctggagtacagtggcacaatcttggctcactgcaccttccacctcccaggttcaagcaattctcctgcctcagcctcctgagtagctgggattacaggcacacacaaccatgcccagctaatttttttttttttttttttttttgkatttttagtagagatggagtttcaccatgttggccaggctggtctcaaactcctgaccttgtgatccgcccacctcagcctcccaaagtgctgggattacaggcgtgacccactgtgcccagccatctcatccactgtcttaaggtggaaaaataggttattgatttgagatttttcttctgtttaatataggaatttatagctataattttttctctgagcattgttttacccacatcccattgattttggtgtttgtctttattttcattcatctcatcagaaagtatattagaatatattttctcatttcccttttgatttattatttgacccattagttatttagtagtatgttttcatttccacatatgtgtgaatttataagatttctttctgttattgatgcctaattccattcccttgtggtcagacaatatactttttatgattcagtccttttctatatattgaggcttattttatggcctagtatgtggtatatcctggtggaggatgtttcatgtacactgagaaaaatgtatattcttctcttgttggagtattttctaaaagtctagttggtttatagtgttatgcaaatgcattttcgataatgtcattccccttctttttttcagctgatgaacttattagtcctaaagacattgatcctgtccagcgctatgtcccactaaaggatcaacgtaacgtgagcatgaggttttccaatcaggtaaagaattattctatttcttgatttagactcgtccagagacatttaagcttaattgaagaggaaatttttgttctgaataggtttttgttgttccttctgacggaaaggtttctccctcttctggttagttaagatttacttgtggtgaagggctatttgttaatgaggaagtagatttcagatgggtccaacaaagtgccttgcaggtaaacatttccatcttcagaatgttgagtttaaggtgtcaagtgtctttgagaagaagcagtgcatctgggtggcaggaggaccaatgactgaagggagtgggattccccaaaaggcctgtgcttgatgtctctcctgtgctgtggctcttgacagggctgcgtgactgacagttgttacagcaacagtgacttggtgacgtgttgggcaaggaatagttttaaaatttttacatttagtagctatggattcagactgtgttgtgtcaacaaaataagtgtttgtaggatcagcaagattgatactgacttgagcaaaccctcaagtattaaatgataccagtaatgaggactgttaaaatgagaatgttgtggattgtggaaactgcctgaagagaaagggaatgaacctgcatgtgtgcctgggattctaagcagttaacatgcatttaataagattggtatcaacgcttacagaagataggcttacaaatggaaatgttccttatatttaaaaaaaaatgtgtattatacacacaaacacacacacacacacacagagcaataagtgcttgttttaataagagaaagggagagccaacagccccgttagattctattgcactgtttctctgactcttttgctggtcttcaacaaaacatgtaatgactctgagttgtttatggatgagaagctatctgagagacttgtaaataaatgctatggttttctcaagaacataaaattcctgtgttaatatgtgatgaaaatttctcactggcctgttagctctttatgtaagggggtatttggcctttatcttagttaccgctcatgttggtacaattggcagagttgttctcagcacttggcgacgtgttggggaaggaatagtttttaaatttttgcatttagtagctatggattcagaatgtgtcgtgtcaacaaaacaagtgtttgtaggtacagtgcaagtgtacagtctgtactgatttgaaatacaccattttacttgaagacatggcaaaatagagaattcatccaacttcatattaccagtgctatgactgagccattttaagactaatgtgtatcacttaaatagtatttcacatgtgtgacccacttctctagagtgatgaaacctcaaagccttttcttagaaaataaattaataggtcacagatttgaggtgtgcagacaggagccagagaacatcaaagcatttcataggcatatggctaacaaaatcatcagtttaaacagttgtttcatgcttgacacatataatgatggctgtgggttatgtgtaaattttggtgtacaatatactacttgcaactctttctctcctgctcaagaaagcttatcaggagatgagtgactgagagtgaattttaaagagaattcactctacaggtatgttttatctcaaaattactttgtactgctgctactgaattatctgtgtcatgcctcccaagtggagccacatcctagctaagagaaatgctcctctcctgtagccacgtggcagattacctctgtgcagtgttgtatacagtttccgagagggaggtgatggggagatttgcagcaaaaaactactgggagtggatatgtccccatgtggttggcagcttggttgtggtggtatataaaatactgaagctgccttgccactttctcagccattttaagcagtaggcaagacctggcatgcccatgtctgttcccggggctgggtgaagtggactgatgaaatagagtggtcagacatatccccagatgtgcagccctctgtttgaaatgttggtgtcagtagccacttagtcatgattgaccaggtcagattttgtaactaactgatctttgggaattcactaggtgctttaaaccctaccacaaattaggaaagtaaatagggaatagtaaagtccaagcagtttctgaaaatggtagaagtgcttgttcccgaaagaaggtatgtcagggatcccatgactgccctcagccactgtaattcactagaggactcacagaactcagaagctgttacacttagacttagggttgattactgtgaaaggatacagaataaaatcagcaaaaggaaaaggcatggggcaagtcctgaggaacctcagcacaggcttccaagtgtcttcttccagtggagtcaaatgagatgctcttacttactgtagtgaggatatgtcaacacatgcatagtgttgccaaccagggaagcttgctcaagcttcattgtgtatagtttttactaaaggtcggttatgtaggcatgcagcatctcaattgtttaagcaccagccagccccacagggaaaaaccagatgttcaccataaaccacattgttagtgccaactctctggacaaactggtacactgtggcccaaggcctcaggcatgcaaaacactcttatcatcttgtgagtcttttactttttctcaaatgttttctgtttctttatttttggctatattttacattaattacattttattaaaattttgtgtaattttgtgtaaccaccgtcacggtcaaaatacttaattgtaccatcccatatcaccataaggcttccttgtgttattcctttataatcatacccacttccttcaccccagttcttaacccgttgcaactactaatccgttctttattttataattttgtcattttaggaatgttataaaaattgaactgtacctaaccttttgggattggctttttttcactcaacataatttccatgagattcatccaagttgttgcatgtatcaacagtgtattagtccattctcaactgctataaagaaatacctgagactgggtaatttgtaaagaaaagaggtttaattggctcatggtaatttgtaaagaaaagaggtttaattgtaaaagaaaagaggttccacaggctgtacaggaagcatagcagcttccaggcttctggggaggcctcagggaggttttcctcatggaggaaggcaaagcaggagcaggagagtgagggggagggcctacacatttttaaacaaccagatcttatgagaactcactgtgcagtaccaaaaggggatggtgctaaaccattcatgagaactccacctccatgatccaatcacatcccaccagtccctaccttcaacactggagattacaactagacatgaaatttgggtggggacatagatccaaaccatatcacatagtttgtttctttttattgctgagttgtacgccatggtatggtggtacctttgtttaaccattcacacattgaagaatatcctacaggttattcgaacatttcttagaattccactttaattattcataatgttcatttataatgttttttcatatatcactttttaagttttcattagttggttgttctaggaattactgtatacatacataagttatcaaaagtgcagtggtatcattttgccactttaagtgaattatagaaaccttacttcttccattagtttcccttaccttcttcatttcttaaacataatttttaaaaatatttcctctgtcttcattgagcagcacatcaaattgtgtgaaaatttttgcttcaaccataaactttgattaaagaagttcatgggatgatggatagtctattgtactgacctcagtttttaccatttatgttctttcctttctgaatgtcccagccttcttctgttatcattttctttctgtttggagaccttcctttagacattatttatgggtaggtctgctagcaacaaatttcttagttttcctttgtctgagaatatctttatttcaccttcattactgaagggtagttacgttggatataggattcctagttaacaattgttttacttcagcactaagaaatattgtgccacttcctctggcttccgtagtttcaaatgagaaattccctgtcagttcaaatttgtttcctctacagataatgccccatttcttcttgtcctaagtctccttatgccactgggtagagggccagaagctaccaggctcaggtgacatgggaggatcaacctaattgctgttgcccctgctgtggagcaggggtcgagtagacctgtcattgctttgaaccctctgcaggtgaattggactgcccaagggtacctgagtagtagaacactgtggagtcaggaaagccgtctggggcttctttgttgatgctgcaaatatgttggcccatcagcgctgtggttgtgaagcagaggttgggttggctcaccaggactttgaagttgctgctaaagacagattgattggccaactggtacctcagttgaagagctgagattagagctccccacttggtctctgttgtgctttgcatttccctatcctctggtgagagaaaacagatttttctttttttctatgcctattggttatttcaggctgcagactcctgcactgcccagcctagcatatgtgtagtctcaagagtctcactgcattgccattcttcaagtgctgaggcctctggccagtccagtctgctttctttccagctttcagaatcctttaatagttatctgtctaggccatcttgttcctacttccaatttttatagtggataatgtatgttcgtaagtctttctacaagtaaaaaagatttattctgttcctttactcatcttttttcttcagagtaattttttaaacaataatggctatcatttattgagcatttattttttaatagcagctttattgaagtataatttgcatcccatacaattcactaatttaaagcatgcaatgaaatggtttttagtatatttaccagaaccaattttagaacatttggaactattcagatactgcggccattttttaattgtttctttttattattgtattgtaacagttctttatgtattctgagacctttatatgattgcaaatattttctcccattctgtggattatcattccagtttcttcttggtgtcatttgaagcacggaagtttctaattttgaagaagcctcatttatctatttttttcctttagttgcttgtgcttatggtgtcatgtctaagaaagtattgcctaatccaaggtcatgaagatttgtgtctgtgttttcttctaagaattttatagttttagctcgtatacttagacctgtgatccattctgagttaattttatatacggtgtgaggcatagagccagcttcattctttgtatgtggttatccagttgtcaccatttgttgattctccacagtaaattttttctttttttaaataaagtaaaatatatatgatatataatatatcaattaatatatattttatatatttatatgtaaatataaatatatatttataatatataaatataaatataaaacatatgttaatatatattttacatataaatatcatatattaatatataatattttacatataaatatcatatattaatatatgatattttacatataaatatcatatattaatatataatattttacatataaatattatatattgcccagaccagctcggctgtgtagaacctaacccagcggtgctagaggaattaaagacacacgcacagaaatatagagtgtggagtgggaaatcagggatctcactgccttcagagctgagagccttgaacagagatttacccacatatttattgacagcaagccagtcataagatttaaagggatgggctgaaataaagggatgggtctggctagttatctgcagcatgaacatgtccttaaggcacagatcacttgtgctattgtttgtggtttaagaacaccttaagtagttttctgccctgggtgggccaggtgttccttgccctcattctggtaaaccaacaaccttccagtgtgggcgtcaaggccatcatgagcatgtcacagtcctgcagagattttgtttatgtccagttttggggccagtttatggccagatttgggggcctattcccaagaatatataatgtataaatatacattatatataagtatatactaagtaatataaatatatttatataatataatgtatataaaatatataatatttatatataatataaatttttttatatatttacatataaaacgatatatatcatttcagtcattcataagtgtacaagtcagtggcaataagtacatttacaatgtatcattgtagctattgcctctatgtatatgaaaaccttttttatcatcctcaacaaaacttctgtacccattaagcagtgaccctctttctttcctccctccagcccctggtaatctctattctactttttgtgtgtatgaatttgcctattctagttacctcatataagtggaatcatgccatatttgtctttctgcgtgtggcttatttcattaagcataatttccatactaatgtttgtgtgtttcattaatatggtgtttttctttcctcccactggttattttgtcacatacctggtatttctcatcattcaatcatatattagtgtgataagtgggctgattattctcagtgtattaagtagtagtctgctactcccaccatcccatccagaggtgacggaaatgtgatgggagttttgtctcctggctaaccttattgatgagtcagggatctggttgggaacaaagaagactcttatcacccttgccaaatgccagaacatgaaaggctttaagaatctgttgtttgcagtggaagccttaactcatcccagccagcttgttctatatatttggagaaaagccctgctttattgctgaccgtgattccctgtgtggtacatggggctggccactgtggcctttaatcagtccttctattcacttccgcttctcccacctttactccattgtgcttgcaaatccagtgcccctctggggcccttctagttggtgagtcagctcccatacctgctgcagcactttggtgatactctaagtggtatcgtttgttttatgcaagttttctctgctctgctttattcgttaatgcatttttatttgccatcttttacactagaaatgtatttaaataccttgttgtctcatgaccttctttctttttttcattgctctggcttagtcttttttgtttattttaaatctgtaactggtcttttctctggggtctgaagagagatgagaactgagagcatatgtgcactctgctctctggaactaggagcccaggcctcacctgctgtgcttgagtctttcctcgttatttctgttgagtgtctttttctccttctatactcaatgtttcttcagatcttagggaataaactgaacactgtgatatatatgaatagagtagatatttactaaataattatgatgtccccaaatagatacaaaccaagtaaattaaacaccagacttatttatgttgtctgagaaagtcatatttgaaagaaaatttaccccaaactgttcgttggaccatcctttattcttataaacaggtctttattcttataaactttattcttagaaaaacagtgtctgcttttctacccccacttttctatgtcacatttgatttggggaaaataaattatacaaaataccatattatcccatcctataaattactcccggaaaacaagtcatgtgtttagaagctgtgccattaagactgatttcttttgcatactttgtgttacaacacttgtcactattgcagttgttggtttacatgcctgacttcctcaaagaggtcctgagagtagagaatgtgtcttactcttgccttctcttagcctagtttggtatttgacaggaccagagaatagaagtgatagatacaatgataactactattgattgtgtttcttttgtttataggcactgtacatgccacttctacccacattatatctgattttaacatttttttctgagacaaatattatatccattttacaggtagacaacgtgagtctcagagaggtttagtaatctctccaaggtcccacagttgtcaagtgacagaaccaatatgaaggcgttaactgaagaatgaaaggaaggagggaatgtcaagcatttggaagcagtgatttttgtaatggtgtgaaggagttaacaggagaaatagcttgttcttgaacagcctggctgaatatcacatcataggaacacagttgcaccggtgccttaggatgctgagagttctgtgaaagtgatctgaaaaattaaacacaaagatgccccatcagtacaaaatgtatgctgggattcattatatcatcatgttaattatttccttctttcttcttccctgttatgctaggatgaaaccaagtccacaaatctataacagtaattttagtagggattttcttcttccttatccaaaggaaaacgctttcaggaggtgtttactccctctccccattcaccctaacttgttcctgttaaagggcccatcatcttctgttgcctaggtaattctagtgcccactgattatctacgaatgataccttcgttgttcatactgcagcgcctctgccatgctaatgtgagataatggtttcttgaagagtgtttgtttccagcctttgcagctcattcaaacttgggagagctctggttgcagcagaaactgcaagcagctggccatatgcattttattgatttattgtattttgcgttacagttgtccactaggtataaggtgacccttagagaacatctatttatagtaactaggggttgggtttctggagttctatagcaaatggacttatttttacatgtgtattatactaattagaatacagaagattcctggttaaataggaaaatacacctaatacctttttaaatgtttttggaatattgtctgaaactattatatttaacaggcaatagccagccaggaattgcttttttctcccttcattttgtttttaaaccaatttaagaaaaattgatgttttttctcaaaatagatgttgttggatgcagcagaatttttacataaataagccattctagtgtcaaaggaagaattatagaaaaaaatattctgatatgaaaatgctatttcaatattcaagagtacaaataggaaaggtttcatattgttggatgttctgcctagcaaaatggttaagaacacaggaggcacactgcatgcttctgaatccaaccttgggcttagcagttgttgttacttgtattttgatagttccaatgcagacatgacaattaattgaggtgcccagtagttaatataaataaaagatgcaagattgtattctattgaacatggttcatggtggaaattaacctatgggagcagacaattcttggaaggccaggctccaggcttcattctttcccacagtataggtaatgcagatgctggagtaaagagatgttctggccgggcatggtggctcacgcctgtaatcccagcacttggggaggccgaggcaagtggatcacgaggtcaggagttcaagaccagcctggccaacatggtgaaaccccgtctctactaaaaatacaaaaattagccaggtgtggtggcgtgtacttgtagtcccagctactcgggaggctgaagcaggagaattgcttgaacctaggaggcagaggttgcagtgagccaagattgtgccactgcagttcagcctgggcaacagagtgagactctgtctcaaaaaaataaaaaatataaaaaaaaagagatgttctaggaagggcaggacagtataatctagcaagaagtttaaaatggtataaagtgtaaagaattttgatttcttggttcaggaaggctgactacctcattggctgggaggagcagcaaagcactggcagaaattcaggtactagttctttagaccttgtgtgattcactgcagtataatctggggaaggactcctagcatctctggagtgtagttctctaatctgtaaaattatttggctgggtttaattcgtaaatccccttccagcgcttctgttgctggcttccataatctaggttattggtaacctttaagtgactttagtggagtagtgtgcccagtcrccagactgtagggagttaaaaaggaattatatggtggaagaccatctgctcaggaagttgagtttactgcaatccaagaaaggttataaacccctcctaatttggtagatacattatatagcactcctacaatatggacttgtagcgatttccctttttaaagttttgttctaaatctattcagtttttaaagatttattagtctttaaaaagatttaaggatatttaaggtgatttaaggaaatcatgcatgtggctcagttttatctggctcagtgtgttctaatgctctcaaatagtttaaccagtttgagacataatttctacttaaaagattaaaaaataacaacaacaacttcactagcttggcaaagaaataaagcgtttgtgtgggaccaaaaacccaagcatgggagtgaatttgagtactgaatagaagttcttatgattatcttagtaaaacagaataaaatagtcaaggcatcaaagatgcttctgagagagcctagcctgaatatgccacagccgcacagagtttctcctcaggtaattctgtctgctgtcttgaagggtaatgaagagtctcttatcaattggtatttatacctgagccaattaaaattcaatgccttgataaaaaaaatccagaactgagaaaagttgaattggaagtcaaaaaaatgagcttaaacacatttaataacatcattctaattaacccatttaacctattaaaattaaaagtttcaataataggcatgatgtataatgaaatatttcatctacaggatggaaacttcttatactcatggctaaaatgtaaaagaaggaaaaatagaagtaagaaagcaagatttatggtccagaataaagatatacaaggattattatgatctagtattgttttaatgaatctatatttctgacatttttctctaaggaaagaaatctcagttattcataaatatgaataaatttgtgaacttaacctgaaatttacctacttcacgktttttcctgttttgaatctattcacatttttaaaggtctagtgatctttgaagaaaacctatcaattaacgccttctagctccaccttgtttaataatctatatcctgacaagttgcccccttctaaaacaaaggattgggctttgggagtgtctactttcttgaggaatgatttttctctcatgaggtccttggagagttccatgtatttttgctgtcatgcaggtgaataaaatacaagtatttttggtcagctacttgaggcaatattttactttaatggcagaattattatgatagagcagatcatgtgtattgacacacccttgagagaattcagtttcgcattcagtgacacccaagctttgaatctgtgaagtagactagcccatttaatatgccaattaaaatggattgatctactttgacagtctttggagaaaaggccaatatgaaaggaatgctttttagtcataagagcttattttctgtgctgcaagtttccaaattgaggatgaaagtcagtacttgtttgctaaatcatgtacatatttatatagatctcagctaaaaacatatagtacacttggtctctcatttttcaaattaatgaggaagtgggagtttcatgctttctcctctaaatatacaaatgcatagaattttgcatgaattactttcttaaagatcaatgaacactgcatatatgtgtaataaatttttgtttttaaggaagtaatatagtatagtggctttgcatctcatacaggcctagctataaaacctgtctcttccacttattaaatgtgtgaccttggacaattgaattaatctctctaagccccacttttgtcatattttaaatgggaataatgatccctaactcagggttgtgtttatgattaaatgatagtttatgtaaacctcttaaccaaatgtctgacacattatgcaagctaaataaatattattgctgttttttatttcaataatttattatataagtaatatttctttctcattaaagagatgagaaaaaatcctaaaaagtctagaggaaaacattatattttcaacatttcggatatattttttagtctgtattcaacttagaaagaaattgaatgtttagcatttaacctgttagatttcttttatccctttgtgtgattaagactatcactgtatagacagaagccattgttttaatggcttttgaacttggtttttttttttttggttccattttttaatggagctaattttttaattagctccatatattgacagttttgatttttttttttttttttttttcttgagacggagtcttgctcttgttgcccaggctggagtgcaatggctcactggaatctctgcctcccgggttcatgtgattctcctgcctcagcttcctgagtagctgggattacagggacctgccatcatgcctggttaatttgtttttgtatttttaatagagatggagtttcaccaggttgaccaggttggtctcgaactcctgatctcaagtgatccacccgcctcagccttccaaagtactgggattacaggcgtgagccacctcgcccagcctgacagttttgatttgttatagataaaccttaattgcttatttcttcttctcagattacattattctgttgtgtcctatacttcttaagaatggtattgaattagaaatatcagaatataatgcctaagaaacctgccttttgaaaatgttttgtagaagctcaatgaaggctacatattcatataattcctataatttttgtatattttcatgaataattttcataaactttacgaatctccatgagttttgagcaaatatttatattttaatgttctcctcatttatttctgtgagcatctttattgtttccccaaccttatttaaaaacatcttttatgggatcctgtggtttatagaaccaactggtttatgaagatgaattgaaagggacactgtaacatggtcaggtatctggacactaattatggctcctaatcatatcattaatcagaagaaactataaattcagcccaagaagatgaatttaatatggcaaagaagaatgaataaccctatgtagcagaacatgagcccttccttgtacttaagtcaaaattgtgcaaagtgggagatggagctttaatttctcagaagggtttataaaagtaaaattaaaactagactaatgggttctagtacatgccaagatcattgcttctaattacaattggaactcttcctctgaatcccagaagactaagaaaaacctctatccccaggcattaactcacccagcttttttccctctacctttggctgttccaattgatattcagtctttcctctatattttgtacctttctctctacttacttctttccctgactgtatttaagtgctccgcagctattcacctctctcaagggcctgtcttacttcccttctttccttccctttcagacagcttagaaaaatgcttgcaccatcttcatgtcctcagttctcagtcactccttgtaatgcacagtctggcttcttacactgtcactctacaaaaaccacatgcaacaagttattaatctcctcctaatttgataactccaatgatctcttttcagatgccagtctatttgacttcaaagacattcaacacaattgaacactccttcctcctttaaaccctgtaaaagcatagaattaatctttgattcctgtctgcctgcctcacctcttctcttctaaatccagtcctatcagaattctgttttctaaatagtccccaaatattttcactagttccctcttcccgcctcttcacttcactatagtccaggtcaccattatctctcaactgcaggctccaactaatctccatatgtctactctgccccgtgcaagtcatctctatatggcagcaagagagccaccatcatgtgagttaatatgtatgtaaagtgtttaggcagggcctggcccatataagtaccatatatgtgtttattactattgttgtagaaatgtagattatattgagtcttttccttgtttgaaacccttttaagtagcttttcattccacttagatgaaagccaaatgccttgttgcctgtagggccctgtggggccttagctgtctccacccttatctcttgtcactcttttgcttgcctgttatgctccagacacactggtctcctcttagtttctccagcacttcagggtctctcctcctcagggcctttgcacactcttccttctgcctgaagtgcctgttaccagaccttagcacactccttttagtctctaagtctcagatttaatgacaccctctaagagttactttctgaccatcaatctaaagtagcctctgtcttcagttactctaatatattaccctttacttttattatgtttatttatataaatttaatcatctttctcactgaaatgtaagtttaattagaggactttattgtcttaatgacacatagtaaaatcactattaattgaatcaattcattaatggcaagtttttatcttcgagaacagctcagataccttttctataaagtccttgtcaattccctgaggctaagttggatgctccctgtcttgccctcaaagtacccattaagagcatcgtatttaatatcctactgaagtccttacgtagttgtcttctctcttatatggtgagttcataaagaatagagaaaatgtttcattcatctttctgccatcctagtgcttactaagtctggatgcatgaaaaactcagcaaactctcaagggttcctcactagcagaaacctttctagtgtayaaaactgttaaattctctcattgatatagaaaacccttaggtttacttgcaaagagtgatggtggagtatctcctctgcagttgggtcccctgtgtgaatccgcactagaaacagtttggcctcaactcagtgaagatggctctgtggtgctaaaggcttgttggattctagagcctgctgggtgcctctgtagttgttgggtttgacccagtgatgataaatcttgcctcaagttggcccttgcattatctttccagcccagtctttttgtcatttagatgagcatcaagtgccaaagaagaaagtagagcaggttttcatgcccttcccctccaaggcctctcttcttaggtggctttcacactgtaataactgcacatatggcctttgcattcatttccactcctaagtggaatgctgcacttggcaattctctagtgaactgaaaagtttatggtacagccagtaagatgcagcagtctgacttagcgaagagaactctagaacaagtcagtccagaaacagagattctgcttctgggactgccactaacttgtaaagggacctgggctatttcccctctctgggcctcagtcttctcatccatcaagtggattatgattttatcaaggaaagccaattttcagacaaaatcttaagtagaatttcagcatataaaatagttgtgctgctctggctgaaatggagtcctgccactagtctctctcgtagacccctcctacagccaaatgatagaaatggccccctcccatctctgacattttcaactcaaatcccagggaacagatcccgttggtacaagcatccgaaggagaaaaattaaaaacacatcggtttactggacttgcttctttttctcccatgattctaaaacctggtttcttatggtttaccactagggacctttctttgcttgtaacccaccacctgaggtgtttctaaatgaccaaaaaacctgagagttaaatgactggattcttggaatctgttctcccctttctgcctcttcctgctctgtttcaccctcatcttacttatctttcctgatgttgatctttcctgttgtgtttctatggcgttctcgtcatttgttcttcccctttgtcatgattaaagctatgagaacaccgtaggtcagagtttctccacctgggttcatgtggccattttggcattgtttctatgcagtatgcaagactgttagcactgtcatttccttaagataaaaatatagaaacaccagttacagcaagtacttagaaaggggtgaaacagttttacaaattacaaatcaattcattgtgacaaagcgttcggtattctcttccactataatcgcagtcattgaaagaactgctgtcaaaaagcattgcctgatttattcatttgggcatttgaaacaatgtgtttgaggtctgggaatacttttaaaaattcatttgttttcctcttaaatagaaagcttatataatcactaatccaatatataaatacacagagcctaaaggaccattttctcccaggccaagttgactcttgagccaagtttagctttttaaccatgcttgatattgktattcctctgatatttctacttaactttcctctgctttcctattaattttcacatgttgctgctttggcttggttggaaatgtcagaacaagatgccagtgtgtctcagtcaggacatggctgtgttcaaactactgtagcctgttacttggcttctatgggaaaaatactgggggtgcagtgtttccagttggaattgagatgtataaagcatctgcctgatttcttcagctaatgagkttttgctgaaaaatgagtgtaatgaaaaaatgctggatgttggcaggacctactgatgaagtctaatgagcataaatgagtgttctgtaaggcccccaaagcagaggcatagaatgtttcaaatacactgcccttgagcaagaccagcctggaggatgcatttatttgttggctcctttttctttccttctctccctcctcccttgcctttctttcaataaaagacctatgtaagccagacacagtagattattttatgcaatatagggcatattaaaaataaaactactggccgggcrcggtggctcatgcctgtaatcccagcactttgggaggccgaggcgggtggatcatgaggtcaggagatcgagaccatcctggctaacacggcaaaaccccgtctctactaaaaatacaaaaaattagccaggcgtggtggcaggcacctgcagtcccagctacttgggaggctgaggcaggagagtggcgtgaacccggcaggcagagcttgcaatgagcctagatcgctccactgcgctccagcctgggcgacagggcaaaactctgtctcaaaaaaataaataaataaaaataaaactacttagactagggctcaatacaattgcaaaaattagaattatgagctttacatgctatatgatttaacagaaaaggcagtcgtttttatatttgcttatcaagaactaaagaatttaaagttcacatggaaccaaaaaagagcccgcatcgccaagtctatcctaagccaaaagaacaaagctggaggcatcacgctacctgacttcaaactatactgcaaggctgcagtaaccaaaacagcatggtactggtaccaaaacagagatatagatcaatggaacagaacagagccctcagaaataatgccgcatatctacaactatctgatctttgacaaacctgagaaaaacaagcaatggggaaaggattccctatttaataaatggtgctgggaaaactggctagccatatgtagaaagctgaaactggatccctaccttacaccttatacaaaaatcaattcaagatggattaaagacttaaatgttagacctaaaaccataaaaaccctagaagaaaacctgggcattaccattcaggacataggcatgggcaaggactgcatgtctaaaacaccaaaagcaatggcaacaaaagccaaaattgacaaatgggatctaattaaactaaagagcttctgcacagcaaaagaaaccaccatcagagtgaacaggcaacctacaaaatgggagaaaattttcacaacctactcatctgacaaagggctaatatccagaatctacaatgaactcaaacaaattgacaagaaaaaaacaaacaaccccatcaaaaagtgggcgaaggacatgaacagacacttctcaaaagaagacatttatgcagccaaaaaacacatgaaaaaatggtcatcatcactggccatcagagaaatgcaaatcaaaaccacaatgagataccatctcacaccagttagaatggtgatcattaaaaagtcaggaaacaacaggtgctggagaggatgtggagaaataggaacacttttacactgttggtgggactgtaaactagttcaaccattgtggaagtcagtgtggcgattcctcagggatctagaactagaaataccatttgacccagccatcccattactgggtatatacccaaaggattataaatcatgctgctataaagtcatatgcacacgtatgtttattgcggcattattcacaatagcaaagacttggaaccaacccagatgtccaacagtgacagactggattaagaaaatgtggcacatatacaccatggaatactatgcagccataaaaaatgatgagttcatgtcctttgtagggacatggatgaaattggaaatcatcattctcagtaaactatcgcaataacaaaaaaccaaacaccgcatattctcactcatagatgggaactgaacaatgagaacacatggacacaggaaggggaacatcacactctggggactgttgtggggtcgggggaggagggggggatggcaatgggagatatacctaatgctagatgatgagttagtgggtgtagcgcaccagcaaggcacatgtatacatatgtaactaacctgcacattgtgcacatgtaccctaaaacttaaagtatataaaaaaaaagaactaaagaattatattctatcaaaaagcagataaggcctgtaatcgtagcactttgggaggccgaggtgggcagatcacctgaggtcaggagttcaagacctgcctggccaacatggtgaaaccttgtctctactaaaaatacaaaaattagccgggcatggtggcacatgcctgtaatcccagctactcgggaggctgaggcatgagaatcacttgaacctgggaggcagaggttgcagtgagctgagatttcgctgctgcactccagcctgggtgacagaagggaaactgtcgcaaaaaaaaaaaagaaaaagcagataagaaaataggtttgtaaacaatgcttggaattgagttttcttaaaacctgatctcaggtgtctgaagaagagactgttggtgagatttggcagactctactccccatgaatgtagcatgttcctgcacccatgtgattgttaattttacatgtcaacttgtctggaccacaggctgcccagctatttggtcaaacactattctgagtgtttctgtgacagtgtttctggatgaaattaaaatttaaatcagtagactgagtaaagcttattttcctccttaatgggaatgggcctcatccaatcagctaaaagtctgaaaagaacaaggctgacccccgctgaggaagaggaggattctgcctgtgagactgccttccagctgggacatgggcttttttcctgtctttggagttgaactgaaacatcagctactcctgggtctgagcctgccagtcttcagactggaatgacactgtctgccttcctgggtttaggccttcggactcagactgaaactaaactgtcagctctcctgggtctccagcttgccagctcacctgcatatcctgagacttgcctgcctccgtaattgtgtgagccaatccatatgataaatctctttcttcttcttccttcctctctctctttcctgtttctctagagatctctgcctgctatagcaagcagcacataatctgtgaaatacgtactgtgacatgtgccatattgatttcagacctggacatacgtgcagtcaggttaaactctatcactgactagatgtgtaacctttgacaaattattaaaccgctcgtcacctcagtttcctcatctttaaaatgggagttcttgtgagaatactcaaaaaagctcttgaataacacgtggcacatagcaagctgtcaagatgtattaattccttaacattccaaaccagactacaaaacaaatgtaagcaagaacataatgagataactctttttttattgtactttaagttctggggtacatgtgcagaatatgcaggtttgttacattggtatgcatgtgccatggtggtttgctgcacctatcaacccgtcatctacattaggtatttctcccaatgctgtccccccgctagcctcccaccctccgacaggccccagtgtgtgatgttcccctctctgtgtccatttgttctcattgttcaactcccgcttatgaatgaaaacatgcagtgtttggttttctgttcttctgttagtttgctgagaatgatggtttccagctttatccatgtccctgcaagggacatgaactcatccttttttgtggctgtatggtattccgtggtgtatatgtgccacattttctttatccagtccatcattgatgggcatttgggttggttgctattgtgaacagtgccacaattagttcaaccattgaggaagtcagtgtggctattcctcaaggatctagagtcagcaacaccatttgacccagcaatcccatgagataactcttatcaacaagctgtcgtgtatttccatatgttgtaaatggatgtctatgcttctttctgtgtcaccctcctagaaaagactcagacacttctcactgccccctccccaaacccaaacctactgatcttttcttataatagtcctccagttacccacataatccagtggtagcaatgcctctgaatgatttagtttgagtgcttagtctacttttataagcagaattaaaacctgatgtttaatggtgccactgtgtaaccataaccatttccagagatttcagtgtaaaaggttgactagccttaattgattatcaaaaggtgtaaagatgacattagtacatatggtacatctacaaaatggaataccaagcagttagagtgaaaatgaggacgtgttctatgtgttaatatatgaaaagagttccatgatatacaattattaactagaaaaaggtgctgagagtaacttttgtgtagaaatgtaagaaaataatatatatttgcatttgctgttgtaggcatgaggaaatgctagagcaaggcataaataatcatagcagtgattsgttgttagatggaggggaactgtggggatgaaggccccaaatgggaatgacatgtcaccaaaaactttttcataattgttaaatttttgagccttatgaatgaattatctgttgaaaaaattaaattagaaaaaaagagcaaggaaaagaaacactattagggcacattcacattaagttttctctgtgtgccctttgaaagttgtattacactgttttatttatagcccccagctgcaaatatcctggctttactactttgacctgatttgagtaatttaaaaactagaatctagacagatagacatgcagtgtcttaattaccgtagttttaaatttttagcatgatgagttgcaatattaatatagttagtgcccagcttatagagaagttatgctataaaagttcctcttccaccgtacacttaaaaatggttaagatgttaaatttaggttatgtggggttttctttacaatgaaaaaatcttagaaaaatacaatctgactttatagaaatgaaaattttgaatgagaatatttctaactacagggttttggtcctaaaccatattgttactctgacatgtacactcttttatagtgtatataaatgtgtacattttactgattattttcttttgttaaaagtatccttgtttatatttgcaaacatttgttgggtatgctcaagggaagatttgtgtattgctaataaatgtaaccagcaatactaaaaaaaaaagttcctcctccaaaccgtcaaatgaataacaattgcttttcttttagtgcaaggtggttcctacatcctaagtgagaaaagtaagcatgaggggcccctgtagtttcacagaccactcatacacattctaaaagctaaataacccttccaaaggcatggcatgaggtgatccaagactcgtgccaagtgtctcatacaggcagtgccagctattcctagtagggacaaaagatatttggataccctggtgtttgggggagtttgggaggagactaggttaaaagagcgagtcaggatctggatagataaaggaatggagagagcagtccaaacgtaaagggacagtggacagaaacataagatggacatgagtgaactgttttttagtggagtactctaaaacagatgggagaccaacagggaacagcaggtagtccctgagctgtaaaagtcctcgagaagtttgggctttatttgggaaacattagttttggggtagaggtaatatcctaaatattgcataactatatctgtttactaactcttctctgtctcttttcttcatgcattcaagaaatattttttgaccacctcctttgtgcaaatcattgatacaagaaaatgaacctgaccataaatcgcagacaatgggcaaaggcaagtgtggagcagaaagctgaagaagcctattgcagtgacccagggttgtggttgtgttgctggcattgatagatggctaattttttttggacacttactataggccagtgttaaatgcttatatattatgtattattctcataaccctaggaaatagttatttttattattctcaatttatagatgaggaaactgcagcttattgaggttaagtgacatagtgagtcacacagcaaataatagtataaatatcattgtgtaacagatcaaagtttgcaaatattttacatgccctcttttgtttgatcctctccttttgtggtaggcactgtaaatatttttcccattttacagacaagcaaagaattgagaaacttgcatgggcagtcattcatcaaatagtaaggatgcctactatgttccatgtgtggggaggtggcagtagaccagctagatcaagttccctgccctcagggaggtactttctgaagggaatgaataacaataaatgatataatttctgtatcggacaggtactatgaggcagacaaaataaggtaaagtggtagactggggttggagatgcctgaggagaacaactttggccatggtggagagaggaggcctatgtggcagggatgatggttgagacctgtatgaccagagagcattcattctgcaacctggaggagaaaacacaccagacagctgtaaccagtgcacttgatgggaatatagttggtatgttcaagggacagagaggacccagggtggctaaaacatggtgaagaagagaagggagaataagaaagcagaggcaagcatgccagagctagatcatggagggcctcttgggcctgataagcagttttgttatcattttacaggaagttactggagagttttaggcagggtgttcataagcatgtgcatgtgtgggtggggtggagtagtagtgagatgatctgatttacactttttaattactgttttcaggatggactgctgtgaatgggtgggatggggtttaagactgaggtaagtagaccagttacttaaccaagtaaaagatcatggttactttaagtagagtagtattagcagtggagaaggagagaagtggtgtgtttgagacatattttggaggtagagccaatacgagttcttcgtgaattagcagcacgtcacagaggcatacagtatactataatggataagtagattggattgcgcatgtttgaatctccatgttgccacttaatagctttatgtattagctgtatgatgttggataagttttttaaccactctttgcctcagttttctcatcagtagatgagaatrattatagtaacctacctaataggggtgtttaagagtatataatttaatatagccacctgattctcaataagtgttctcagtttttgtcactgttttgttttggttttttagctgtttttggttatggggtttgaaggaaaaaggaatttaggatgacttacacattttttggccagagcaaatgagctcataatatggggtcttatagagataaggaatgctttgggagtcagtagatttaaggatggagatcaggtcagttttgtccacagtaatctaaggcacctatcagatgagcaggatcattgctggaggaagtgacaagataggacttgtaggtagatctttcaatctaaagtctgcctgctttctgctctttgagaggcaggataagtgagtgactatgagcacagaatctgcagtcagactgcctgggtctgaattctagctccgctaggtctgtgtccttggataaattgcttaaactttctgtgcctcatttttaaacctgtaaaatgggataatagtttgataaagcacttaagcagttcctggcatgtggagtatagttatataaagtgttcgctgttgttgctacttttaaatcctgaatattgctatagaaatgcaaagaaaacaacattcaagatactgtgtgaaggaaggactaacaggattctggtgactaattgcatatggaggttatgtaaaaggcatcaaagatgattctgaggttctgagctagagtgacccattaattgagggttaaaggataagaacctgtttgggatggaggtggggttgatgatgaggagttgagttttcaatctattaactttggaaatagccaagagaaaatgtccagaaaacagtttaaaatgtgggaactagaacttaagagaaaggtcaagaccagaaatataaacatggaagcatctgcttataatagcagtggcaacctgtctagggcagccactgtggggacaccagctgcagcaggggaagtgtggccagggctgcacacttcatggagccagagggggccaggaggaggcaggagccccactccctactgagttggtggggcaggggccccatgctctcaggtgcagctgcagctgcccagccgcagctccagacccaggcatcactgcactcttgggggcctgggaagcccccggtccccacaggttcagaagtgcctgctcccattccccactcccagcacctgcagcagtacggaacaaagttgtgactgagcctgggtgctgatgcaacacagctgggtgtgcgcacgctcagggcagtgttgacatgccatccccctgctgcctcagccccctctgggctttgagcgccgatgagcacaggagggaggccggtggggctaagggcagcttgttgtgggcctgcaggtatcccttggcacaaacagcctgggcaccatggacagcatgttgatgatggcaggaggaaaacaggctcctgggcgggtccctggtgaaaccctgccttcaaaccagggatgacctgaagcctgggggccgggctgccacccctgggtggagtctgcagcccagagtgagaaactgtgctttttccgggcccacccatggccgcccatggaccgatcagcatgcgcttcctcccttctgagcccataaaaaccaccagactcagccagacttggacagatgtagggactaccagctgcaggaaagagttacccacttcaggtcttcaggtctccttgactcattgggatgagctgcctgcagaaaggagctcccactgcgggtctcctctcagctgagagctggacactcatcggaatggcctgcctgcaaaaagtagctacccactttgggtctcctgggagctattatgtcactcaataaagctcctctccgccttgctcaccctccagttgtctgtgtacctcactcttctggacatgggacaagaacttgggactcaccaaatggcaggactgaaagagctgtaacacaaacaaggctgaaacacgcaccccccacccaacacctggctcaccctcggcaagtgtgggatccaggctggtagtgcaagctgagcacagcctacaggccaagtgggtggaacgagcccagtaggtgtgggcaatattcaggtaaaaggctccaccagccacagaggtttctggctggcaaagcaacaccccaaggatcccatgacacttagagataatagcttaaagctactagagtggatgagatttgagaaagagagaatgaatagaatgaatatgtgaccatagacttgtgttaggattatgtatctccaaagacagggcaggatagattgtagagggcagaagtacagaggcaagaaaggtaaggacatagttatagtcttatatttgagaaatgaaaggaaaaaaatgggtagtagctaagtgtcttagtttgttcaggttgctataacaaaataccataaactgggtggcatatcaacatcagaaatttatttctcgcagttctaaaagctgggtgatccaagatcaaggtgctggtagattgagtgtctggtgtgggccttctctctggttcataaatggtgccttctccctgtgtcctcacatgatggaaagggtgcagggcctcttttataaggataccaatcctgctcatgagggttccgccctcatgacctaattacctcccaaagcacccctccccattccccagccccttatcccctgccaataccatcaccttgggggctaaaatttcaacctgaatttcaggaggaacatgcacattcagaccatagcattaaagaaggtgttaagtcacctgaggatgtctttaaaaagatgttcagaatcatttggggaagaactagccatataaaaaaataggatgacagataatccaaatgtcttagaatggtggaagccaatgggatctagggcaacataggcattatagcaaatctagacaaggaagaggggagccgctgtccaaggattggtgtgaagatagcaataagcaaatgtgcaactacagcaaaaattaacatcctttattgagtgtttttgtgtgaaatactgtgcttagcactttgttctctccctaagtcttcagtagttctctgagatagggacaattattatattctctgcagaaatgaaaaattggaaaccacttaaatatccatcaacataaacattttaaaaataaagtatggtatatccacagtatatcatgtccttcagtcactttttttaaatgaggtagatctgccaaagaaagataccagtaaaatacttttacgtgataataaacacacatgtgaaaacttatctgttatccatctctcctagtagactgaactcctcaaggagggacattgtgtcatattcgtattctaacatggagtcttgtggattagtgtccacttgatcagatgaatgagcaacaaatgcctgtaaaatggagattactggtaccacacagggcttgagtatgtgtatatacgtgtgtgtgtgtgtttgtctgtaacctataagcagaaattattacaatattgttaggaaaaatgccattcagaaaagaaggtattagttactattaggaaattaacagagagacttaatgggttttggacaacaatggtggtggtttgctggatgcagtggctcacacctgtaatctcaacactttgggaggccagtgtgggcagatcgcttgagcccaggagttcaagaccagtcttggcaacatggtgaaacctgtctttacaaaaaatataaaaattagccaggtgtggtggtgtgcacctgtagtcccagctacttgggaggctgaggtgggaggatcacctgagcccaggatgtctaggctgcagtgagccgtgatcactccaccactccactacactccagcctgggcaatagagtgaaaacctgtctgaaacaaacaaacaaacaaacaaatcaatggtggtggtttgaagaaaatggtaaaaacagaacagatagtttcaactttggcagtgaaaggaagagagttttacgagtggggctgcccgtgctgaattctttctctcaatggtgaatggggcaaaaggtcccacttgggctggagttgtaagtccaagctcgttgtggtagatggtttgtgaaccagactatttgaaatgcttagtttttacaacaaaagagctcttcagccatctgatagtcccctaactagatgctcagtatgattcaacatgtatagaggccattttagatctgagtactctgtcatacaagtggaaacaatatcctaaacaggcctatgattcaaaaagaagattccagtttgccaattacaatctataaactgccttatttattgttattgaaatatcatctgtattctgtatgttttcatttgctttttatttaagaatcccacaactgtcctgaagattgtacataatggcctattctaaggttactcatccttttaaagcagtaaatactagatctcatccaagagaaatagggcttaattttttcatttgttagaaatcttgatgaggctttgaaaacaagttttttctcacccttttggaaaacatttaattgtgaggtctttatcaagtaaaaacagaatttataacattttaaatgggtatttgtttttgttggattgttaaatcacattttctcttacacattcatttaaatcacatgaaagtctgcgtgaaatggcactttgacgatgattctgggaaccatccctttgattgtatggtatttactgctgatatatgtatgctggtgtttcttgccttccatcatacataaatttcagtgttatattgaataccatagagaggaactgattgatgataaatcaaatattttacagcatattattgggactgttggatccattactataaaagagttatgtttgatcagtattttcagagctccctaatactgtaatttattggtgcttcttaatgttctctgttaattatatacaggtttcaaaattgggttcaatttaacaatgtataatacatgttatagcgaatctttatcacacaaaaaatgagtagcaaatatccaacactgtctttgattagaactattaagtccaacagcttgcatttaatgaatataatgtaattacatagtcarctgggtagttcatgctctattataagaattatatattagaataaagttattttgatgtataaggtgccaaaggaaaactggttaacaagaaagggaataaccttatatgtggttaagatgtcaaatgaacaattttaactatcattttttttttacagagaacacataaattgggtttttatttttagttcctcctcttccctttagagttaaatgatggaaaatgactctcggtccccaaactgctcttatgcatcattcaaaatagccctgacaggctagcccctgtggtagtgatgaggtttatggctttccattcctttgtgttccattactctgtctatatcatcaaattgattagtaggcagtggcgagcaaggaaagaaaggtggccgctgagagycagctggtgtccatcattttaatgaactgcttagagatggttaatattgtccttgtttctcattgtagctgatgatgaccagatcttttaaaatgttttccccctcccttattctgcattacagggcccactggaaaatgacttggtagttcatgtggcacttatagcagaaagccaaaggtatgaaatccaagtgggtggtgtgtttttttgtggggaggggaggggaggggaaatgattgctttatgtttacaatattgattatggtagaagagattaacttcagaaactcctttacaggctttcaaggatatcattaatatcactttaaatgaccagcatattcttttcgtgtttaaaaataattttgttttagttgaggtgaatattaaagactgaccagtgccagtgttgcctgggttgtagtttcgagaaattcatgcaaacacatggggattaccaaaatcagtgctttccctccctgtcagcccctaatgtttccatgtgatgcttcatggaggatccatatgggcctctgaaatctagtgcagatggcaaattgctaatactaacaaattaataatgccctccaagttaacatgttcccttttatcctcctccttcactgcttcctaaactgtaaatgcattgtcttaaaacgtctctttttatccctatgatctttagacttcaagtttttctgaacacatatggtattcaaactcaaactcctcaacaagtagaacccattcagatatggcctcagcaggagcttgtgaaagtaagtgattctgccttttactttccttactttgtagaggtactagagcttgatggttggacttagtttacagacaagtcacacagttaaaatctgattctgatataggaccagtaatccaaaagcttctaattaaattgagaagtccactttaatggacattgttactaaaaaaaaaactttgcactgtgtatatgtgtgtgtgcatgtgtgtgtacgttatgtttataggtcttgttgattcctacttctttctaaactctattactaacctaggctgagcagttaaataacaagttagtcttaattttaataggaataaaattattcttatattttgatttgatttttttcctcttatcaaaatgtattcttacattttgatttggttttttcatccttttatctttgattttttcgcctttgattatcaaaaaatatttaggtgtgagaaggtttgtttaaaaaaaacgtactcatacctaaatatttttgatattcactactttcctttttttctcttgccttactgtttggtgtctgaagtaatttcaacctctttggtttgctgggtctcaaarcaattataaagtaaaagtaacatctgtatttatcattgatgtagttcaatacctatttgggatggaattaaaaggtgacatttgaggccttttgcacgcactgctctgcagatggatccattattgcctatgcttgtgaatgttcttgctcgttagagacacgacattgttgactcctacccactacttatttatacactgccatttttatttagtaattgttaaaaacaacataagaacaaactgctcagtgtttagtagaagtctttgtaacagtgtatctcaagtggacatgattaagtttattaggttaaatataaatggttgtagtcaaagtcttgttgctataacagaaaaatgaaggcttagagaagagaggtacatgttacatgggaaaatgcaggactccagtatcaggcctggatcttgacattaggcaacacaaaccagaacctgggtgtcaggtcaccaagagcaccagctcttggagagtccttataccttctccaataaatttaaccaccactaccctgccaagagataaagctgaaaatacaaggatccctagagtaggtaacaatttaaactcacgcccagatgtacataatggtacaaggcaaggagcggaggcaacgtggagggagagagaaggatgccaaaatctaaggctcttatgctgtgctcttagtattcagctgcaggctgtcggctgctaatacacttttatgctctcctgctgaaagctctagagaacgccaacaaagcttattctttgataaacatactcttaaaacaaattaacccaaatctgttttttctagtctaattaatattagcaacttattttaatagtaggtgagtttatatcctaccagacaacatgcagtcaagatttaaaaggctaacatggtgagcaaatgacttgaatgtggtattcattcattcagcaacaaacacatgctatatgcagagcactgtgtaggacactcatatgaaatgactttgtccctgttctcagtgacctctgggtttattggtttgacaggaaaaaaacagtgaattacagttcactttgataactgttataatagatgttcatacaaagtgcttgtgaatcagaggcagtagaaggcattctgttacagagcaagtaaagacttacaacagttcctggcttattttacatcttgttttaaaaatggtgttaacaaatgacttgcaattttggtgtagtgtggctgaaaagacagacttgtgagcaagagccaaccttcctgtgcatgtgttgagatggaagattgttttttggttgtagctgtagcctctgtgttcctaagtagctgctctttggatatatactaagatatattgcctagtattctgctccttataagtctgccttttaaaagtaaaggtgttccctcaaatcttagctgatgcacatattcttatgccagcggttgctccctttcttctgagaagccactccctccttcagcccactgaagaggatgtgagggcagacagctgagagcagggcttttacacagcatgtggttaatattcatgatgtgatgactgtagtgtgatttgcttcatggggatctgaatacagaattctgctctatgtatttccgggtagtttctgctctatgtatttccgggtagtttggtcactactgtgtctttcggtgcactaaatggtatgaatgtgtacaacatgggggcagtgttatatgcaccctggaatgtggggagcactaaataaattgtcacagacctgccataccatggttcagaaagttgagaatccttttactgtaataaagagtagtatttaaaggacgcccacctagatcaacacattttaccatacatttatttctgaaaatttgaaactattaatatatgagggaaagggggctgcatctagtgttatgtgctatggtttcagtgcagctatgcaaaataatgcttacaaagcactgtttctggccagttgactttgtctaaaaccactgctattccagaatcaatattcacagcatgtgtggctcaggagaacattcagttgctccctcattcatctatcaagtatttcctgagcaccagctacatactaggcacagtgccaacttgggctgctgttctacaggaatgtacaattcgaaaggagaaagagatacaaacccaactctcacatagatgtgtgcactatgtcagtgaacagagagctctggcaacaccactaattttgtatacaatgaagttgttatttgaaatcggtccaaatcacaatcagtagattgtgtagagatagttggtttgattttccatttaggaaaatataggttagatgtatttctgtcattaaatgtaaaaataaattgcagacagatcaaaaattgaaaacttttaaaattatttaaatataaaagcactagaataaaaaaataagagaatatgttttagctgttgggaagggaagtccatttttagaatgataccagtgccaaaaagccattgaggaaatgattgacaaatactgtataactaaatatagcaaacagcctggcatatcaaaggtgcttgtgaaattttctagtagaaaaatgtttatattgaaataccacatgttgaaatgagattccacctactgtgcagtcattctcacatttcataacaacactgaagaggagcaaactgggcaaagtatttgatttaaggggcaatactcttaatataccaagatttcttgaaataaaaaagaatgccaaattccccatagaaaagggaacaaatgaaaaaagtttgagttcattgtagattctggatattaaccctttgtcagatgagtaggttgcgaaaattttctcccatgttgtaggttgcctgttcactctgatggtagtttcttttgctgtgcagaagctctttagtttaattagatcccatttgtcaattttggcttttgttgccattgcttttggtgttttggacatgaagtccttgcccacgcctatgtcctgaatggtaatgcctaggttttcttctagggtttttatggttttaggtctaacgtttaaatctttaatccatcttgaattgatttttgtataaggtgtaaggaagggatccagtttcagctttctacatatggctagccagttttcccagcaccatttattaaatagggaatcctttccccattgcttgtttttctcaggtttgtcaaagatcagatagttgtagatatgcggcattatttctgagggctctgttctgttccattgatctatatctctgttttggtaccagtaccgtgctgttttggttactgtagccttgtagtatagtttgaagtcaggtagtgtgatgcctccagctttgttcttttggcttaggattgacttggcgatgcgggctctttcaaaaagtgggcgaaggacatgaacagacacttctcaaaagaagacatttatgcagccaaaaaacacatgaagaaatgctcatcatcactggccatcagagaaatgcaaatcaaaaccactatgagatatcatctcacaccagttagaatggcaatcattaaaaagtcaggaaacaacaggtgctggagaggatgtggagaaataggaacacttttacactgttggtgggactgtaaactagttcaaccattgtggaagtcagtgtggcgattcctcagggatctagaactagaaataccatttgacccagccatcccattactgggtatatacccaaaggactataaatcatgctgctataaagacacatgcacacgtatgtttattgcggcactattcacaatagcaaagacttggaaccaacccaaatgtccaacaatgatagactggattaagaaaatgtggcacatatacaccatggaatactatgcagccataaaaaatgatgagttcatgtcctttgtagggacatggatgaaattggaaaccatcattctcagtaaactatcgcaagaacagaaaaccaaacaccgcatattctcactcataggtgggaattgaacaatgagatcacatggacacaggaaggggaatatcacactctggggactgtggtggggtcgggggaggggggagggatagcattgggagatatacctaatgctagatgacacgttagtgggtgcagcgcaccagcatggcacatgtatacatatgtaactaacctgcacaatgtgcatatgtaccctaaaacttagagtataataaaaaaaaaaaaaacattaaaaataaaaaataaaaaaataataaaaaaaaaaaaggaaaaagttacagaacatacaaagagtcattaaatatattagaaaatgctgaaccacaaaatattttaatgtagtagtttaaaaataaaatgaaatattattttgacccaagaaggtggcaaggcctgtacacagttaataccaatgtaaattggtacattatttctagagggtgaccaacctcacattacatttcaaagagaatgtattctctttgatccagcaagtccaggaaattatcctgcagatataataacacactgtccaaagatgtttattgaattatttttaaaataacaaaaaattgggagctatctttatcaggagataggagtttaaaaaggtaaaggggcttcttgattagattaagtgctcagctctgacattgattaactcctaattcattccaagactatctgtttttaaccttatagacattctagaagtttctgctccactgtggcacccttccctattttgtaatacttctgcagactttccccctcagtttttatttatttatttatgtatttatttatttatttatttatttttgaaatgtagtttctctcttgtcgcccagactggagtgcaatggcaccatcgtggttcactgcaacctctgcttcctgggttcaagcaattcttctgcctcagcctcccaagtagctaggattacagccatgtgtcaccacgcccggctaatttttgtattattagtagagaccgggtttcaccatgtcggccaggctggtcttgaactcctgatctcaggtgatccacccacctcagcctcccaaagttttgggattacaggcgtgagccactgcgcccagctttccccttcagttttaatatttcttcaatcatttcaacattgaaatgtacagaaaatgcatagactcattttaacatcttttttttttttttgagacggagtctcgctctgttgcccaggctggagtgcagtggctcgatcatggctcactgcaagttctgcctcctgggttcatgccattttcctttctcagcctccctagtagctgggactacaggcacccgccaccacgcctggctaattttttgtatttttggtagagacggggtttcaccatgttagccagggtggtctcgatctcctgacctcgtgatctgcccgcctcggcttcccaaagtgctgggattacaggcgtgagccaccatgcccagcccattttaacatcttgaaactggaataccacaatattaagtttaaaaaatgggacacagaatatatatgaacccatttatgtaaatatacacacatattgacctgtgtataatatgagtatatatttattgatgtacttttaagagtctttaaccctatcttggtgccccttagggatcatacaatgaactatatatacccctttcagcgtataccagagaaatagttgttgcaaaagggattgtgaaaataaacaggaacattcactttgagtacgtggtttgaatatttcataaaatgtatataatcagaaaaaatcaatgaagccattttcattttggtgggaaatacttaaaggtggaaatttagtaggagattatggccctcgtttttaaaatgttaaacaactggatttttttaatgatacaggaagcattagcctctgtgttcttttacgatcagagccatgcaagttgtacatttatagcagtataggaacaatatcaaatttaagaatgttgctaagtagatctgcagaagttttgctctcaaatctctcagtaatccaaaatctaagttgacatctttggttagcttgtcttcctacaagtttttggattagggttccctagcttctttctctctggaaagatcaaaaattaacaggacaatactcaggggtgagaaagtgacatggattcttacctgactctaatttacaaacttgtgtcttacaggcttatttgcagctgggtatcaatgaaaagttaggactctctggaaggccagacaggcccattggctgcctcgggacatcaaaggtactcatgaaatgtcctcaaaaagtagtttttggattctaataccgcatactgaaatggtgcttgacctgctatgcatcctttttcattttcattatgtactcagactacttatctgaagtattattttctgctagtaaacattacttatttagcatcatatcatggaagtcttataaatatgaaggagcacctcactgctaaatatattttttctaagctttgtaaaatatctaattataacaatatttactcacagacttttccatcatattagaggtagactgctttaagtttattggtatactgattccatcaagaaacttaaaaatttttaaatattatctggatgtcgcaagctattaatttatgtgcttattcagaattagacatcagtttttatttttattgagacttacagcactgcacctttgcctttggtatgttctttagttatttgttttaaaactttttcccttacagatttatcgcattctagraaagactgtggtttgttacccgattattttcgacctaagtgatttctacatgtctcaggatgttttcctgctgatagatgacataaaggtagcttcggaacacctttcttaaaaatggaatgagtttgtttccactgattttatcatatgttactatattgagtactcccaggtatctgtgacactgggttaacacagtgtaaagcatgacagtaaaaccacctgcatagctttggagagtgtaaattacttgcagcattggcataatagatgacctcgtcttatatacagttgtatgactgccccttgtgcctttatacaaatgaaaagatacaattcagaaaaacagggggacctattttgaaaaatatgttcatatgacagtttatgtctttttgaacaaaaggtaaattagcaaaataattttatttatgaaaaatatccagtaaaacctcaactaactcataactccatgagttaaaatcttcactcccttttctactgacagagcagagaaggttagaatcatgatttagagcatgaaatctggagccagactgcattcgttaaaatcttggctctgccacttgccagctgtgtgttcttgggcaagttacttaactcctctgtgccttgttttcccatctgtaaaactgaataataattaaggggtgttctgaagattaaaagaattaatatatgtaaagtactaagaatagtgcctggcatatggtgaagtattatgtaagtttttgatgtgatgatgatgattttatgtaagtctttcagatgactgattgattgacagatagatagatagatagataatttaatcaaataaagagctccctctacattgctaatggtctgtataaattcagtccagtctcctccacctgctgtaaaataaatccctagtaatatgaagtgagttaatcttctggacggctggcatgattgttccccctgaggccattcttgaactgtattttgtaggcttttttaaaaaaggaggccaagtgcattggctcatacctgtaatcccagcactttgggaggctgaggcaggtggatcacttgagcccaggagttctagaccagtcttggcagtctctaaataaataaacaaataaatagattaacatttaaaaaaaagagggggaaaacacattaaaacaaatgtagcgtgattacttttaagaataaagtttgaaatcgttgaactcaaagtggtgttcagcataacttgcgtgtacccagagaacctgctagagtacttctacccctaagtagtctaagttattcagggttggattgtgaactgtcttgctacataagaattttgttggctctttggcactcatggttgagcatcctgttcatcttagatactgtgccattacatcctacctcattctgtttgacagaatgcrctgcagttcattaaacaatattggaaaatgcatggacgtccacttttccttgttctcatccgggaagacaatataaggtaggttgataaaagaagtaaggtacgtgtgtctcactgacatgaacacagtgagcccttgggaagaaaggcctccttggatgtttttgtatccttcttagtatgtggtggaatactttgtatatataaggggcacttagtattagattattaatttaccattctgttgttaatctgtacattttgtttatttatattttttagaggtagccggttcaaccccatattagatatgctggcagcccttaaaaaaggaataattggaggagtcaaagttcatgtggatcgtctamaggtagccttctgattttcagtatgcatctattttcaggacagttaatctacaatacagctatgtttcttaatgtatggtctatttaaggtttttgacttaaggttttattctccacctatcttcctattcctattgtcacttttccagtttatctgatcccaccaagtcagatgcttgaacacttgcagcaatttcctgtgcagaattttagacttcagtagctcatctctaaaagctaggtccatagtggtgtagtgacctgctttataaccttgggcttttaggggcaagttggctgactgttggtccagtactcttttctgtgctctatactaacatccaacctgggaataaacctttttccattcagaacttcacagcattatcttcacagctcctaaattacagaaacattctttggttcactgttggtcataacagcctctctgtccacagttctctcctactaaacactctttgtgcttcagccaatacaataattactgtgtcttgaattttgtggggttctgtccctctgctcacaccattttctctgcctggactatccttccttctttcaaggtcactgggctttgaggtcttaccagactttaagggcagctctacaaaatcatgcagaccacaaatatacttctattcttcaccatgctttcgtgacctttaacttaaactactaagactgcggtctattatataggcttatatactttatttctgtaaaataataatgattattccatggggtctttcacatagtaggtgctcagtattaaataagaaagaggaaagtttataaagaaagacctacgtagtagtataaatggcatgtttatatactcattccctggtgattgtattttgcatacttgatttttacctaagcatttatcttttttcctttattttctgttgctttgtctttttgtaatgcctcctggggcaatttctttgatttttatcttgcagttcttctattgagttttgcatgttggctatcatgttttaaattttcatttttcatagtattctgtcctatggatgtttcatggctgtcatattttatcttttctgaggatatcaactagaggttttcttttttttcttcaattttcctttcctctgtattatctctttcggggttttttccctcagtctttcatgttggaggcatttgtcagatgtccggtattctttagctatttattcatttttaaaagtaaaggagtaaaaagttcataggaagctgtgtgcttgggtacaaagattctttttttcttttcttactatttcagcttttatttttgattcagggggatacatatacctgggtatatgcatgatgctgagatttggggtgtgagcggtcccatcatctaggttctaagcacagttcccaatagtttttcaatccttgccctccttcctgctctagtggtcttttttttttttttttttaatacatacacagtaataggattgctgggttgaatggtagttctgttttaagttctctgagaaatctccaaactgttttccacagtggctaaactaattgacattcccaccaaacagtgtataacattcccttttctctacagcttcaccagcatctattgttttttgacttttaatactagccattctgactggtgtgggatggtatctcgttgtgggttgttttttttgttgttgttgttgtttatttcttttgtttgtttgagagacagggtctcgctctgtcctccaggctggagtgcagtagagtacacagctcactgctccctcgaccacctaagctcaagggatcctcccacctcagcctcccaagtagctgggactacaggtacatgccgccatgcccaactaattttttagttttttgtagagacagcatcttgctatgttgcccaggctggtctcaaactcctgggctcaagtgatcctcctgtctcggcctcccgaagtgctaggattacaggcataagccactgcaaccaacctcattgtggctttgattcgcatttctttgatgcttagtgatattgagcttttttttttttttaatgtttcttcctgtgtgtaggagaaagattcttgatgaattcacttataaggtgatctgatggcaaaagctcctttttgttgtagaaagcctcagatgccaatatttggaattcttttctctaaggcttttcagtctgcccagaaagtacatctctaacctcatgaccaaaggacataaactttgtttccatgtcctgaaagcagggtggaggaagggaaccagggatcccactgtgaagtatgcagtctccagccaaatccactgtttaatccttgtatctcctgctctccactgtgccttatactcttgagtgcagtgtctttaaccagagaaaaagccttttgtctctcaaaaatcagggagctggaagcagatagtaactccctaagtgtttagggaatggaaaggaacttttggacccagtcttcctatgtggagcgtctgtgaatcccagcagtgtctggatcttagggtcctgaggctctttcctgttctctttgtcctaatggatttataccttagtgggtttataccttaaacatttttttccactatcatttttgggattttaggaaaaacaggagttaaagatatgtcttggtcatattaaccagaaatctacttttgattttatgcttaagtgtccctcccattccaggatgtacctaggcatttttctattccttttaagaaatatgtgggcctatatggaaaaaaaagacctagataattttgaagagaaatataagatttgaataaataatgggctataccatattcttggatgaaaagactattacaaaaatgtgagtacctcctaaattagtctactagtttattataatcatggtaatttcagtggagtagagcttttggcaatttcatatggttaaggacaaaaatcagagttcagggcccaccagggaagagggatttcaataaatacttcagacttccagatgaccctcttgaaaagctatacctttgactaaaagggaatcagaaatagttcactcctcacaaagagtagtagataacattatccagaacctcaaagtatttctacaaatatgtgcagtgtctgtctttcattcaaaattatcaggcatgccacgagtgatcaaacaacagagagccacctacattggttcagatattagagttatcagacatagacgtcagaataactacgatcaatatgcttaactggccatcagagaaatgcacatcaaaaccacaaagagataccatctcacaccagttaaaatggcgatcattaaaaagtcaggaaacaacaggtgctggagaggatgtggagaaataggaacacttttacactgttggtgggactgtaaactagttcaaccattgtggatgtcggtgtggcgattcctcaaggatctagaactggaaataccatttgacccagccatcccattactgggtatatacccaaaggattataaatcatgctactataaagacacatgcacacatatgtttattgcgacactattcacaatagcaaagacttggaaccaacccaaatgtccaacaatgatagactggattaagaaaatgtggcacatatacaccatggaatactatgcagccataaaaaaggatgagttcatgtcctttgtagggacatggatgaagctggaaaccatcattctcagcaaactatcgcaaggacggaaaaccgaacaccacatgttctcactcataggtgcgaattgaacaatgagaacacttggacacaggatggggaacatcacacaccagggcctgttgtgtggtggggggaggggggagggatagcattaggagatatacctaatgctaaatgacgagttaatgggtgcagcacaccaacatggcacatgtatacatatgtaacaaacctgcatgttgtgcacatgtaccccaaaaacttaaaatataataaaaaaataaataaagaaaagaaaaaaattagataacaagttggagaattttattagaaactttgatagtacatttaaaaagaatcaaatagaaattctaaatgaaaaattcagtcaccaaaattgagaagtcagtgaaacaatgtagtacttattcactataattgatggcagaggataggtaaactcagaaaaacaccccagtatacacacaggaacttaaaataatatgtaatcaaggaaacaataaattaatggtggatgtatagattatttaatatatactttgggaaaaattaaggcagttagagtatcacctcacatcgtacaccaaaatacatttcaggtggattaaatgacttaattttaaaagatgtttattttaagaagaaatcaaaatactttcaagcttttactttgggcatatcataagctatcagttttagcctctgatgttgacaaattcttagttttgtgatgactttgagttgaaaataattttactttaaagtttaatattctgccatgttgtggagagttttcatttcatttgaagagtcatagacaaattacaaagacagtgcaaagtgtggtgattttctctcaagtcaaattgaaggtttctccttttctttttgttttattttaatgtcaagcacagcatagagttttaaagtcagaatgatatcctttttaatcctgtgtcatctgaaattgggaaactttttgcttatatatccttatacacaaagctcaagttggtcaagaccttaagatatttcatctaatcttctcattttacaaacagaactagagctctttgtaggacagtaactgtctgtagtcctaagactagttactgcagaagggaatagaattcatggtttcccattcctagttcactactttttatactcaagcacctgaactttcatcactttcttttcagcagcagagtttaatgtctacttcactacctatctcattttcccatttttagttgtgtttcagaaattataggagaaagaggtcagtagttttgtcatgattcaaagagttttacttttttttttttttaattgagactgagtctcactctgttgcccaggctggagtgcagtggcgcgatcttggctcactgcaacctccacctcccaggttcaagcgattctcctgcctcagcctaccgaggcagctgggactacaggcatgtgccaccatgccagggtaattttttgtatttttagtagagatggggtttcaccgtgttagccagcatggtctcgatctcctgacctcatgatccacccgcctcagcctccgcaagtgcggggattacaggcgtgagccaccgcgcctggccaagttttacattttttaaaaaatgtaaatggaagttcaccatttgtgtttttactttttccttcttttatttaaattaaaaatatttatcaaaagcaaaatgtaagtacataactgttctagacttacagtcatcagtaacccaaaatgtcaacaatatttttgaagatcttctgaatttaaatatgtactttgccatctctaaaaattgtggtaaaacatgcataacataaaatttgccatgttaatcatttttaagtgtccagtttaatggtgttaactacattcactttgttgtgcaaacaatctctagaactgttttcatcttgcaaaactcaaactctatgctcataaacaacagttcctcattccccccacactccagcctccattttttttttactaatataataaatgaaaatggcatctatatgctcctcttgggttttatttcagatcctttcaaatttccttatcccctgatccacagtttcattcattactaggatcccagccttctctcccagccccattacccaggacatctctccttgcagttcgttgctagccatgctttccatgccccaaatatacttggtttccaaatctctaaatgtaattggagatttttcccctcatgctatgatggtattttagagttgcctttttctttttttgtttctatgtcatactttaattttacagcttaggtgactgtttcctctttagtgaagcctcggggactggaattaatttctcctttcattgtccttctatgacattttgcttgaatgtttgctatggctcttctttcattttatgtttagctagtttcttctgcctgcctcgctctgtggtttgtaatctttttcagctcaaggttcactcatctctgcatccccagagtactctcctcactactgttatctgtgggaaatatttaaatattggctcattgattcaacaaatatttattgtgctcygactgtaggcactagggatgtagtgttgaatatgatacacaaggtttttgaccatatgggacttaaattctaaagggagagcccaacagaaaacaaaggtaggttgggagagtgatgggaaggaatgcaatcttaggtaggatggtctgttggaaaggacccggtgggatataattgagtgttttaaatattatattgcgtttgacacatacagtattatttaattaccatcagaaatagaatactaatgcctagcaaatttgttgttaagtatgctttttccaatactaatataggagcttctacaaccaactgaattttttttttaatcaaaagccctatagattattaatggaatttagcatttgtctattaactcagaataaacatttattttatgggctgaattagaatataagggtgagtaggctaataaaatggaaattattaaatagaatttttttctgtttcagcattagctatcagctttaagaattaagtaattcttgactctctctttctctcataccctgtgttacaatttattattaaatcctattgtctctatcctcagattgtatccagaatctaaccacttcccatcaccttcagtgctattatcatggtccaagctaccattgtccctcacctaggtttccagtcatctcctaaattccaactaataaaacagtctgttcatgctctacctggtcataagcagattaggtcatatatcataagcctccaatgacttcctctctcacacaaagtggaaaccagagttcttcaaatggtctatgtgctctccatgatctggacctgcatctctgatttcatctcctaccagctgccccatctactctgtttcaaccacactttcctcctcgctgctctcaaagacactaagcatgctcctgcctcaggacctttgcacttgccactcccagccctgtacactcttccttcagatccatatcattgactatagtcctttcttcagtttctgattgcatgttactttattagagaaatcctttctgatcagctatatgaaatggctaacaaccctcatcctactcccctgccctggtactccccatcccctacctttcttatttctactttgcacttatcaccatctgacataataaatacatatatgtagtattaatatatattataataattattgtatacacagagagggtcatatgtgttttagtcaatgatggaccacgtatacaatggaggtctcataagattttaatactgtatttttactgtaccttttctatctttagatacacaaatatcatcgtattacagttgcctacagtattcagtacrtgtttgtagcctaagagcaataggctgtgccatatagcttagtgcttagtaggctatgccacctacgtttgtgtaagtacactctatgggtgttcacacaacaacgagattgcctaatgatgcatttctcagaatgtatcttggtcattaagcaatgcatgacagtktgtgtgtgtgtgtgtgtgtgtgtgtgtgtgtgtgtgtgtgtagcttttttattgtctatcccctacacatacctataagaacagtttcaagaaggcaagaatgttatgtattttgttcatgctgtatcctcaatacctaacatagtacctagtaggccttcaataaatatttgtctaacaaatcatttaactaaagagcaagatgtatacatgctagcctacatattaggaaatatcattcaatgaacctgcctaggcacagaccctgctcttagggaacttactgttcaagagtgacctgactatagccaggctagtaaaaatgtgtagatcaactgcatattcggcctttctcactcaaactcaaggaagctttattatgattgctattaatacgtccatcctaccatctgtaaatgggcatttgttgatctactttgtttatgagtttccgctagaggagaaggcactactattctgggtagttagccaacaaaagcaacattccctgtgtcctgtttcttcacatttgagatgaacagtgagaaaatagagaaaataatatatgttataaatattttataaatatgtaataaatattgccttatttttaattaataatttatggcctgctttttatgagtacatttctcaattttctctgacaattcatcagataattagaagtgacacataatgctaaaaaccattgtaggtttatcattcatttatactgttcatactgttcaccatgaaccactgacaaacacaaacagtgtttaaggtcatttagtttgttcaacctataatcagaaacttatggaaaataaaatggccaaatatgggtagccatatgccagaatgcagagaagcattagcctggataaccaataccttcatgttcctgaaaaaaatggagacttgtcggtatcctatcattggatggcccagaaatacattacagtagcagaatccacagtgcaatttcacatcttttcccaaagcaattttagtattttatgtttttcctaatttggatattttattttatttatttatttatttattttttgagacggagtctcactctattgccaggccagagtacagtggtgcaatcttggctcactgcagcctccaccttctaggttcaagtgattcttctgcctcagcctcccgagtagctgggactacaggcacatgccaccacgcccagctaatttttgtatttttagtagagatggggtttcaccaggacagccaagatagtcttgatctcttgacctcatgatccacccgccttgacaccccaaagtgctgggattacgggcatgagccactgcaccctgtcagaaatgttattttttttaacattttaatggttactgaattattttaattccagattaaaagtaaatgcctgcaattctaagaacagagagtccatctcatgttgacctatttataatgactcataaacttgtaacgatgtgtatattctattttagggttttttttgtgtgtgtagaaacctgtgtgattttagaatgttcatttaagaattgcttcagaattgtatatatttttaagcaattttttgaagtattacttaattacagaaaggtatgcacacaggccattagagtatggcttgatgtatctaagagtttctaatctttttcgatcacgtttcagacactaatatctggagctgtggtagaacaacttgatttcctacgaatcagtgacacagaagagtaagtccctttgggttatttcatttttgggttttttgaaattacattagaaaagcagaaaatatgaaaccttttcttttaatttttaggcttccagaatttaagagttttgaggaactagaacctcccaaacattcaaaagtcaaacggcaaagcagcacccctagtgctcctgaactgggacagcagccggatgtcaacattagtgaatggaaggacaaacccacccacgaaattcttcaaaaactgaatgtgagacagatgcacttcccacatggccctmagtgaggttgctggagcagaagctcccagaatcagaccatatgtctttttgtcctgtcaktgaaggtagcaattaatctggaggtggatgacttgtctactcccagggcaatcatgagaagttgttctcttggtctaacatctgcatggatatctttaaaaatgcttaagaagtgcaggtgaatatgtttgtcttggatatacaagtatggtatgagccattaaagaagtcaatgatagttgcctttgggttctccagatttccctttcagtgccctctttctccctttctgcccccatcttgtcccctgccccagtgtttaggtctaatgcttgctttaggtcagtcctgtcactgagtaaagcaatcctttcactgtgcttatagcacagtgccctaatatgtaataaacactctaaacaagtcccctcctatcatccatctcttcacaacagtttgctagcaacatggtctcccatttaccaataagaagaatcaagaagggagtggttaaatgacctggccaagtctctcagagagtggcaaaatcaatgttaatgcttgtagataaaatattttctgttcattacttatcttgttttctggcaaatttaattattaaattctaccaccccaggaagccagcttgtcacttgtctaccctctatctctaagatatctaagataaatatgaatcgttgtataatgtcatcttatgcttgatattatatcaatgacattttatcttccctcagttacatagtaaagtgtttcttctctgcatcatgtggttttgtgattagttaccctctgtggtaactgctgtacccatttcattccagttcctcaccgtgatttatattttcaggattgcagttgtctggctagccaagccatcctgctgggtatactgctsaaaagagaaggccccaacttcatcacaaaggaaggtaagcatgcatgtctaggagaacattttaagaggacctctctagccttgaacatatatcaaatatgcataagctatccactaaaatgttacaagttatttcccctttcattaaaccttctttttcacttttgaatggaaaatgttcattcataccycctagagtggaggagactgatgtatgaacccctaactggctttcatgcagtgatgcttgattgtttctctgattgtctgaaaagtattggagcttggattgtgcctgtgactgttaacgtctgatgaattccatagttgtttattgacagtttctgtttccagttttatcttctctaatttttcaagaataacattgaattgttatgtctataaaaattagctctctcatggtctgcagcagccatttgaaatggaacatggcatttaatagaattgtgctctgaagatggttaataaaaataaatcatttgtaatcatgtctatgtccactctgcattaaggatgaaaaccagttatcccccagattcacacttgcatgtggagtcaccactgtaaggaatctttaagttctccaccatggtccgcttctgacattttataatacagaataatacagaatacagttcaagtacttaatgtctagctattcaaaaatgtttggcttatttgaaaatactctgttaagaggtgtgtgttgatatggttagaactgaaaaacagcagtggaattaataatacrtatagttctggtaattaactgagcatagttatttattcaaatgagatctacttagtttttgccttattatagctaagagataaccttcttcagtattatagatgtgaattgaatagttttcaatttcttagcttgttaaaggcagaggaacttttagcaaatttcaaacagaatcttgcatgtttctaattagtcttaaaactataagtataagcagaatctcagttatatttagracattcattgaaatttgcactttatctaaaacagtaggatttttaaaaatcaaacatttcattagaaacctagaattcagaatggctgtttttttaatttaaaagttttagtgcttttaaataaaagaaaatttatataaaatagtttataatgaaaatgctaagggaatgatgttgtaaaccatttttataaatttgagaataatattcattaaatgttttaaatctataaaaccttatgtgaaactttgaaaatcatatgcatctacagaatctgaatataattttatccaatttgttaaaaggctgtaaaaagtttagagtaaaatgttaaagatcttgttttttatcattgttttctttttggcgctctttcctgtcacattgtgattttacgggcaaaatcagtggccaaataatgaaacccactggtgtcttttgagcagtagcatatgttggaatgatcatagccccatgtacataacaaggcctcagtaaagttttattgaacaaataaatgaaaactcatatatattagagtctacagtatttgttcaattgctaattattttactatattctcttttcttcttttctgcagtaaattagaatagcatttgtatttgttaaaagtttagattgcatattaattaggaaaacagttgaatttcgagaaataaaatacctatattacatactcagactaaatagtatcaagtgctggggatagtcacactctatatatttgagttacatatttaaatatgttagttcagaacattaatggatcgatgtatcaactctagtgaagcacagtgaaaatgagtacttttaagaggaataaatgttgtgcatttaattaaaagctttgttcaacaaagactctattatccaatgtctaggtaccgtttctgatcacattgagagagtctrtagaagagctggcagccaaaaactttggtttgtattagtgtccttgttgttatgttttatttttgtgttgttatattcgatagcctaaagaaaatggaccaatattaaagatagttattcatcctaatttttmcttttaacctccaaggttacagcactttctargaatgtgcctatgtagcatgtctgtccccccactgcctccrccaaaattctgagaacaaagacactgtagggattgaacctgaagagtattcgctggaatggtatgctaaggtttctttcctgctgtacacctcctctgccccaacaaggtgctttaagttctgttttttaatttaggaaacctgttctgctattatagaaggccatgaaaagagaccagtgatttatctaatcataagcaaaaatagtagaaggctattgtcttgtcacttaagttgaatgaatcccagtgattgtagttgcttcacgaaaaataaccaatttgttctacagaggtagtctgttcccagagattgaaaaaaaaaaagatgtaggaaagtttaaataaataaaattgtttaaattcacaatggagggccaattcacatggccctctgcattttgatgtaattctaacagttttactagcagaatctaacaaattttgaaagtcagagcgtatgtatagatatatatacacatgcacacatttttttaatgatacgttatccacttaaaaaaaaaagtctcaagaatgtcataagaaactcccttaacctcaatgagcctcaggtttctaatccctaaaataaggggattaaacaaaacaatcccttagaatatttcaattctatttttataataaatatgccgttcctcctcagaagaaataatgtaataatcctatagttaaatctttcaaattttcactgtaaattttcagtacagtaagacatcaagccaataagtgatagttctggtaaactttcttagccagtaagtttcaagtgtggtctgtagtcttatttttgattaagcacatctgttcttgctttatgtattacactttatgcatttcagataaatcattaactagcaaacatttagaatgcwgactgttatgtttggaagaactcctggaagttttatttactctattttcccttttatggctttccactgacacacccaggttggcggtgcgctacggggctgcatttacccagaaattttcttcctctatagccccacacattactacttttctggtacatgggaaacaggtaacatgcacagaatttgaaaacccaagctgcttgaaatgtgtgggcttatttgcactctgaaggttaaatatgtcttttggtcttatagtgtgtgggtgaaagcttctctagaagtaggaagtgtttgtttcactaactttattagttattgacttaattttcttttagtcatctatgttgaaattaaggaatataaatgctttttataagtcagcttctgtggatatcctgaaatacatgaagattgcagccagtttcaaacctacatttttatttctctatctaaaagttccacgagaatttttacttttgagggaaaaaaattgtcttatgtattgcatgtgctgtactttaaaaaaaaaaaatctgttctccctaggttctaagactttttcagtaatataaaaatagcagtgtgaattccttcccccaacattatggctttatcagtaaaaagaaatactggtatttcattgtagcactttctaaaattcagtactaagtgaatcctctaatccagagatttggttatctaggcaccaaaagaaacatgatttaaagtggttatagaaataggtcacatgtactagtgacagatttagtaatgaacttgttaatgcaaaatcagaataccctcttaatccctcctatacaccctccctccctaatcaaaataataattaggttttctttttttgctttttatatcaatagtgtcatcaataatatttttgtcacagcttggtggcagggatgaggtggagggatccctccctaattctgaatggtcctgcagtctgggaaatttcagctgttaggttcaatgtcctgggcagtgtttcctccaaatgatgatgtgaggattccactgtgtatattttaaagactacccaatcagggccccatgcattcctcatcttttagatttgtgaacatctggcctgctctcttctttgcccccaggtcggttgtacgccgtgcagcaagtcttttaagtaaagtwgtgkacmgcctrgccccatccattactaatgttttagtgcagggcaaacaggtaagtatttgcttttcagacacttatttggtcccggttgcaaagatttctggctaggacccttaattttaagtctggcaaacctcaatgtcataggcctcttacaatcagatttataagggctcaggcactttctatcaaagtctccttccccaagcaaaatctagtcagaaagttattaaatgggccttcccctttcctgctgcaccttaaagctataatcttcaactcctgtgttgagatcaatgcagatgctaatgtagaaaatggaccaataactactgaagtactccagacaggtttcggataggcagaacagaggtaggtgaacagcaaagggcgcatcttcccttctgctccacatgagatctccccacttagaaagcatggtgttcatgcccagccagggtctttgcgtgccagtgctgctccccagatcccctgccccaggccatctctaaccccagctcctccccattcaccagggccaactctgtcacctcctcctcacggagccatctccagttagcagtggtctctctctctggattctcacaataggtctgtgacaattcccacaatctgtcctgggtcccagttcatttgaatgtgtgtctctcacctcatggtaggctgtgaacccccaggggtcagagtctgggtcttgtccagtacacgtcccaatgtgcccagcatggggccttgtttggaaaaagcacttggtgaatgttggttgaattgagccttgcatgtggggtgtggctactcattttctgttttgttttctataagctctaatttacctggctgaatcatcctttgattagaatgaaaacctgtccacttactctctgtctcttctctgggaatatatgtgctttattgtgttttcctgagagttaatctggggatataataatctttagtaatatgaagtattttaactctcttcaatggaatcaacccattggtcatatttcagggctcttaattcattaagattaaaattattcatccttacatttagcttttgaaatgttagaataataagctatttattgtttcctgtaatatttaataattaaaaataattgtactaataaaagataaaagattcctgctgggcatggtggctcacacctgtaatccaaacactttgggggccaaggcgggaggatcacttgaggccaggaattcgagaccagcctgagcacatagcaagaccctatctctgcaaaaaaaagaaaaaaaaaatagttgggcctggtggcacatgcctttggtttcagtgccttgggaagctgaggtaggaggattgcttgagcccaagagtttgaggctgtagtgagctgtgatcatacactccagcctgggcaacacagcaataccctgtcgtttaaagaaattaaaaagaaaaaatacaaaaactcctaagaaaaagttaaatcacttcatatatgttattttctccaaattattgagaggtagaatttttatccctgtttgttggctaaaacagaccaaaatacaggaagtaacttatctagtgccttttctcaccagaattctcacctccagccagagtcttgtgtttttaccctgaaccaagccacctctgaaagaaagttaaacaggctttgagaagatatttttccttggattttagatccttgtagcatttctgaaaagagagttaactctgcatatgaacattcagaagcttttggagaccttcaaggtcatcagcacctgacactgggagaaagggtgggttagggttggttctgtccaatctacacaatatctaaagggggcttgcagcctgtggtcctgagatcctgctcctacatcctggaagcctcagagcctgccctaaggttgtgcctggaccattgctcatcacactagcgtgtctcccagggtaacagtcacttacagagctgggcaagactcggaggccagtagctcagcttcattaccagaggcatggagtccattctctgaccgcatcttacctctttacaaaaaagaaatgagaatggagcattcagaatttttactcgtgcgttattcaaatgccaccctaagcactgaagtaatattgtttctaccaagcacattcggatcacctcaagctctgtggaatgaaatcatggcttagtcatcattgcttctagaggcaatgatgtgccttctgtttgttttcttctttacacactgacattttaataaaagtattcacacgcagactaactggttcatgccacttgtgatataataaaccagcagttcacagttttcactccattacaaaattgaggcaatagactccatgttctgctctctcccctcatctctgtggcctttgatatgctattcttttttcctgccttttataattgtacactgtacatgaaaaagagatggaaaggggtattcagggagaagggcggcctgcagagtcccctgggagaagaatgccaagtatagaggagagagagagaccagcttattccccttgccagcttcagcagcattctgcccagagtttttttggccatttcactctatgctgtctcctgtcccaggctgtgggcagcctgttccttcccctccacaggtgagagatctgtcaccacatattttaaccctcaccaggcaccttgcattatgcccagaaaaatgagggctacacaggaactgggtggcctcacacctgcctttgaaaggttatagtgttgctgaggcaaaaggatctgcctgagaaactataaaagaatcaaaaagtttatctctcaaataccaaattgtgtagactgcagtaaagtgaaactcttcaacctattctggtttctctggggagtttctagtactaaagtcattcagaataattttaacttaatttatattccttccctgcttttatccactcacctccactcccctaactggaaccctcacctgcccttatattttagactagactgtgaaccatcatgaattccagtgggagtcatgctttgaaagccattttaataaataccaggaacagttattctacctaattccctagcttatatagagtaatttcagcctgccagtcattctgagccttgatttttttttaatttttatcttttagtagctaggagaattttacaataaaattctgccacttgtaggtaactctgggtgcctttgggcatgaagaagwagttatctctaatcctttgtctccaagagtgattcaaaacatcatctattataagtgtaacacccatgatgagagggaagcggtcattcagcaagaactggtcatccatattggctggatcatctccaataaccctgagttattcagtggcatgctgaaaatacgaatcgggtgagtgaagtcctttgcatttgcataaagagaattgttcaagttgtcctctaacagacccggcctctccaagtgaagcaatgttcctggtgtctggtgagtattcagcaaagagcacctgtcctctaagccatgcaggcaatatctgggggtatgaaaaataaatgccactagcctgaaagaatccttaacgtttatttcacacccgagttagacatagtgaagtaactcctttgtctggtaaaatcaaaccccagaaatttcaacagctgtgtcgtgtaaaacgctaagcacagtacttgcaaaaattcctagaaataaaatggataggccttaagagaagaatgattttcagtaaaactgtcaggaggacacatccagataaaaatttggtccttttaagaatattctatacccattttctactgaaatctattaattgatttttaatattgttgttcttggagaagaaatcaaaataaggctctgatgatcttgaatatttgtaatcaaggattttatgaggcagcatggtgtaggaaaaattaaccaggctctggaattcagcagaactgagttcaagttccaactgccattgttgtctcagtaaccttgggtaaatgactgaacctctctagcctcactttaataccagtttgtttgttttatatgaaaatgaaatgagatatgttttaaaagtctatgacaagctaaggaagtataaatgtttcttttttaaatacattttttattgtacaagtatcgtgagtatgtcctattgtaaaagagcccaatgatatctgagcttatagtgtaatctaacaagtggccaactttgagggtgtttctcaagtgtttgaaaagaatatacattctctgttgggtgcaaacatacatgtatgtgtatgagtgtgaaataagtatatgtagcttgctaactgtaaaactggaattttaacatctttactatctctatttggtcattgctgataaaactcttaatttctcattataattgtggttgtatcaatttctccttgcatttttatttgtatcagttttgctttatgtagttgttttttgttttttgagatggagtctcattcctatcacacaggctagagtgcagtggtgcgatctcagctcactgcaactgccgcctcccaggttcaagcaatctttccacctcagactcccaagtggctgggattacaagcgtgcgccaccacacccagctaatttttgtatttttagtagagacacggtttcaccatgttggccaagctggtcttgaactctttacctttagtgatctgcctgcctcagcctcccaaagtactgggattacaggtgtgagccacctcacctggctgctttatgtagtttaaaactttgattttgtccatgtctcttcataacttttaccaatatatcttcatgtcattgattacttttcaactttttttttaaacttcaaacatttacaaaaatacggagactagtataatacagacttatgtgcccatactatcagccagcctcaacaatattatcatctggtccgtcttacttcacccatacccccatctactacccacctgctcccacagtaccctgtcagttttgaaaggcaaatccatatcttctaatctgtaaatacttaaatttgtatctcaaaaacataagaactttttcaaagcataaacacagtactgttaccatgcataaaaaacaattgaattatgtttgtcaaatattattgccatacctttctccatctgtcattattagcttgctatattgtcttccatcctttttgcattcaatgttcttttataattttgtatgtattatgtatgtttttatattcagcactatgctgtatttattaatatactctgagagcatcttataagaagcatgtaacataaaatttaccatcttaaccatttttaaatatacagtacagtagtattaactatatacataatgttgtcttttaatagaaatatatatttcataattgttttctttcttttacattttgacctatttctatattttatactttatatttaccatgctttcttataacttttttccttttctgtttattgttgggttgagctccttttcattccactagttttacacataaatgtgatgtacttttttaaacattattacccattttttccttcaaaatcacatgtgaaaaatgcattgcctatttggcaatatctgcatacatcgtaattcatcagttctcatccaaggagttcacagtattcacacaagtaccataaagatatattttgcagcagtcttcctttcagcattatccgaaatagtgaaacattgcgaacaacctagatgttcattagtaggaaatagtttgaataaattggtttttagccatataaaaaatgctgtgctacctacagtgaacaagataaagtcctatataccgacatttatgaatgtcctagataaatgtaaaaaaagatgcagtgtattgttccactttttataaaagaacaataataataccatacatatatctgtgtaatgtatgtgtgcaaaagtatctgaaaaatatatatcaaattggtgtcagttactttctctaggagatttctactttctaagttacatttttcagtattattttaaaaattactttagcttattatttttaagtgatttgcctgatttcaactacagtatatttcagtcaaatttccttatctttgtctcttctttcttttgattgaaagtaaattacctgcatagaatttgaccttcactcttatcccttaaaatagtttctttcaaagattcagagctattttgaatcagttataagaactttgagttatatcctgatttgttcagtctgtttgccctgatattttcaactccaacctcttgactccacatgaggatagagaaatggttctttcatgtgagctaactccaaatgaaaagaaatgtgattctccatctctgtacatggtataaaagtactctattgtcacagactcaggcattgatctgagacagactgagaagtataggttataagtcttccaaagcacattctttgaaataagtgtaataagtgttcagggagccttttcaagtgacagccatccttgcagaggtttcaacaaagccttagagtgaaggtaaacagtttcccaagattttacactgctgtgtttttcagtctatagtagtttttcctttactgcttattcagcattttaagctaatttaggtcctctacaaatctcatgtaattccctttcttgaattcaactctaacctgatgcttctttctattcatgggaatggatatttattctaaaaatagcattctttctgtttttatatctgttactctgtatgtttggtgctttccatgagaaatgacataccatttttccttatactgtgttacccaaagtaaaaatgtcaggtggcaacatgtgacttagtatttaacagtcaactgactcataaagaaatttgctatgaaaccttaattattcaccgtcctgaaactcattctggaattgtggcattatattctcattgcgagtattaatagtgtccctgcctgacttatgatgtacatttcactcttatgtgggtctcacgagatcagttctaaccactgggactatttcagttggggagcaatctggtatttttttttttttattaaggagttatttatttaagaaatttccttctgctaaggataggaactaaatcttgtattacttcccatctgtcttacagtctctttcatcagagatactcaataaatattggattgtttaacatacggtatataagcagagtcaggtggtttgctttgagctagtaatgtggaatttaggaaaagcaaaaagagagcatgtctctgtactcttagagaagtaaatggctcttaattttgataaacatacttggttttgtgccacatgatattggaattaagtataaaagaagatttaattaaatcatgtccttcaggaaatgaccaagttaaacagggccttgtttttatgaaagtccattcatatatacagaagatatcaggatgtagcacttttctccacggagttattaatggaatggtgtaattaatcatatcagagtacaggacaggttgccttacaatcgtacatctcttagcagtgtttccagtaacgatctaagaggagacaagtttaaataacgtgatcattgcactcaaaagatcactctagtaaaccatccttctcttcctccatcactatagccacaaatattattcattgaatatctgttatatgctaagcaatgaataatagaagaagaataaaaattcttcacatatattatctgttttaatccctacaacaactttgaagtaggcactagaaccaccattttacaacaaagaaattgagatttggagagtatacatgggctgtctttgtcagtaagtggaagaactgggatttacacccaggtctgcctgactccagtgttcttattcttcagtcttgagtactttctgcatgtttttgcttctgtatactattgccattatctcacagaaacaggctttagtgtttatttctaaaactttatggcctttatgatctctcatacatgatttcaatttatgatccatattgtattcaagttcatgtagtaactatgatgtgccagatgccagattttttttttttttcgtcttttgtctgccaggcctccaatctaggatcagtactgttgagcattttacagtgtaaggaacttgagtaggtacaagttaacagaccgaataaatgagattttgcacctttattcatcacaaggcagagaaaatgggatgattctaagttggccgcttgtatactacagtagatatattgtgttggtgcaaaagtaatcgtggtttttgccattgaaagtagtggctgaaaccacaattgctttgcactaacctaatattaagacgctatgaaaagttcagagaagtctagagcagacttttcacttccttgtaatattctaggatacctctggcaaatacagagcctcattatgttaaccacacaaaaaaagctttctgaaatgtaaacctgcctgcctgttgctgcatcaacattggtttaggaggcaaagcataagaataatttgaaattatattttgtcatactttcaaggtcagtatttgcagaggaaataatattttcctgaagactaacccgtctttgtaggtccagggtagatgtcattgttcgaagttaacagccagtccaaaatgtgtgagccagtgaatatgcactgaacccttggtactgtttactggaaccagcaaagatagagacactgggataaggacaaatggtagacagttgccgtgtaactcctctacggaaaatcttccacctcccctaaggcaaaaccagccctgccactgaattcagctctctggataacaccaatttgagagttacaagtggaaagccttgaattttattcccatttctgccagtaacttaagtgactatctcaggcaaatgagttcccctttcttatgttcagaggaagagatctaatgtttgctgagggcccattttctaggtgcttgccctttgggttatcccagaaaatcctcaacaaaaactctgtaagtttacacacaagctgcttgaaattctgcaaaattagataactttcccaaggtcacaggccaagaaccaggatttggaactagtgtgagtgacgcagagttcatgctccccaacccctcttccacccctgttaccctggtcagtaacagcggggctatgcctgctttggtgtcctcgttggatgtggtgattctgggtaaaaaatgtgaagatgttttgcaagggcagagcttcaacattatcactgtggtatttgataatttgaggtcttctccccatgacatttggagaacagctccatctgaggagtgctttttacacaccacaaatctcaaggtgccgtaggaggaacctccctcttctcccaacacacacacacacgtacacacacacacacacacactctctctctctctctctctctctctctctgtctccatctcactcattcttgtcttctggtcctaggtttgcaaaggccgtgtgctctcacaagagaagttcaccttggaggagggggccctttcagccatggttgagtcccctgtaggcccagtggaatgatcccaaagcatctcatatggaaactccatctcagaatcccattgggatgatctcttgccatctaacatgatgtcacctctccgtcacctggtagacactcacgacacctgtggcaaacaccctaaaatcccttcagacctacgcccacagcactcttccaccacagtaataaaggcttgggaatgctgtttctgccctagggatatcagacaacttcagataactgtcatcctgtctgtggggcttgtgatagtgcccctctgaagagtaaaaagatacttttgtgtcttctatgtttttattagacttcatcctcaataaattatactaaggcctcaacccctttaagtgaatgggccccttgcatatttgtttattagcagcagcaaatacatactcagtatgtttctttacaaattttaccttgaattagtccctggaaggtttttagtttgcttaaaattggtgagcaaattattcatttataaagtctttgaatgtcaaatttcctataaattgttgaacatgtaactgtttctgagttagtcctttgtgtattgtagtggttgtagcacaattttaaaagaaagggaggggatttatagaatgtattctttttttactgccttatggtacaataagcacatcagactcattcttacttggctttttgctattgtttctctcttttaaatgttaattatgattaaagagattgattgattggtcatgttttgataccatattcttcttggatgccagcattcactagactgaatggccataagaaataagaacatttgccttaatcatggtacatcttaaccagaattcccttgcattgagtatacttttatctcaggtttaactactctctcttagtgtttttttaaattttatttatttgcattacccactacttcaattgcttttaagccaatagcaccatgtttcttttctcttttttccaaggttaatcttgccaatgcaatttcttcaactttactgctatcaggcactccagtgaacaaaattaacctgctcacaggaatggtattctggtctgataatgatttgatttgctgtctcattattgatttgtgcttcagctttcctgttgaaatagatcaagttcctgacaggcccattactgtaaagacctccaatcaactactttctgctgcaggtctgtcagtcaagctttacttacagataaccccagaggatatgtgttatcaagtatttttcatctctgcttttcatactgccagggcatcctctgtaagcaattatgatccagacgtaccttgtcctctgatgcccaaaaccgtatctgtggatcacacatccgaagcttagagagagccattgttgtcatagatagcagactataacattgcttatgcactaaaggaaagagaaaataattacagcaccaagttcattagcacggttctgatactcattctgaggtctttgcttttgacatctgatatgaggtaaggaggtgagatgatgaagctccccaacctctattctattgtgattggatcagtgatagagggaatccacatccttcagtcaccaaacagatagctcagtttgcctcatcaaattgtattcctctccatattaatatgaatcaagcaaaaaaagtcccttcttgcagctttccatcgtctgtcatttggtgtatcagctctggcttccataacaaaacgccatacatggaatggcttaaacacagaaatttattttctcacaatctgcaggctggaaaggccaaggtcagggtccctgccaatttggtttctggtgagggctctcctcctggcttgcagatggctgccttctgtgtcctgtgtcctctgatggagagagagagctctctggtatgtcttcttataaggttactaatcccagcataagggccccaacctcatgacctcatctaaacctgattacctcccaaagaccccatctccagataccatcacactggagttagggcttcaacatttgaatttggagggggagaaagaattcagtccatagaatatggcttagttaaatgcacaaaatcatctaattttttttttttttatactttaagttttaggttacatgtgcacaatgtgcaggtttgttacatatgtatagatctgccatgttggtgtgctgcacccattaactcgtcatttagcattaggtatatctcctaatgctatccctcccccctcccccgaccccacaacagtccccggagtgtgatattccccttcctgtgtccatgtgttctcattgtttagttcccacctatgagtgagaacatgcggtgtttccttttttgtcctcgcaatagtttgctgagaatgatggtttccagtttcatccatgtccctacaaaggacctgaactcatcattttttatggctgcatagtattccatggtgtatatgtgccacattttcttaatccagtctatcattgttggacatttgggttggttccaagtctttgctattgtgaatagtgccacaataaacatatgtatgcatgtgtctttatagcagcatgatttataatcctttgggtatatacccagtaatgggacggctgggtcaaatggtatttctagttctagatccctgaggaatcgccacactgacttccacaatggttgaactagttcagagtcccaccaacagtgtaaaagtgttcctctttctccacatcctctccagcacctgttgtttcctgactttttaatgatcgccattctaactggtgtgagatggtatctcattgtggttttgatttgcatttctctgatggccagtgatcatgagcattttttcatgtgttttttggctgcataaatgtcttcttttgagaagtgtctgttcatgtccttcgcccactttttgatggggttgtttgtttttttcttgtaaatttgtttgagttcattgtagattctggatattagccctttgtcagatgagtaggttgcaaaaattttctcccattctgtaggttgcctgttcactctgatggtggtttcttttgctgtgcagaagctctttagtttaattagatcccatttgtcaattttggcttttgttgccattgcttttggtgttttagacatgcagtccttgcccatgcctgtgtcctgaatggtattgcctaggttttcttctagggtttttatggttttaggtctaacatgtaagtctttaatccatcttgaattgatttttgtataaggtgtaaggaaggcatcaagtttcagctttctacatatggctagccagttttcccagcaccatttattaaatagggaatcctttccccattgcttgtttttgtcaggtttgtcaaagatcagatggttgtagatatgtggcattatttctgagggctctgttctgttccattggtctatatctctgttttggtaccagtaccatgctgttttggttactgtggccttgtagtatagtttgaagcaggtagtgtgatgcctccagctttgttcttttggcttaggattgacttggcgatgcgggctcttttttggttctatatgtactttaaagtagttttttccaattctgtgaaaaaagtgattggtagcttgatggggatgacattgaatctataaattaccttgggcactatggccattttcacgatattgattcttcctactcatgagcatggaatgttcttccatttgtttgtgtcctcttttatttcattgagcagtggtttgtagttctccttgaagaggtccttcacatcccttgtaagttgaattcctaggtattttattctctttgaagcaattgtgaatgggagttcactcattatttggctctctgtttgtctgttattggtgtctaagaatgcttgtgattttgcacattgattttgtatcctcagactttgctgaagttgcttatcagcttaaggagattttgggctaagacaatggggttttctagatatacagtcatgtcatctgcaaacagggacaatttgacttcctcttttcctaattgaataccctttatttccttctcctgcctaattgccctggccagaacttccaacactatgttgaatattagtggtgagagaggggatccctgtcttgtgcccattttcaaagggaatgcttccagtttttgcccattcagtatgatattggctgtgggtttgcatagatagctcttattattttgagatacgtctcatcaatacctaatttattgagagtttttagcatgaagtgttgttgaattttgtcaaaggcgttttctgcatctattcagataatcatgtggtttttgtctttggttctgtttatatgctggattacatttattgattttcatatgttgaaccagccttacatctcagggatgaagcccacttgatcatggttgataggctttttgatgtgttgctggattcagtttgccagtattttattgagggtttgtgcatcaatgttcatcaaggatattggtctaaaattctcttttttggttgtgtctctgccaggctttggtatcaggattatgctggcctcataaaatgagttagggaggattccctctttttctattgattggaatagtttcagaaggaatggtaccagctcctccttgtacctctggtagaatttggctgtgaatccatctggtcctggactatttttggttggtaagctattaattattgccacaatttcagagcctgttattagtctattcagagattcaggttcttctggtttagtcttgggagggtgtatgtgtcgaggaatttatccatttcttctagattttctagtttatttgcgtagaggtgtttatagtattctctgatggtagtttgtatttctgtgggatcggtggtgatatcccctttgtccttttttattgcgtctatttgattcttctctcttttcttctttattagtcttgctagcggtctatcagttttgttgatcttttcaaaaaaccagctcctggattcattaatttttttgaagggttttttgtgtctctatttccttcagttctgcactgattttagtcatttcttgccttctgctagcttttgaatgtgtttgctcttgcttttctagttcttttaattgtgattttaggatgtcaattttgggtctttcctgcttcctcttgtgggcatttaatgctataaatttccctgtgcaccctgctttgaatgtgtcccagagattctggtatgttgtgtctttgttctcattggttttaaagaacatctgtgtttctgccttcattttgttatttacccagtagtcattcaggagcaggttgttcagtttccatgtagttgagcgggtttgagtgagtttcttaatcctgagttctaatttgattacactgtggtctgagaaacagtttgttacaatttctgttcttttacatttgctgaggagtgctttacttccaactatgtagtcagttttggaataggtgtggtgtggtgttgaaaaaaatgtatattctgttgatttggggtggagagttctgtagatgtctattaggtccacttggtgcagagctgagttcaattcctgggtatccttgttaactttctgtctcgttgatctgtcaaatgttgacagtggggtgttaaagtctcccatttttactgtgtgggagtctaagtctctttgtaggtcactaaggacttgctttatgaaactgggtgcttctatgttgggtgcatatatatttaggatagttagctcttcttgttgaattgatccctttaccattatgtaatggcgttctttgtctcttttgatctttgttggtttaaagtctgttttatcagagactaggattgcaacccctgcctttttttgttttccatttgcttggtagatcttcctccatccctttattttgagcctatgtgtgtctctgcacgtgagatgggtttcctgaatacagcacactgatgggtcttgaccctttatccaatttgccagtctgtgtcttttagttggagcatttagcccatttacatttaaagttaatattgttatttgtgtatttggttccgtcattatgatgttagctggttattttgctcgttagttgatgcagtttcttccttgccttgatggtctttacattttggcatgtttttgcagtgtctggtaccagttgttcctttccatgtttagtgcttccttcaggagctcttttagggcaggcctggtggtgacaaaatctctcagcttgtctgtaaagtattttatttctccttcacttatgaagcttagtttggctggatattaaattctgggttgaaaattctttcctttaagaatgttgaatattggcccccactctcttttggcttgtattctgccaagagatccgctgttagtctgatggccttccctttgtgggttacccgacctttctctctggctgcccttaacattttttctttcatttcaactttggtgaatctgacaattatgtgtcttggagttgctcttctcgaggagtatctttgtggcgttctctgtatttcctggatctgaatattggtctgcgttgctagattggggaagtattgtcctggatcatatccctcagagtgttttccaacttggttccattctccccgtcactttcaggtacaccaatcagacgtagatttgctcttttcacatagtcccatatttcttggaggctttgttcgtttctttttattctcttttctctaaacttctcttctcgcttcatttcattcatttcgtcttccatcactgataccctttcttccagttgatcgcatcggctcctgaggcttctgcattcttcacatagttctcgagccttggctttcagctccatcaggtcctttaaggacttctctgcgttggttattctagttatccattcgtctaatcttttttcacagtttttaacttctttgccattggtttgaatttcctcctgtagctcggagtagtttgatcgtctgaagccttcttctctcacctcatcaaagtcattctctgtccagctttgttccgttgctggtgaggagctgcattcctttggaggaggagaggtgctctgctttttagagtttccagtttttctgctccatttttttccccatctttgtggttttatctacttttggtctttgatgatggtgatgtacagaagggtttttggtgtggatgtcctttctgtttgttagttttccttctaacagacaggaccctcagctgcaggtctgttggagtttgctagaggtccactccagaccctctttgcctgggtatcagcagcagtggctgtagaacagcggatcttggtgaaccgcaaatgctgctgcctgatcgttcctctggaagttttgtctcagaggagtacccggccatgtaaggtgtcagtctgcccctactggggggtgcctcccagttaggctgctcgggggtcaaggacctacttgaggaggcagtctgcctgttctcacatctccagctgtgtgctgggagaaccactactctcttcaaagctgtcagacgggacatttaagtctgcagaggttactgccgtctttttgtttgtctgtgccttgcccccagaggtggagcctacagaggcaggcaggcctccttgagctgtggtgggctccacccatttggagcttcctggctgctttgtttacctaatcaagccttggcaatggcaggcacccctctcccaccctcgctgccgccttgcagtttgatctcagactgctgtgctagcaatcagcgagactccgtggccataggaccctccgagccaggtgtgggatataatctcctggtgtgccgttttttaagcccattggaaaagcgcagtattagggtgggagtgacccgattttccaggtgctgtctgtcacccctttctttgactaggaaagggaactccctgaccccttgtgcttctcaagtgaggcaatgcctcgccctgcttcggctcgtgcacggtgcacttcacccactgtcctgcacccactgtttggcactccctagggagatgaacccagtacctcagatggaaatgcagaaatcacccatcttctgcatcgctcacgctgggaactgtagaccggagctgttcctattcggccatcttggctccacctccaatcatttgtttaacagcaaacttagcagatccttgtcttatcttgaaatcttaaaatgattatttaaaaaaaattattttttccaaggatcagttctattctgtatggctttttttttttttccagaaaatttcagctggtcaggtgcagtggcttatacttgtaatcccagcactttgaggggccaaggtggatgaatcacttgagcccaggagtttgagaccagttgggcaacatggcaaaaccccttctctacaaaaaaattaaaaattagctgggtgtagcggtgcctgcctgtagtcccagttactcgggaggctgaggtgggaggattgcttgaggtggacattgcagtaagccaagatcacaacagctgcactccaccctgggtgacaagtaagaccgtgtctcaaaaaaaataaaataaaatttcaggtgttctggtttaccactgctgtcagatttccatgtactttatttcatattgtactccttaattggggtatatcggaaagaaacatgccaatacacacactgtatccttactagcctccaaacaagagtgtttttaagccgggcgcggtggctcacccctgtaatcccagcactctgggaggccaaggtaggcggatcacgaggtcaggaaatcaagcccatcctggctaacacagtgaaaccccgtctctactaaaaaatacaaaaaattagctgggcgtagtagcgggcgcctgtagtcccagctactcgggaagctgaggcaggagaatggcgtgagcccgggaggcagagcttgcagtgagccgagatcatgccactacactccagcgctccagcctgggcgactgagcaagactccgtctcaaaaaaaaaaaaaagagtgtttttaaaaggataagcttattcccagaactgtctgaagaatactaacattcccttttgtgcttttccagcagtcccaaagaattcattgtccttaagtcaaacctggatatatatgaaggttgatttggtcagtcgtgtgtatctaccttctcatttgcttgttggcgagtagagcatctctggctcttacacagactgaatgtataagactctgggccatccataaccttcattattttgaccttccacattttctttcttctgccctttgttccttccttccttccttccttccatccatccatccatcttttcctttccctattttgtatttaaatgcttttgtactggccaggcacagtggcttacgcctgtaatcccagcactttgggaggccgaggtgggcggatcacgaggttaggagttcaagaccagcctgtccaacatggcgaaacttcatctgtactaaaaatacaaaaattagctgggtgtggtggcgcacgcctgtaatcccagctactcaggagacttaggcaggagaatcactttaacctgggagccggaggttgcggtgagccaagatcacgccattgcactccagcctgggtgacagggcgagactcctcctcaaaaagaaaaaaaaagaaagcttttgtgctaaaattatcaaatcagattttatggccttgtcattgggaatgagggataattagcctgattttcctatgtccttctttattagtagtcctacaaatggataaaatgtctttgatattcttaactgtgttactccttggtaatttactttctgtagatttctgactgctattaatagttttatagtttatgtctaaggctgttttgctgtttttatttgaagaattccaaggtataaaaagattagtttgaccaacaattttaatgaataaatgtggttttttttctttttcttttttttttttttgagacagagtctcactctgttgcccaggctggagtgcagtggtgtgatctcggctcactgcaagctccgcctcctgggttcacaccattctcctgcctcagcctcctgagtagctgggactacaggcgcctgccaccacacctggctgattttttgtatttttagtggagacagggtttcaccgtgttagccaggatggtctcaatctcctgacctcatgatccgctgcctcagcctcccacagtgctgggattaccggcatgagccaccgtacccagccaataaatgtattttaataatatgacagattgtatttatttgtgcttgaatgagtgaaaaacctgcttcctttcatgatttttgagaacagtgttgtcaataatttgcccacaaaactgctgagattttgtaaatggaagtctaagggaaaacattaaggtctccagctatctttgtgcgtgatactaaggattttaaaagataaatgtgataaactatgtttagttttaataactcaagttagtggcagagtttaaaaagtaagccttttaaaaataaaaatgttatttattttagaagatacctcctgaagttaattgactgtgacacttgcttaagtaactccaagacttgaattaaaaatttgcattaccttcctctaaactgagtttaagaaatcacataacaataatttactaacatttttatgactctttaacatttcagagcctttttatagacattatttgttcctcaaaataatttcataaagtaagttcgatgagcaatagtagtattcccatttgaaaaataatctgccagtggggcacagttggtaagtgacagaattggtatttaagtctgtctttgcttttcattatgaagaattttaagtatataatgacttatttggtacattcccatgtactcattatttagtgggtataagcagtgcttagctatttgtatttgctatatttgctttatcttttattttgctatagtatactatgaagcaaatcccagacatttaacttttacctgtgagtattttagtgagtatatagctctaaaaaaggacattatctcaataatcccaataccattatcatacccaccaaaattagcagtaatttttttaaatatcaccagatactcagttcttatttaaatttctctgggttatccccgaaatgactttttacagttggtctgtttttgaatcatgacataaaacaagactcatggtattagtggttatgtctcttaaatcacttcatctacaacaggaaatcccactttccttttcattccattgacttattgaggagaccaacaggcaggtcttccgatgtttaattcagtattccttctgttattctaagctgcctcaaatgtaagttttaaatctaagtaaagaaatgaataaaataaataaataaaataagtagaagacaattctatgcctggtctataaaataaaaatataacttttcgttttaaagaagaggcccactgagtagtttattgtaactaaaatgttgctgtaatagctaatttcataagcagctttaacgtcaaagcatccaaaagaactatgttcttgttacttttatgcttgtgtaacgtttttgctaaatacagtcaataagaatgaggacgatgtaaagaaagcctagtctttgccagtaacataggtgtagtccagtttttctttttgactgacaggagaaatataaatggtaaatcttaattctgttacatgttctgttgttgtatataacaggaagctttcaggcatttgttgtttgtaaatacttcatctttattgctcttaccaatgagcagctattaaatattcattccatagtatcaacaataatagtattgatttctaaaaattagtatgtttcatccttgtgtaactctcatgcccttataatccatctcagtgttaccctagactaaactcccaacttccagaaatggcaacaacaaacaataggggagaaggtaggaagagctgagagttgtctgagctcagggcagtggaggttagaactgtcatagagcttgatacatgttaccctgtggcttatggcctggcccatcaggcctggttgacacccggtaaggcttagcattttttcttacggttctctacattgagagacattagtcatcccatgaggatgcatcactgttgttttgcaaaccagcattggcagaaagaaggacttcaatcttttgaatacatctaccctaacattttcatctctgtacctgcaatatccttgtaggctgcctttcaaggaagtgtatgaagagaaagagaaggcgtgggggagaaaggcagcatgggtgaataaagatgcattctttccagatgctcagttgcactgcctctctttgtgcagtgttcactgaaggatttaaggatgaagcataggaatctgctgtgtgaactaattccctggcttttcctaatggtgtgtaaatttctcattccctaaggcacagtattatttccagagttttctttggttttcataactagtttttctgagttctgtcctcagaatatagtaaatggaagaaatgagatgaatctacaaaaatgctttttaaaacctcctcaaaaaattatttacacataaaataattaaatattttggctcttctgcaacctattggttaaagtacatctttaatgtacaactataactaagttataactaattgtgtccttatatttcaaagacaggtacttgtctgtcttctctcaccccaaaggaatgactacaaagtaaaggaaattggtttaaaacaaaaagcttgagatttcagagaaaggaacatttacataatagcatatctcagcctatttcttgaaatgcattgtttctctgtagctctctttcctttttttttttttttttggcatgtatctagtgttaagaaaatacagtgtagcagctgtttatgtacagaataataccacagtggatgggtaaaatctcacttgctaagaacctaagtacttacctattttaatgttgtacaacctcaccacctgtgcaagggcaggcctcatttttaagagtctgatcatgtcacataatcttgatggaagtaattgtatcaacggttcaggaaactcaaacggcctcttcttcattctcctttgaatgggtcagtgctattaagggcattgctgagagaagcagaaggtgattttatttcaagagttattgattcatgcttcccctgttttgtttcaggtggatcatccatgccatggagtatgaacttcagatccgtggcggagacaagccagccttggacttgtatcagctgtcacctagtgaagttaaacagcttctgctggatattctgcagcctcaacagaatggaaggtaataagggccccttgttacctacatgatactctggatttacaataacatcataatttttagcttgatatatctatgaaattgataagatattaataagtaaaattcaacagagtgtcagaggccaccccactagatggaaagtgtaaacagaaagaccaatcaaaatgtctgtcttcaattattattttgcattgatttgaattttatgctttttttccagtatagtttataagcatttcttcatttttattattctgtgcaaaatgtaacacctcataccactttctgaagtcagtttcctttctgaacctttgtggcactcaccatctcctcccagcattttggcagataggattgggtttggtaacattatttaaatatgttgcctgtgactttgtctccctaaatagacttcaatgctaaaccctttcctagacttgtgctaagcttacactaagaacaaaacaaatacttgtggattgtgttgacttgaagaacttttttattacagaaatagctttaatgtaagtatttaggaaagtatttattgagtacatttgtgcctggcatttaccaaagtggtatagttatatgcctagaaaaatctgcctaggccttttacaaaagctgtcttccacaaaaggaaatttgaataaatggaaaggcatcctcgttcttaaataggaacattcatgttataaagatgtcagttgtaaatataattcaattccaataacattcaactagctgtttttatgaggttaagacaagttaatacaaaacttcatatggaaaaacaaacataagaataatcagaaaaacataaaagaaggacttgccctgctagacattaaaacatactataaagcctctgtaattaaaacagtgtgatattggtgcacaacagacaaatagaagagttgaacagtatagaaagtccagaaatagacccccaagtatatgtggaaatttaatgtgtgacaaaggccaaggatggactttttaaatagtgatgagacaactggatagccatttgcaaaaagatataatcacacctgtagtttataccacacataagaatacactccaaatagattagaaatctaaatgtaaaaatgaaataatagaaaacaagaagacatggttaaattcctttttactcttagtatgggaaagaccttctaataatgactcaacccaaggacaacaaaagaaaaagttaataagactatatgaaaattaaaaacaacactttgtatggcaaaaagtagacaaccaatgtcagaagataactgagaaactggaacaaaacatatgccacaaagagcttataaccaagaattcttaaaaattgaaggacagacaaccaaaatcccaaaggaaaatgggaagaaacattcttacatacccatgagtctatgctaatataaatagacaaatgggagtgaagagacctttcttataatagaattccaattataagtgtagataggatgacaaaaatagacaaatacaatagttaccattgttgccggcaaaaaccatcattgcatggaagtatgatgaaaaatggagagtttcatcattccaatgtgtttccactcaagatgcttaaattgtaaaggaaaaaatagtgattttacagtggagaaacccagctgactctaccttaaccaaaagattaaggtgaacatcgccagtaataagacacatcaaaatcatatatcccctgatatgatgcattgaaaagggcatgatgggccgggcatggtggctcaagcttgtgatcctagcactttgggaggctggagcaggagcgtcctttgagtccacgagtttgagactagcctgggcaacattctgagaccccatctctataaaaataataaataagaaaagtgcacaacatcacttctagatactcttgccaaaaatgcataatctcagtctattcatcaggaaacatcagaccaacccaaattgaggtacatcttacaaaataactgacatttctaaagtgtgaaggttatgaaagataaaggacaaccaagaaactgctagaggagcctcaggagacacggaaactaaacaccaattctggattggattctggatcaaaacaagaatattagtggtaaaattgacaaaatttgaattagatccatagattaattaatagtattgtatcattgtttactccctggttttatactatagttatgtaagataacaagagtagaggaaggccaggcacgatggctcacacctgtgatcccaacaatttgggaggctgaagcaggcagattgcttgagcccaggagtttgagaccaggctgggcaacatggcaagaccccatctctacaaaaaacacaaaaattagctggatgtggcggcacatgcctgtagttccagctactcaggaggccgacatgggaggatcacctgaacccagtaagctgaggctgcagagtcgagattgcaccactgcactccagcctcagtgatagagtcagatcctgtctcaaaaaaaaaaaaaaatggaaaagggaagttaagtaaagagtatacaggaactttatggtttatattcatgacttttctgtaagtctgaaatttttcaaaatgaaaagacaaaaaataaaggatctttcaaaataattttctacctccattatgagtattctcatgtttctactttttctgttgtcctacgaagtatctcctttttaaagtattaatcataacttcatataactccaaaaacatattttttaattgccaaacaaagggaatgaggggaaaataaaatgcaggcagtggggtatccagttatctaaagtaaaacatcaccaaggaacccttagacgtttgagctttgtcactttggtgaaacactaaagccagcaatgcaagcccgtgcctattaaaagaaattttatgtatccaaaaatagatgcccctcttacctatgtagtgataaattttcattggtcctctttctccagcgcaaacgtgtctttttctgtttactgtatcctgcatagctattgtcatacctagaaatagtgttggtcatgacatatttcccttgtaattgagtatacatttcactctgctgtcttttaaaatactaagtgtaaaaaacgtgtatctgggctgtgtgccgtggttcatgcctataatcccagcactttgggaggccaaggcaggaggattacttgaggccaggagctcaagaccagcctggacaacatagccagaccccatctcaacaaaaaatttaaaaattaaccagacatggtagtgcatgtctgtaatcttagccactggaaaggctgaggtgggaggatcgcttgagcccaggagttagaggttgcagtgagctatgatcgagccattgcactccagcctgggtgacacagcaagaccctgtcaaataaataaataaataaataaataaataaataaatgtatctgtcctttcttcaacttttgcaagaatatttttagcagtttgtgaatgatgtattgtatctttaaaatttaatacttaagtgcttaatgcatgaaaataaaagatctaaaattttggtgtatcactacattctgttattataatgtaagattttatatcttttttcagcaagagaactttagctatgtctaaatagcaaacttctataaggtttaaaataaggtaattttattctatataaaatgcttttttgaacatcatttattcattcactttttaagtgtttactaagcacctttctgggagaggtgtataggactgatcaaattatatgatttccatgccttcatggagcttacattttattatatgtgaaaacaacatcaagttattatgaaattcacagctgctgcgtttttaaagggagctgctctgtatacttgaaaatcatttgagcatgtagtaascaattcatagcttacttacaggataacattttgtctgttaaattttttagaatcttggagacttcctcctgtcctgccagccctgttttcattatgaaatatttactagcctctgtaacacacggagatatgcatcattgatgggctttggcttttatttcttaccctatcagaacaattagttcatattgaaagccctgctgtctaccagaacaagcttgttcttcaactctgagacatttgccttttgttacagatgttggctgaacaggcgtcagatcgatgggtctttgaatagaactcccaccgggttctatgaccgagtgtggcagattctggagcgcacgcccaatgggatcattgttgctgggaagcatttgcctcaggtaaagccccaccatgttcacataaagaaaggagacttcrcaaagggtagtgaatcctttcctcttgcactgcaaataacttttctccttttcagcgttctaagagtattttcaaagaaggaatgaaatactagaaaataagacatctaatcaattggattgaaaatttttttccccaatctgagttacttttatttttcaaatttagtgtccctgtaggcagaaaaggctcactttaccaaatggctatattgctggaagtcatatttaataaaaaaaattgttggtattgtcatattttagatattttgaggatattccctttttaaaaaccacatagccaaacctcttgttgagcaagctgtccttcctttgtttacttaccagcttagagtttcctatattggctttactttaagtgtgggtaccccttcactacccccaagtggtggtgggtcagtgctggggggcctcacaaacagtaaagcatgcattggaaagacagaaccagagcagacctaagaaacaatggggcctagtagtgctgtggatgaggaaatcaccacttaggaattgtgttgaatgtggaaaatgcagtaactttttaggtcattggacagacaatcacttacttcactccaggtgtaccttacctgtggtccaartgagttagtgccctctccttctgatggtttcccatgtgatatacactggcctgcttctttgatgtgattatttaatcctggcatctaagtcattctacttatacacaaaagagaaggattagccttttggaaatagagtactgtaattgtttttagtgttgaaatctcaaccaaataaattttgatgtagttctttatacaaataaagtattctcaaaggcacagacccacactcattttgcttgtatctacctaagagtgtctctgtaaggacccataggaaattggtagtattcttttcttagtctttggtaaaaggaactgtgtgagtgggaggatggtgtgggctcttccctggaacccttttaaacctttcaaagtctgaatgctgtgaatatattacttattaaaaaaaatgcataaaaacttttaaaaagtatttatactgttcacagactgcaagtagtttcatttgactgtcagtgcagggcccagccctctcctgggtgccctatgattactgttgaagagcagcaccatctcttgagagcagagagcagcgcctcgttgctggagttcaaaccctctggcaaggcctcctgtctgcctacctgggcagtgcacgctcacaaccacttgttagcttctttctcagcccccactaatacttaccagattttcatttaattgtctggcagtctgggccacttaacatgtagtatccttgctttgctaatatcctctctttgctaaaaataacaataagacaataaatacatgttaagtatttttatgcaccaagcacttttctaagtgctcatttaatccgttagacaattttttgaggcagatgctttgttattagtattccagtttgacagaagaggacacaaacacagataaatgatttcctcaaggtcacacatctagtaagtagctgccccaggatgtgacccctggcagtgtagctgctgagccttttctcttaacttctctgctacactacttaccctaagtcctttcagaagagtaggaaataaggcaagcttggtatctcttctgtagttgcacagtagctaggttgacttttttaatgagatatattaagaaaaaattaatgtgaaaccaagaaagggtcttcctttccttctgtaaccccgttaagcccattgctagagatctagccaattataactgtgtttagcaatggggctttattttccccaaattaggtactatctgtaaacattaataataygttggattatattgactatgaaatacaatagttagttgtattgaatatctattgaatatagactaaggcattattataccaggctgaacaactttgctgtcacttgattgaaagaggacattgggtcccattttgagtggtaagtagatagacatggttctgaacctgattgagttcactgtaaactatcactgaggtgaaaacaagtatgtctcatcatttctgcctctctggtaatgatctagtcaccccatctgccttccaccatacaagcctaatgttcagagccttcccttccatcctctgaggaatattccccatgcccagatttggattttaattttagtttattttctgctttcatttggattgtgaagaaatgaatggaaaactacacagtattcttgttttaaatgaaagataaagggcagagtagaggaaattcttttagygtcgcttttttcctgtttccttcccagttctgcacataatattgtttttgcttgtttgtatgcatttttatgctgccagctcagaaaggagctgccacagaaatgatgtaaattcattagcaggtgacttctgtgcgggagcctgacagcaagcataacttctcgtgtaaattctgaaagcaatatgtacactatttgttgtctcagtgtttggctattccttttgtgtattaaagtggccttctaacatagtcctttttctcaaaaaattaatatagtgaaggtaactactaaaaatgggaggtttaatttatcacaatagtcagctggttggctttagtagtttgacatatataaaatccagttgtgtagctgaaaatgttctccaaggttttataaaaactgaaaactattaatgattagaaaatgaaattcttctattaaatgagaaccagagcataacggttcagcatgttaatgtggagttatttttttcagcaaccaaccctgtcagatatgaccatgtatgagatgaatttctctctccttgttgaagacacgttgggaaatattgaccagccacagtacagacagatcgttgtagaggtgagtagtaagaaatgaagattgctgaataaatgccttctctctgctccgtgaaaactagtataagggaaactgcctatgagacccagaatcctattctttccagtaccccgatctctcctgtgagacccagaaccctattctttccggaaccttgatctctcccagccgagtcctcaagaagatggccacccctgacccaaggcaaggcacacgagcaattcagacacctcaggctcctccaggaagggagaaccgacccctgcttttcagccacacaatcaccccttagcatcaagtgtatcagccacatcataaaagtacaggaagtgacctttttctattcactttcttttctattcacagaaataagcacaactattgtagaaagtttcagcagtttagaaaattatagaaaagaatataagtttcccccacactcactagcaagagatcattgctgttaatattttgagggacatctttctagacatctctatgtgcagagaagacatgtcattgcatggtgtatcactgccctgtataaagttacatgtaaaattaacagaacacatgtgtccttttgtcatgttaaacatcaccccaaatacatagagaagccaccaattgatgagtttaatatttagcttatccgcactttgtctctttccctgggcatgtatccatccgacttttgtgtttctcaagggtagataatatgtcttattgctacggaagctctgtgtgactgccaacctggacatggcacctcctaaaatctagcatgtctggagctgcagtcagagctgagtagatttagcctcctctttgatgtcccaggatgtggaatagtatcagccaatcattttcacagcatgaggcagactgggtcgtgaaaagacggggttattaggcaggtgaatgccttccatgtctagtacccagcatctgggacatatagtagacatagagatccttcttgttgaccacagtgaagtcattccctttgcagaagacactttcctttagacctacagcaaaacttcatattctcatggctaaaggcctgccctaaggtttcccacattgtgacccctggattttactgtgtttcctttggttctttcaggttctgtttttgaagcatcgagataaaatacagtcaataagaatccaaaattgggaactatgaggcgtgtttcctgttcagtgtacaaattaggagccataaacatcatcagagagcctttaccaattattgcatatgcagatattatttttgcttataggaatttagcatctaaaatgaacattaccacttaggataggtgtatgtgatggccaagcaatagggtgattcattaaactaagatagtttatacagaccaaataggacttttgtcacaggggtcagagttaaacatatttttttaaaacatggccatcccttgagaaactactgtggcatcacagacttatactcatttgggtcctgggctccaggtcgtttgatcctgaacctgggtccagagtctccattgaacctgcctggcttctctggctttggtccctgacccgtctctccacagacagtgttttggtgtcttgccaacaaggattgacacccaaaggcctagaaagagttcagacactttgggtgaatagggtatcatgtattatgtacatgatgggttaggaaagtcatttttctaagttaacggttttatttaactgatgaaaaaacatttctagggatacacacaatgaaaaaaaaggtgcactttccaaacagaatttatgcaaataacttgcaaaattaggaagattccttccataggtgatccttgagcccctcatcatatagaatatcctttggatcacccatccatctgatcaaagggtgaaaacatgtcactattatggttcatatagttggctttcaatgtctgtctcttctagttacttatggttgtatccattgtactggaaagaaaccccgagctagaatttcaagacaaagtagatctagacagactggtcaaagaagcatttaatgaatttcaaaaagatcagagtyggstaaaggaaattgaaaaacaagtaagtacacagcttttttttttttttttttttttgagaattttttcattgtctcaattctttaaaatatccctaatctcttttcatttactttataaaacagattcacaggtgcaaaataggatacttgaggggcagtctgcctttttcgaggaattaatgttacttttcagttaattactagtcagttcagctgtgaagttctgacaaaaaagagatctagaaagagataaatttcctttatatggttagcataaaaatgttttatcagagaggaggcatagactccagaaggctataaaattaaattctggggacaatagaatgcagtgacaggctacgttggtgctgcgtactgcctaatataggcccttccaggttctctgtttaatattttatgttcaactgtaaagaggttctctaagtaaataaaaattatcaacaaaggagagaatactaaaaatatctgtytttgttttatatacacctcaggaaaatgaaagaaaagctcaggaatctcatattttccataaggaaatctttatgtgaatttatttttccccctaagctgacacagattttacctgtcaactctttacaaacagaagatcgaatgccttgcctactgttttcctttgtaggatgacatgacttccttttacaacactcctcccctgggaaaaagaggaacatgcagctatttgacaaaggcggtgatgaatctgctgctggaaggagaagtcaagccaaacaatgatgacccgtgtctgattagctagtggggaaggtgtaggaagctctgttgagacacatgttctgaagtgtgttgtgtttcatgttcaagcttaatcaaggcagccattaatatacgaactgagcatgctggggaggtgaatgccacatccttggcggggttatggacctcttgcatgtcatagccaatctaacggtaatggtaaatgcttttaatcaagcaggaaaaagttctcatgattatgccaactataatagtaatcctcactgagtgataaaaatagtttatgaattgaaaatttgccgctgcatgttgtatgatcaaatagttcatcaaaatgaatctttgctctttggactgaattcttaccatactgccattaaaataaatttgccaactagtaatgcatactggaaatcaaaagatactgaaagaatggtgaacttctcttagtggtattgtcatgctaaaagatgttaatatacatcataaaagcaaagtcagccagctgatattttggttctcaaaaactgcattattaataatattttagtatacagagctattctacagtttttacattgtaaacatgactgtggttttgtatttgctaaatataggggttggactaaaatataataaatctgtaccttatcaaacattttctttgagctcctgctaaaaataggacatgtctatgattgttcaaaaatatgttaaatttaggctcagcacagtagctcacacctgaaatcttagcacttcgggaggctgaggcaggtggatcacttgaggttaggagttcaagaccagcccagccaacatggtgaaaaccctgtctctactaaaaatacaaaaattagccaggcatgatggtgcatgcctttaaacccagctactgaggaggctgaggcatgagaattgcttgaaccaggagacggaggttgcagtgagctgaaatcctgccactgcacaccagcctgggtgacagagcgagactccatctcaaaaaaaaaaaaaaaaaagaaaaagaaaaaaatatgttaaatttaaggactgttaacctacgttctactagtaaaaacaacattaagggtcattaaattttatttctgaattaatgaacatatctggacattttttgttcctaggttcacaagattgagcttcaaactcccgagtgttttcatttaattgatttagaggtagaatggaagagaatctgtggtacctaccattatacacatttagttgcccagtttacttaaactttaatgaaagtagaaagtagattaaacatttaaattttatttctttcctaaatagaaaaaaaaaaggcccatgagtttgagcccttgccccaaagagagttgtttttctgatcaatcttactggagtttcacctgagaagatagatttgtcacataaaaaatgcagcttatttgtagtgttttgaaaggatgtaagaaaggatgagtggcttcagtattgagtcaatcgatatcaaatgaatggatgtgtgagcacatggaaaaatctgctgtcagtcacatttctcataacattgaggtacagtgccgagatcttgcataagaaattgtatggatattagttggcaaaattgaaatgaatgagacacagttgggccctaaagaactaaggagggggattgacaaagaatagaattaaactacttgactcaatatgttaagagagtttatgaaaagatagtcgtgaagggtgaagctaatttgtaaaactaatgcctgaaaaaaacataagcatgaagtccatggagagggaattgagagctgacacttcataactggagaaactggaaattaaagaaagggaaacaaaagacttaaaatttttgtttgccgaaatttttacgaaagtaaactgtgttgtagttttaagaatttttttaaaaaatctgattagctgagcaaagttaccagaaaactgctatcctagttgaaatcaaacattacttgcaaatgtgttttctgagtgttagcttcctgcttaaatgttacatatgcaaaattctgaagttttcctgtgctactcctgaaagcattcagaatctgtgacacgtattgacttcatgctttgagattcaaaatttattgttctgaaagttatatttagaatcagtaaatcttgatattcacctttacaaaagccaatgcctgttttcttattagaaaagcaaaaaataataagaattagaacacagaactcatatgaaatttagaagtctcatttggtctacagagcccaaatgttttaacagctgcactagagaccgactggaaatattagcacatttatttaggcatgacaagatttaaatctgatttaaagcctcctctatcacaatggcagattcactgcgtaaatttattgtacaagcaacgtctgttggaaactcctgactgaatatcaagttcaactacattttcagagcatcattttaagaaacaggatgttttccagattttctgctgttatttaagcctgaaaacatcatatttcaatttttaaaaattaaaatggggaaacaatcaatgatgaaaaccacatgattatctcaatagatgcaaaaaaggccttcgataaaattcaacaccccttcatgctaaaaactcttgataaactaggtattgatggaatatattcaaaaaaataagagccatttatgacaaacccacagccaatatcatactgaatgggcaaaagctggaagcattcccattgaaaactggcactagacaaggatgccgtctctcaccactcctattcaacataatactggaagttctggccagggaaatcaggcaagagaaagaaataaagggtattcatataggaagagaggaagtcagactgtgtctgtttgcaggtgacatgagcctatatctagaaaacctcatcgtcatctcagcccaaaagcttcttaagctgataagcaacttcaacaaagtctcaggatacaaaatcaatgtgcagaaatcacaggcattcctatacaccaacaatagacaagcagagggccaaatcatgaatgaactcccattcacaattgctacaaagagaataaaatacctaggaatacagctaacaaggggagtgaaggacctcttcaaggagaactacaaaccactgctcaaggaaataagagaggacagaaacaaatggaaaaacattccatgctcaggataggaagaatcaatattgtgaaaatggccatactgcccaaagtgattaatagattcaatgctattcccattaaactatcattgacattcttcatagaatcagaaaaaaacctactttaaaattcatatggaaccaaaaaagagcacatatagccaagacaatcctaagcaaaaagaacaaaactggaggcatcacactacttgacttcaaactatactacaagtctacagtaaccaaaacagtatgatcctggtacaaaaacagacacatagaccaatggaacagaatagagatctcagaaataagactgcacatctacaaccatctgatcttcaacaaacctgataaaaacaagcaatggggaaaggattccctatttaataaatggtgctggggaaactggctagccatatacagaaaactgaaattggtcctcttccttgtatcttacacaaaaattaaatcaagatggattaaatacttaaatgtaaaacccaaaactataacaactctagaagaaaatctaggcaatgccatacaggacataagcatgggcaaagatttcatgatgaaaacatcagaaggaattgcagcaaaagcagaaattgacaaatgggatataattaaactaaagagctgctgcacagcaaaagaaactatcatcataatggacagccagaataggagaaaacttttgcaatctatccatctgacaaaggtctaatatccagaagctacaaggaatttaaacaaatttacaagaaaaaacaaccccattaaaatgggggcaaaggggccgggtgcggtggctcacgcctgtaatcccagcactttgggaagctgaggcgggtggatcacgaggtcaggagatcaagaccatcctggctaacacagtgaaaccccgtctctactaaaaaatacaaaaaattagccaggcgtggtggcgggcgcctgtagtcccagctactcgggaggctgaggcaggagaatggcatgaacccaggaggcagagcttgcagtgagccgagattgtgccactgcattccagcctggacgacagagcgagactctgtctcaaaaaaaaaaaaaggtggggggggtgcgaaggacataaacagatacttctcaaaagaagacatttgtgcggccaataaacatataaaaaaaagctcaacatcactgatcattagagaaatgcaaatcaaaaccacaatgagataaccatctcacaccagtcagaatgacgattattaaaaagaaaaaacagatgctggcgagattatcaagaaaagggaacccttatgcactgttggtgggggtgtaaattagttcagccattgtggaagacaatgtgattcctcaaagacctagaaccagaaataccatttgacccagcaatcccattactgggtatatacccaaagaaatataaatcattctattataaagataccggcacacctatattcattgcagtactatttgcaatagcaaagacatggaatcaaccaaatgcccatcaatgatagactggataaagaaaatgtggtacatatacactgcagaatactgtgcagccataaaaaggaacaagatcatgtcctttgcagggacatggatggagctggaagccattatcctcagcaaactaacgcaggaacagaaaaccaaataccgcatgttctcacttataagtgggagctgaacaatgagaacacatggacacagggaggggaacaacacatactggggcctgtcagaggggtggggaggagggagagcatcaggataaatagctaatgcatgtggtgcttaatacctaggtgatgggttgataagtgcagcaaatcaccatggcacatgtttacctatgtgacaagcctgcacatcctgcacttgtatcccagaatttaaattatttaaaaaatcagaatgtgggatcaacttgatgtcatcttcaatatgttataagcctgtggtgccttattcacaccaaataacatttattggacacctgaatacatttagcttttcaccaaaactcttaaacagtaaattcagggccaggtgtggtggctcactcctgtagttccagccactcagaaggctgaggcaggaggattgcttgagtccaggagttggaggctgtagtgagctagggtcacactattgcactctaacctcggtgaaagagcaagactcttgcctcttaaaaaaaaaaaacagtagatgcagatgctttaagcctttatgagcatgtatattaaatagatggcatatgaaagtgcatattcacacttcacaatgtggcaacagttatagcagcacagaaagaccacatttaaatccaggacaggttggaagtagcatatagcagtatgcagccatataataaaagtcctccgtctcagaaactaaaaacatgaatgaaaactgaggcagaatggaccagcaaaaccataccggcagcattcaaacaaaggaagcgggtagtacagcctcacaccataaactctgaaaagcagcagcggacaaaagacctactagaattagaatttggctcctatactctggcttcctagaagctgtgcatgggcgaggacaaggttagttaatttgtgaaaaatcaaatgcatttggagggaatcagatgcctgttgagtcggcacttaggggaaaattcagaaagtgtttctccaaggtggaagctcctcccccaccacacataacatcatccggcatcatatagcagggctactgccagcccacgctcagtcctgtgtgtgagtgagtggcacctttgtacagagaaaggtcctttctctgagcagatgcaaccccacaccaggacacatggctcagagtaaactggatttcagcccccagctgcattctcattggctcccttgtgcagtgcactgacctcatgactgtctcagtcctgctccccaaggaacggaaagctgttgggagtggcattctgactctgtctgggagggaggcagatgaggagcaaggttccccagaactcactgtctccaatggcaggtggtctgggagctggtcctgacctggttcttgttacctgagagggcgaggcttatgaggagtggtaattggagttgactgtcccctcttcttattatttctgtaatgttgttttaaactggacaaaattcactctgtctagtccagggcatatcctgtttccaaggacagcatcttccaatgtgggtggttctgccaaacagggtaaactttttcacttgtgacagaaatgcttagcctcagggataaatcccacctccttcactcccatctctccagaagttgctcctcctctcctcctagacagggaggaaaagtgggggaaacaggtggctttggggctttcctcctcacgggagtggggaacttagggcagggctgtccgtcagtccctttcccctctgctcggttggttcttgtgctggtactttttgagttctctgtcctctgaggactgcatattcctgacttgtgtcttattgtctaagaggaagggactcggctggaagcagcttggagaagaccaaagagttcaggttgggtgggagagtttcaaagaccacccacactgtaactggggacccacaaggctgctgtgcaaccatgagaaagatgcagagaaactgcccatcaactattttttgtagagacagggtctcactatgttgcccaggctggtctcttactcctggcctcagacggtctgcccaccttggcttcccaaagtgctgggattaggtgtgaaccaccatacccagccttatgcctgtaaacaatgtaaataatgctacaggaaaaaaagagatagatatagaacccattctgaaagaaaatttactctaggaaatag

SEQ ID NO: 97774 - DNA, 37301 bp, Homo sapiens
tatccatcctggctaccacggtgaaaccccgtctctactaaaaatacaaaaaaaaaaaattagccggacatagtggcgggcgcctgtagtcccagctactcaggaggctgaggcaggagaatggcgtgaatccaggaggtagagctcgcagtgagccaagatcacgccactgcactccagcctgggcgacagaggaagactccgtctcaaaaaaaaaaaaaaaaaaaaagaggctgttagaaatacttcataggtgctctatagcacccagtcataacatacgtgatacctagacagcccgtgtttagagatactaacagtgggtagtggcctcgggtgttatcagctagctccattataaaatactccatcaatctttcacctaagggtttaagcagatactaatgattgatgcttacatctattatttcactgagagttataaatgatgccttctcattcctttgcatttatcagctgaaatatatctaaaaaacttaccttgatcagctatttgattatcttgaaatataatttatactagaaagtagaaaatgtttgcttctcccctttaccaattttcagaacttgattctgcagcaacctccaaaagtaacaccaatttctaaaattttgtttagtattagtatgagctcataaattatttttactttaatattgatataaataaatttttatatattcaatcaattacactttttccttttgatatgtgaattgtctcacctttggcaagtagggtcccccttcattttggctcctagccttttgacacaactgttgatagctatcttgcttttctgatatatgaaaggttatttttatacatttcttgtcccaaacctgaaatcagcccttcctcaagaagttttagctccttttagtgggaaatacttatagaacataatctgtgtgttagtaatgttcattgttaatggctttttactgcttccgggcctctccagtaaacaaagctatgtgttttttagcaaatcatgaataacctcagtagatgccgaaaaaaaattttgacaaagtgcaacacctattcataataaaacccctcaacaaactaggaatagaaaggatcattcttaacttgataaatgacatctatgaaaaaacctacagccaacatcatatttaattgtaaaagacatgatgctttcctactaaaaacaagacgaaaatgtatattcttaccagttctattcaccattgtactggagattctagccaaggcaattcagcaagaaaaagaaacaaaagattaaaaattaagaaataaaactgtctttattcacagatgatatgaattttttatgtagaaaatcctaaagaattcagtgaaaaaaaactactaaaataagctcagcaaagtcacaggatacaagagcaatatacaaaatcacttgtatttctatatgctagcaacaaacaatttgaaaatgaaattaagaaaacaattccattctcaatagatctaaaataataaaatatttaaagattaaataaatggaaaaacatcctgctcatagattagaagatttactatcattatggcaacactccccaaactgccctatgaattcaacacaatcattatcaaaatcccaggaagttttttttttttttggcaacaattgacaagctgatcctaaaattcttatggaaatacaaaagacgcagccaaataaccttgggaaaaaaacaaagttgaaggtctcacacttcctgatttcaaaactcactacaaagctatagtaattgagacagtgtcgtactggcataagaagtgacaagtagatcaatgaaatagaaagtccagaaataaacccaaacatccatgaaatactgatttttgaaaaaaagtgacaagacacttcaataggaaaaaaagtctgttcaacaagtggtgctgaagcaaatgaatatccatgtgcaaaaggatgaatttggacccctacctcacaccatacacaaaatttaactcaaaatgacagacctaattttctaattagaaaatcctgagaagaaaacaaaagtaaacctttaggacctgaggttaatcaatgatttattagattcaacaccaaaagtacaagcaataaaagaacaaaaattggtcagacttaatgaaaatttaaaacttttgcactttaaaaataagagttaattctgatattcccaattaaatgtaatattagagtttttacttacttgattttataattgtgtatcttttacactgatgatctctcttttttttttaatgtcacccaggctggaatgcagtggcacaatcttggttcactgcaatctccacctcccaggctcaagtgatcctcccaccccagcctcctgagtagatggcactacaggcatgtgccaccatgcctggctaattttttgtatttttatagagacagggtttcaccatgttgcccaggctggtctcgaacttccaacctcagatgatccacccacctcggcctcccaaagtgctggaattacaggcatgagccaccatgcccagcctacactgaaaatctgaattcttacacacgttaccatattataaataggccgaaataataatagctacattattaagacaactgaatgtgatttaaaatttatttgctgctcttctttttctaggatggagcctgctagaatatacaaccaaaataccacaaatttaaagatactaaaaatttaaagatacacaaatttaatgatactccaggctgggtgcagtggctcctgcctgcaatcccagcactttgggaggccaagaggggaggatcacttgagcccaggagttcaagactagcctgggcaacacagcaagaccccaactctaaaaaaaaaaaaattatcaaaaaaaagaaaaaaggccagacatggtgttacacacctgtagtccagctactcaggaagctggggcaagaagaccactttagcccaagagtttgagcccagcctaagcaacacagcaagatcccatctctaaaataaaaatataaaggccaagtgtggtggctcacgtccataatcctagcatttggggaggccaaggcaggaggattgtttgagcctcggctcaggtgggaagggttaaagaccagcctgggcaatatactgaaaccccatctctaccaaaaatacaaaaaattagctgggcattattgcatgcacctgtagtccgagctacttgggaggctgaggagggaggatggtttgagcccaggaggcagaggctacagtgagctgagatcatgccactgcactccagcctgggcaacagagccagaccctgtctcaaaataaaataaaagtaaattaaattaaaatagatactgaaaaaaatttgtgtgggctgggaacagtggctcatgcctgtaataccagcactttgggaggccaatgcaggaggatcgcttgagcccaggagaacagcttgaacaacatagggagacctcatctctacaaaaattaaaaaattagccaggcttggtggcaatatgcctgtggtctcagctacttggaaggctgagtttggaggattgtttgggccagggaggtcaaggctgcagtgaactgtgattgtgccactgcactctagcctggacaacagagcaagaccgtgtctcaaaaaagaataaaaaaacttgtgtgattatgccatgaacttaatacagttaggctcatttttttttaattgctaaggattgctttgttttttccttttgttctaattttctttcataattatacaaaacacttacatggttctaaactattaaaaaggaacattcaggtaaatcttaactttcattcctgtcccctctactctgttccttccttctccctataagtaaatacagttataagtttgtggtttatcctttcattgttttttgaaagcataaggaaatacactcatatctccctcattccttacataaaaagtacaatactctacattctgtccacatacattgctctttcacataacagtacatcttggagatcactccatgggagtaaagagatatcttccccaatcctttttatagctgcatagtagtaattcattttgcagctataccaggcctgatgagcatctgagttgtttttagtcttgctattacaaatactattgtaataagtaaccttgtacatgcttcatttcatatttttttgccagtgaatttttgggacagaatcctagaagtggaattgctaatcaaagggtgactgcacacatagttttgtttaatattgctaacttcttctccattagggttttatcatttgcaataaccttttaactgtttcccttcttccactcttgtctacctacacccattctccctcatatcttataaaatcctataaaatactaattgaatcatattactctcttacttaaaatctttcagtggcttcccattgcatttagaataaaatccaatctcttcacactataaaaacttagatgatagagctcctgcctctgtatcaagttaggattaagtttgactatgagcaagaaagacccaaaatgacaacagctaaaacaagagagaagtttacttctctgacaagtaagtctagaggaagactgcccaaggctggcactggagttcaccttcaagaaaacctcagggcacaagctcctcccaggccatgctctgtcatccctaggacttgttcctcaaccccaagacctaagagaatagctatagtactagtcataatatcaatgttccaggcagcaaagttggaagaagggaaaagtaagaaaagggggaaggggtacatgccagttgttttttattataggtaagatttctggaagctctatatgacacttcaatttgtatcccaaatcagaacatattcatatgactatacctacctacgaggaaggctggaaaatatcatctttattctgggcagccaggtgccctagccaaaaattgggacattttatgccatggaagaagtctttgctgcacaacctattcagtttcagctcataataggccatacacccttattcactatgctctagccaaaaaacttcctttgttcttcaaagcagccaaactcttacctatctcaaggtttctcctgcctagcacacccttcctcagatcttcacatggctggttccaactcatcattcaggactcagttcaaaaggtcacttcctcagacagaccttctttgactactgtatgaaaggtaggccccaccccagtcaccctttttcatattgcactgccttattttcttcatagcatttgtctccatctgaaattattaaccttttgccttatttcactaaaatataatttcctcagaacaaagaccttttttcacttcttcactgctatattcctattatgcagtacaattctaagcacatggtaggagtttaagattagttgaatggatgaatgtctgactccaaagcccatgcttttcccattacatctactgctcctagtacatctgaaataatatcccattccagtagtcaatctttgtttttttgagaatgacagcctaataattttctttcaatcaagatttttaaaaaattattcctaaagtaaaagaaaatcttatgctcagtaagtaaaaagaagagatttggataaaacatcatgggcaagactcttaagttcctcgatctcacagttttcatctgtaaaaagaaagagttgattaaaattgatttaatctatagatatttaccaagcattatgctaaactgggacatgaaggttaaataagataatttctgacctcaaaaggggctcacaggtgcctttcaactctacaatttgtaagattctatataattgttagtctgtaccctctgtgttaacagaaaaagcctaccaatttccactactgagatattaattaaaagatgtcgagacattgataaacacattgcttcattttaaaataaacatttaattcaacattgcaacaggagttgaactgtatttaaaacagaagcatattaatgactaaaaaaatgtgtatattaatctttagttcccttttgaggggattttgattgccagttctccgcagtgaaatgctaggaaaatgtctttagaagacagaattctttctgaatgcaagtctaaaatgcttaaaagagattaaaggttttaaagacccaaatcagaaatatccattagatacatctcatttgaatcctaagagtttaaacataataaacgctgtatttatttattttatttcttttttattttttgaggcagagtctcactttgttgcccaggctggagtgcagtggtgcagtcttggctcactgcagcctgtcttctgggttaaaacgattctcctgcctcagcctccccagtagctgggatcataggcatgtgccaccacgcccagctaattattgtattttcagtagagaaggggtttcaccatgttggccaggctggtcttgaattcctggcctcaaatgatccacccacctcagcctcccaaagtgctggaattacaggtgtgagccaccaagcccagcctatatatatatatttaaagatgacaagaaattaacaactcagcattttgagaatggcatgtcaggttatcatgattagtacatgggcacctggctgtggctcatctactaccatattctttgttcttctagatccttcttggcttccatcttggcaactccaaaggcatggtggggaaaacagatgcagagatagatgcctatttctcctgcagtctctttcagcatagcaattaggcaagttatcaataagagtatataatctataacttatagtccacataaggcttcactcaatttgaaaaattgccagttctgtcaaatatgctaacactccaataaggtatttatgacacagaatctgcaaaaagaaaaagaaggagacatttaaaattagaatagtattaattataacaaagcagattgatatttgaataatcaatgttatattggtttaacttctagatttaattcatgaagcttaccacatgcaatacactcatttttggccaggcacagtgatttatccctataatcccagcactttgagaggccgaggcaggaggatcacttgagcccagcagttcaagaccagcctgggcaacaaagggagacctcatctctacaaaaaaattttaaaatgtaaaaaacagccaggtgtaatggtatacacctatagtcccagctactcacaaggctgaggcaggaggatcacttgagcccaagagttaaaggttatagtgagctataatcacactactgcattccagcctgggtgaaagaatgagactctctctaaaacaaaaaacccctcatttttacattttctatttctttccctttttgttttttaatgctggtctcatcaaaattatttcccaacctactgttgcactgtgacctccagtttgaaaaacatgaatatagtgcttatagagtattgacttattggatctacgaggtaagagttcaaatcttgattcttcctcttgataatctatcttgcttgtcatttaaacctatcttggcctcagtttccttgttttaaaataaaatgtggataaaaacacctaactgtccaggcacggtggctcatgcctataatcccagcactttgggaggccgaggtgggtggatcactaggtcaggagtttgagaccagcctggccaacatggtgaaaccccatctctactaaaaatacaaaaattagccaagtatggtggtggagcctgtaatcccagctactcgggaggctgaggcaggagaattgcttgaacccaggaggcggaggctgcagtaagccaagatcacaccactgcacaccagtctaggcaacaaaacaagactccatctcgaaggaaaaaaaaaaaaatctaactagccaggcatggtggctcatgcctgtaatcccaacactttaggaggccaaggcaagtggatcatttgaggtcaggagttcaagaccagcctggccaacatggtgaaacctcatctctactaaaaatacaaaaatagctgggcatggtggcaggcacctgtagtcccagctactcgggagactgaggcaggagaatcacttaaacccaggaggcggaagttgcagtgagttgagattgcaccactgcaccccagcctgggtgacagagtaagactccgtctcaaaataaataaataaataaagataaaaatagtaaaaaaagtaaaattacaaaaattagccaggtgtagtggctcatgcttgtagtcccagctactcaggaggctgaggcacgagaatcgcttgagcctaggaggcagaggttgtagttagctgagatagcaccactgcactccagcctgggtgatggggtgagattctgtctcaaaaaaaaaaacaaaaagcacacacagaaaaaacacctaactacagggttgctctaaagattagaatttaagtctgttaaactcttagcacagtaacaagatcacaggaaacatttactgaatgtacattgtggctgtgtattttaatatattttaggagccaattctcagtttatttctgatactttttttttttcttttgagacggagtctcgctctgtcacccaggctggagtgcagtggcgcgatctcggctcactacaagctccgcctctcgggttcacaccattctcctgcctcagcctcccccagtagctgggactacagatgcccaccaccacgcctggctaattttttgtatttttagtggagacggggtttcaccgtgttagccagcatggtctcaatctcctgacctcatgatccgcccgcctcggcctcccaaagtgctgggattacaggcgtgagccaccatgcctggcctatttctgatacttcttatcagaaatcactctgtagagaataaaacaatgtctctattatttctttcccaatgaggacagaaaagcctggaacataaagatgacatcttagttctgtgtttctggctataattttgtctaacacaaaattctctattactctgataattatttcaaaatttcacaaggaacaattctgaaagtttcaaagttactacaaaataataattcacattattaccaaaagctgaagcacacagcatatagtgtccttccattataaggctatatctagaaggctaaagactgcaataaaccataaaccataaaataaaagctctctattgtcttgaatacattcaagtgtgtttcttcaattgagtggacaatacaatcatcatacatttttaaaaccataaaacaaggaaaaattacttaactagattgttcaaactaacctttatttttccatcagtatgtgctgaagctacagatgttgaaacacgaactaatcttgtggctgataaatgaattttgaaatgtctatggaaatgtgaataaaggcaatccatgaataggtcaacttcttcctgggtaacctccccaggtgttttgtggacactgtcccatagagcttttgcatcctctggatgtattgcgaaagaaatgtccagactttgagggctacagggtacagaccaaagaaattcagtagtagccacataatggtccattttgcatgcagtccacatggcagccatccaggaaagattaaatgcattgattgctaaaggactgaaataacagtcaaaggttttctgaaaccaagttccaattattgctgtgttagactctgctccatttgcaaggaataagggcagacaggtgaaatcttctgaaacagtctccagaagactgtctccaaatacacagcagaaccagccagtccacagcactttaccttctctattctcagatggcaattgagattttgacacaatctacaaagaaagtaaacaggctccttaaattcaaaagtacatttacttctaaattccatcttctcaaaattagttcattaaaaataagacgagccaatgtaatacttgcaaaaaaaaacatagagggaatagtctccctaatgattaacagggcttatcaaaataattggccttttttttttttgagatggagtctcactctgtcgcccaggctggagtgcggtggcgtgatctcagctcactgcaacctccacctcctgggttcaagtgattctccggcctcagcctcccaagtagctgggattacaggcatgcaccaccatgcccagctaatttttgtatttttagtagggatggggtttcactgtattggtcaggctggtctccaacctctgacctcaggtgatctgcccacctcggccacccaaagtactaggattataggcgtgagctaccaggcccggcccccaatattcttatacagtggaaacatgatatatggcaaaatcttggtgtaaccaaactgcaaaataagagctaccaatatggcataaccaggtgtagtaccctgaaacaaacaaacaaaaaaaacccctcaactttagaaagaactgtgaaaggtcacaaaatctaacatgtttgaattctttcattgaggaaggcttcaatatttcctaaggcagcactatcaacttaaaatgttcttttatatgttagaccctacagtttctacccactggtcctgctttcttccttttgggcatgcagaatataatcacatctgatctctcttctacaggaaaagtccttcaaatatttgatggtccccatcatacatagtactaagttcaatatttccagtttcttcaaccattcacctatgacatacattcacattctctcactattctagtcactcttccctgaaattattctgcataggaatcattcataagtgaatataattactttaaaaagctctgattcggggaaggaagggggaaaaaggtctcattgcaagactaaccaccacctttaactagattatactcctattaatgtaatctcagattgcagttttctggtttttagttgacagctttatataaactagccctgtatattcatgtttgctttataggtaaatctctcccaacttatactgaggctgtaaatttattcctactaacattttaatctcttttgatttggctcattggacaatccattcagaacatttaggatattttattatatttttagctgattgcctaacccctcaaactaaattttaagttacatgacaaacatgccttccggatactcaaagaactctgttaaagcattaagcagaccaaggttaatatcatagctttgtatcataccccttcagaaatgatcatttacacagttcttttaacatatttctccttgttcaagaaattatgaaagactctcaaatagctggaagcttagatatattaactttatcacactttcatgacctaagagtcttgtaaccctatcaagaaacgaaatttaatttgaaaactattagaacactataccaggaattcaagaggtcatttctaatcctcacaagggtagatgcttgactgataatatgcaagtcacaaaacttctctgtgcatcaagtgcttcacttgacaaaaactgctaattgtctcttgagtatccatttttcctcccacaataaaacagtccctttatggctgggcgagatggctcatgcctgcaatctcaggactttgggaggccaatgcgggtggatcacgagctcaggagtttgagaccagcctgggcaacacggtgaaaccctgtctctataaaaatataaaactagcctggcacggtggcacatgcctatagtcctagctacttggggggctgaggagggaggactacttgaacccaggaggtagaggttgcagtgagccaagacagtaccactgcactccaacctggtgacagagaagctgtctcaaaaaaaaaaaaaaaaagtctctttagttaagttggcagagtactcactgaaaaaaaagtcttttctagcctcccttccaactaagatgtaaagagaagttactgggtctcagcaagatttactctgcatcaggttctgtttgtccttcccatcttcttcctacttcctgcctggaacttgaawataatgtttagagctgctggagacatcttatgttagacaataaggtaacttctaagatgaaaaccatgcactaaggagaagaaagagcctagattattaatgatttcatcaagcatcataycagcctcggacagcttacatccatgcactttttttttaaaaaaagacagtataccactatcttgtttaattcactgttatttaggctaaccctaatcccagaacatcttgagatctttgccaataccatgacctatatcaggggtcagcaaattttttctgtaaagggccagttagtaagcatttcagactttgctggcaatatgggctctgttgcaacttctcaactctgctgttgcagcacaaaagcagccacagacaatatataagcaaataaaaggggctatgttccaataaaaccttatttacaaaaacaagcagcagatcagatttggcctatgggccatggtttactgactctaatctatacaaacaaaaagtcagtccttttcaactgcttgagaacttaatttccttatccattattaagattagttagctcaaaagaaacagaagcagcaggcatgaataataaacaaaataaatctgaggctgagtgtggtggttcatgcctgtaatcccagcactttgggaggccaaggtgggtggatcacttgagcccaggagttcaagaccaacctgggcaacatggcgagaccctgtctacaaaaaatacaaaatttacccgagtgtggtggcatgcacctgcagtcccagctacttggaaggctaaggtggaaggatcacttgagcccaggagacagaggttgcagtcaaccaagatcgtgccactgtactccagcctgggtgacaaaatgagaccctgtctcaaaaaaataaaataaaataaaataaacgcaacattttatattccttcctgtaagtagtatataagagcaacagaactatcttaagaaaccagatttatttatttatttattgtattttttgtagaaatggcatcttgtcatgttgcccaggatggtctcaaactcctaggctcaggtgatctgcccgccgtagcctcccaaagtgctgggattacaggcatgagccactgcacccagccttaaaatgttacatttctgagagtaacctggcatgaagtatcacaaaatttaatgatatatatttttatactaaaattctacttatagaaatttaatcccagtaaaaaccacaaaaatacagaattcctaatgatataagtaattgtctacaatattagtaaaaatatcataatgtaaaagtatgggcaatatgatcccaatttcaagactatatagatacagataaccaaacatatataccaaaatgttaaactataatttttaacttttttggtatttttatgtatttcctcagtttttaaaaataaacatgattttgtacacaaactacctatatatataggaaaaaattttttaagttgattatatctaattattatagtttagtcaaacaagacataatacttttcccctaggaagcaagaactgtttatgtattatacctggacaagaaatgcttccgggtccctttgtgttcctttcattcctaggagagtagaaaaaatcactttgatgttgaagtcttctcccacttccacagcaagtcctttttgcttttcagcaacaataaaagcattgagaagtctagaatactctttgagattactataggagaatttatataagggagttaaactatataaagtccactgtttatgcagaaggaatgcaaccttttgagggtcaacatcttcctataaaaaaaaatcaagacaaaagaagtttaagaattaggaaacaataagaatttaatcatagcatttaaaacatctaatacaaatatattattgagtacctgatttttgcactccaaccaaatgagtttgcaggactttttgcagatccttgaacagacctttacctttgctgtaccttctctttagaatgctcttctcccaagtgttcacatggcaagttccttcacttcatcagttctctacccaaatgtaatccaagaggccactcgatctaaagtagcacctgcacccactccaactttgtatcacctcatctggctttacttttcttcacagcacttattactacccaacattatattcttgtctgcaatttttttgtatttttattatctgtcttccctactggtgtataagctggatgacagcagtgattttgtctatttagttctctctagaacaatgctatctagaataagtgttcaataaatatttaacataaaatttatgtttcacttttagaaacctcaaactatagatttcaaaagtagtaaccattcctaaagtatctaatttgattagtcttaatttaaaaaattgtttgggccaggcacagtggctgacgactgtaatcccagcactttgggaggctgaggcaggcggatcacaaggtcaggagtttgagaccagcctagccaacatggtaaaaccccatctctactaaaaatacaaaaataaataagccaggcatggtggtgtgcacctgtaatcccagctactcaggaggctgaggcaggaaaattgcttgaatctggaaggcagaggttgcagtgagccgagatcacgccactgcactccagcctgggtggcagagcgagactctgccttaaaaaaaaaaaaaattggcagcaaatctactttatgaaaccatgcccaattcaatagattaaataaaaagatacttgggggctggtccaaaggtagtgagttatctcagttgattgttcacaatcagttatagatcaaactccttgtttccaactccctgttctactctttcccccttccccctttgtcactactgtgctagactagtcttaaaaaaaaaaaaaaaaagatatttgggaatattttttgccatgctctattagaaccacaggtacgattaaaaacaaaaacacttcatttataccatatactatatataaaaattaactcaaggtggattaaagacttaaatgtaaaacacaaaactataaaaaccctggacgacaacctaggcaataccattcaggacataggtacaggcaaagatttcatgacaaagacgccaaaagcaattgcaatgaaagcaaaaattaacaaatgggatctaattaaactaaagggcttctgcacagcaaaagaaactatcaacagagtaaacagaaaacctacagaatgggagaaaatttttgcaaaccatgcatctgacaaaggtctactatccagcaccaataaggaacttaaacaaatttacaagaaaaaaaatgggccaggtcaggcgtggtggctcacacctgtaatcccaacactttgggaggccgaggcgggtggatcacctgaggtcaggagttcgagaccagcctggccaacatggtgaaacccggtctctactaacaatacaaaaaaattagctgggcgtggtggcgggcacctgtagtgccagctactccggaggctgaggcaggagaatcgcttgaacccaggaggcggaggttgcagtgagccaagatcgtaccattgcactccagcctgggtgatagagcaagactcccagcactttgagagggtggggagggttgatcacctgaggtcaagagttccagaccagcctggacaacagggtgaaccactgtctctactaaaaatacaaaaaaaattagccaggcatggtggtggatgcctgtaatcccagctactcaggaggctgaggcagaagaatcgcttgaatctggaaggcagaagttgcagttagccaagatcatgccactgcactccagcctggctgggtgacagagtgagacactctctaaaaaaaaaaaacaaaacaacaacaaaaaaaaaacaaccccattaaaaagtcagcaaaggacataagcagacacttctcaaaagaagacatacatgaggccaacaatcatatgaagaaaagttcaacatcactgatcattagagaaatgcaaatcaaaaccacaatgagatgctatctcacatcagtcagaatggctattattacaaagtaaaaaaacaacagatgctggtgaggttgtggagaaaaataaaaagtcaaaaaaaaacagatgctggtgaggttgtggagaaaaaggaatgcttatacattgttggtaggagtgtgaattagttcaaccattgtggaagactgtgtggcaattcctcaaagacctagagacagaaatattatttgacacaccaatctccttactgggtatatacccaaaggaatataaatcagtctaccataaagacacatgcatgcatacactcactgcagcactattcacaatagcaaagacatggaatcaacctaaatgcccatcaatgacagactggataaagaaaatgtggtacatatacaccatggaatattatgcagccataaaaatgaatgagatcatatcctttgcagggacatggatggagctggaggccattatccttagccaacaagcaaaggaacagaaaaccaaataccacatgttctcacttataagtgggagctaaatgatgagaacacatggaaacatagaggggaacaacacacgcttaggcctgtcgggggtggagggtgggaggaaggagagaagcaggaaaaataactaatggatattaggcttaacatctgggtgatgaaataatctgtacaaccaacccccatgacgcacgtttacctagaaaacaaacctgcacatcctgcacatataccccttaacttaaaataaaagttaaaaaaaaaataccgtggacatgattcagattaaaggaggttaaaatacataaaaactcctcgtatatatgggttgcatgtttgaaaattactttaaaaataaataaacaggccgggcgcggtgactcatgcctgtaatcccaacacttggggaggctgaggcgggcagatcacaaggtcaggagatcgagaccatcctggctaacatggtgaaaccccgtctctactaaaaaatacaaaagattagctgggcatggtagcgggcgcctgtagtcccagctactggggaggctgaggcaggagaatggccgccaggaggcagagcttgcagtgagccaagatcgcgccactgcactccagcctaggtgacagagcaagactctgtctcaaaataaataaataaatacataaatacaaatataaaaaacaaataaaagacataaagaggtagcrctgatcgttatgaaattgtttctttctcatttattttattagctgaggggttaagaagatactaagaatactatagttacaaaaattgaaatgttttgttcacagatattctcaattattgactaacacaaagggacacaaaaagcatacctgcaactgcgaacactggggaattttccttcgaggtggagtcaggataaatgaactctgcttcctgaccgattctaatcgtttctgcagaggagtggcacctataaagtaatcttcaggtcttgaggatgcactaggagttgactctggtgcactgtaagaatccatggtctgtctgcataagaagaaacaaaaccagaattctaagcactaaaaagttaattcatgcttacagtttcactgattcctcactctaaaggaatcctttctctttctgtcttttcccctccctatccccagttttgacttttaaaccaagtcctatattcctcattggctatagcccacttttatgtatatcttacagatacctcaaaaacagtatatgttcaaaactaaattcaacttcttttcctccttcaaaaagctaactgatccattttcaaattcctgtcaatttgctaagttaacttaaattcatgtagtcccccaccttcattctttaacacatagtcattaagcacattctactgaatttttctgtcaagaatctgtctaatccagttccaagatggctgaataggaacagctccggtctgcagctcccagcatgatcgatgcagaagacaggtgatttctgcatttccaactgaggtaactggttcatctcactgggactggctggacagtgggtgcagcccatggagggtgagccaaaacagggtggggcattgccccacctgggaagcgcaaggggtccagggatttccctttcctagccaagggaagccatgacagactgtacctgggaaaatgggacactcccacccaaatattgcacttttccatatggccctggcaaccggcagactaggagattctctcccgtgcctggcttggtgggtcccacacccatagagccttgctcactgctagcccagcagcctgagattgacctgcgagacagcagcctcgtggtggggaggggcgtccgccattgctgaggcttgagtaggtaaacaaagtggccatgaagctcaaactgggcgaagcccaccacagctcagcaaggcctactgcctctatagactccacctctgtgggcagggcatagctgaacaaaaggcagcagaaacgtctgcagacttaaacatccctgtctgacagctctgaagagagcagtggttctcccagcatggcatttgagcactaagaacagacagactgcctcctcaagtgggtccctgacccccgtgtagcctaattgggagacacctcccagtaggggccgactgacacctcacacaggcaggtgccactatgggacgaagcttccagaggaaggatcaggcagcaatgtttgctgttctgcagcctctgctggtgatacccaggcaaacagagtctggagtggacctccagcaaactccaacagacctgtagtctagggacctgactgacagaaggaaaactaacaaacagaaaggaatagcatcaacatcaacaaaaaggacatccacaccaaaaccccatctgtaggtcaccaacatcaaacaccaaaggtagataaaaccacaaaaatggggagaaaccagagcagaaaagctgataattctaaaaaccagagggcctcttctccaaaggatcacagcccctcgccagcaacggaacaaagctggatggagaatggctttgatragttgacagaagtaggcttcagaaggtcggtaataacaaacttctcagagctaaaggagcatgttgtaacccatcgcaaggaagctaaaaatcttgaaaaaaggttagatgaatggctaactagaataaacagtgtagagaagaacttaaatgacctgatggagctgaaaaccatggcacaagaacttcatgatgcatgcacaagcttcaatagccaattcaatcaagtggaagaaaggatatcagtgactgaagatcaaattaacgaaataaagcgagaagacaaagttagagaaaaaagagtaaaaagaaacgaacaaaggctccaagaaatatgggactatgtgaaaataccaaatgtacgtttgattggtgtacctgaaagtgacggggagaatggaaccaagttggaaaacactctgcaggatattatccaggagaacttccccaacctagcaaggcaggccaacattcaaattcaggaaatacacagaacaccacaaagatactcctcaagaagagcaaccccaagacacgtaattgtcagattcaccaaggttgaaatgaaggaaaaaatgttaagggcagccagagagaaaggtcgggttacccacaaagggaagcccatcaggctaacagcggatctctyggcagaaactctacaagccagaagacagtgggggccaatattcaacattcttaaagaaaagaattttcaacccagaatttcatatccagccaaactaagcttcataagtgaaggagaaataaaatcctttacagacaagcaaatgctaagagattttgtcaccacgaggcctgccttacaagagctcctgaaggaagcactaaacatggaaaggaacaatcagtaccagccactgcaaaaacacgcgaaattgtaaagatcatcaatgctaggaagaaactgcatcaactaacgggcaaaataaccagctaacatcataatgtcaggatcagagtcacacctaacaatattaaccttaaatgtaaatggactaaatacccccattaaaagacacagaccggcaaattggataaacagtcaagacccatcagtgtgctgtattcaggagacccatctcacatgcagagacacacatacgctcaaaataagggagatagaggaagatctaccaagcaaatggaaagcaaaaaaaagcaggggttgcaatcctaatctctgataaaacagactttaaaccaacaaagatcaaaagagataaggaaggccactacataacggtaaagagatcaattcaacaagaagagctaactaccatatatatgtatatatatgcacccaatacaggagcacccagattcataaagcaggtccttagagacctagaaagagacttagactcccacacaataataatgggagactttcacaccccactgtcaatattagacagatcaacgagacagaaggttaacaaggatatccaggacttaaactcagctctgcaccaagtggacctaatagacatctacataactctccaccccaaatcaacagaatatacattcttctcaccaccacatcccacttattctaaaattgaccacataattggaagcaaagcactcttcagcaaatgtaaaagaacagatatcacaacaaactgtctctcagaccacagtacaatcaaattagaactcaggattaagaaactcattcaaaaccgcccaactacatggaaactgaacaacctgctcctgaatgactactggttaaataataaaatgaaggcagaaataaagacgttctttgaaaccaatgagaacaaagacacaatgtaccagaatctctgggacacatttaaagcagtgtgtagaggaaaatttatagcactaaatgcccacaagagaaagcaggaaagatatacaactgacaccctaacatcacaattaaaagaactagagaagcaagagcaaacaaattcaaaagctagcagaaggcaagaaataacaaagatcagagcaaaactgaaggagatagaaacacaaaaaaactcttcaaaaaaatcaatgaatccaggagctggttttttgaaaagatcaataaagttgatagaccrttagcaagactaataaagaagaaaagagagaagaagcacatagatgcaataaaaaatgctaaagggaatatcaccagtgatcccacagaaatacaaactaccatcagagaatactataaacacctctatgcaaataaactagaaaatctagaagaaatgrataaattcctggacacatacaccctcccaagactaaaccaggaagaagtcgaatcactgaatagaacaataacaggctctgaaactgaggcaataattaatagcctaccaaccaaaaaaaggctacgaccagatggattcacagccaaattctaccagatgtacaaagaggagctggtaccattccttctgaaactattccaatcaacagaaaaagagagaatcctccctaactcattttatgaggccagcatcatcctgatgccaaagcctggcagagacacaacaaaaaaagagaattttggaccaatatccctgatgaacatggatgcaaaaatcctcaataaaatactggcaaactgaatccagcagcacatcaaaaagcttatccaccatgaccaagtcagcttcgttcctaggatgcgaggctggttcaacatacgcaaatcaataaatgtaattcatcacataaacagaaacaacaacaaaaaccacatgattatctcaatagatgcagaaaaggccttcaacaaaattcaataggccttcatgctaaaaactctccataaactagatattgatggaacatatctcaaaataataaaagctatttatgacaaacccaccgccaatatcatactgaatgggcaaaaactggaagcattccctttgaaaactggcacaagacagggatgccctctctcaccactcctattcaatatactgttggaagttctggccagggcaatcaggcaagagaaagaaataaagggtattcaattaggaaaagaggaagtcaaattgtccctgtttgcagatgacatgactgtatatttagaaaaccccattgtctcagcccaaaatctccttaagctgttaagcaacttcagcaaagtctcaggatacaaaatcaatgtgcaaaaatcacaagcattcctatacaccaataacagacagagagcaaaatcatgagtgaactcccactcacaattgctacaaagagaataaaatacctagcaatccaacttacaagggatgtgaaggatctcttcaaggagaactacaaaccactgctcaacaaaataaaagaggacacaaacaaatggaagaacattccatgctcatggataggaagaatcaatatcgtgaaaatggccatactgcccaaggtaatttatagattcagtgccatccccatcaagctaccaatgactttcttcacagaattggaaaaaactactttaaagttcatacggaaacaaaaaagagcccacattgccaagacaatcctaagcaaaaagaacaaagctggaggcatcatgccacctcgctttaaactatactacaaggccacagtaaccaaaacagcatggtactggtaccaaaacagagatatagaccaatggaacagaacagaggcctcagaaataacaccacacatctacaaccatctgatctttgacaaacctgacaaaaacaagaaacgggacaaagattccctatttaataaatggtgctgggaaaactggctagccttatgtagaaagctgaaactggatcccttccttacaccttatacaaaaattaattcaagatggattaaagatgtaaatgttagacctaaaaccataaaaaccctagaagaaaaccgaggcactatcaatcaggacacaggcatgggcaaggacttcatgactaaaacaccaaaagcaatggcaacaaaagccaaaatagacaaatgggatctaattaaactgaagaccaggccgggcgcagtggctcacgcctgtaatctcagcactttgggatgctgaggcgggtggatcacaaggtcaggagttcgagcccagcctggccaatatggtgaaacaccatttctactaaaaatacaaaaattagccaggcatggtgatgtgcgcctatactctcagccacttgggaggctgaggcaggagaatcgctgaacccaaggaggcagaggttgcagtgagccaaaatcgtgcccctgcactctagcctgggtgacagagcgagactccgtctcagaaaaaaaagaaagcaaaaaaawaaataaataaatactgtctgcacagcaaaagaaactaccatcagagtgaacaggcaatctacagaatgggagaaaatttttgcaatctacccatcagacaaagggataatatccagaatctaaaaaggacttaaacaaatttacaagaaaaaaacaaacaaccccatcaaaaagtgggcaaaggatatgaacagacacttttcaaaagaagacatttatgaagccaacaaacacatgaaaaaatgctcttcatcactggtcatcagagaaatgcaaatcaaaaccacaatgagataccatctcacaccagttagaatggcgatcattaaaaagtcaggaaacaacagatgctggagaggatgtggagaaataggaatgcttttacactgttggtgggagtgtaaactagttcaaccattgtggaagacagtgtggcaattcctcaaggatctagaactagaaataccatttgacccagcgatcccgttactgggtatatacccaaaggattataaatcatgctattataaagacacatgcacacatatgtttattgcggcactattcacaatagcaaagacttggaaccaacccaaatgtccacaatgatagactggattaagaaaatgtggcacatatataccatggaatgccatgcagccataaaaaagaataagttcatatcctttgcagggacatggatgaagctggaaaccatcattctcagcaaactatcacaaggacagaacaccaaacgccgcatgttctcactcataggtgggaattgatcaatgagaacaattggacacagggcggggaatatcacataccggggcctgtcgaggggtcagtggctgggggagggatagcattaggagaaatacctaatgtaaatgatgagttgatggctgcagcaaaccaacatggcacatgtatacctatgtaacaaacctgcacattttgcacatgtaccctagaacttaaagtataatttaaaaaataaaataaattttttaaaaatgttaaaaaaaaaatctgtcatcccttcacaaagctaattccttagccacaactaagagttctccgtatccagagtaatccattcttccaaaaatagcactttattttatctatgcaaaaacctttacagtaacaagacaaatcctaaactcttctgctgggtttaaggtctttctaattcagcttctctttattttcctaattctcctctccaacctgggacataaacatattcttatcttcatgtgtttgcttctcaactgcatttcctatcttaagcgtccttttcccatctcacctcctttaagaccatgctagaaatttgatctcctttcaaactagggtgtttttaaccttttggtcctgaaatacctatggcatacatttttatctgttatctgttatcagtggctcattcctggaagcagagtatgcatgtgtgtgtgtgtgctgaatgagctctcatctctaaataagtctgaaaaaatccctcaagaatgttctacaaaatccttggagatataccagcacacatagctttcctcaatcacccagtctgtaccactcattttagcccctgttcatatacttccttgtaccatttttcagtgtgtatttcttgtaccctcagtaaaactaagctactgtcactgaaaccatgctttatatttctcttgtataattacccaaatacaaggctgagtgtcctttaattgttaaacaagtattggttcaattaaacggaagtatttcatagaacttccaaattagggccgggcatggtagctcatgactgtaatcccaacactttgggaggctgaagcaggtggatcacttgagctcagatgtctgagaccagcctgggcaacgctgtgagactccatctctacaaaaaataaaaaataactagccaggtgtggtagtgcacacctgtggtcccagctactcaggaggctgaagtaggactgcatgagcccaggaggtcaaggctgcagtgagatgtgatcatgccacygaattccagcctgggtgacacagcaagaccctctcaagaaaaaaagaaacacaaaattaaaatacaattttcattaaaaggaattatcatttcaaagttatgattagtctcagctgggcgtagtggctcacgcctgtaatcccagcactttgggaggccgaggaaaagtggatcacctgcagtcagaagtttgagaccagcctgaccaacatggtgaaactccgtctctactagaaaaacaaaaattagctgggtatggtggcacacacctgtagtcccagctactcaggaggctgagaggagaatcgcttgaacccgggaggtggaggcttcagtgagccaagagcacaccactgcactccagcctgggtgagacagagcaagactccatctcaacaacaacaacaaaagttattagtctcaactactacacaattacccttttgaaaagttttttacgaataaaaagttatattactatatttacttattttattttattttattttttgagatggagtctcactgttgttggcctgggctggagtgcaatggcgcgatctcggctcactgcaacctctgcctcctgggctccagcaattctcttgactcagtctcctgagtagctgagattacagctgcccgctaccatgcctggctaattttttgtttgtttttttttttgtatttttagtagagacagtgtttcaccatgttggccaggctggtcttgaactcctgacctcaggtgatccaccagcctcccaaagtgttgggattacaggtgtgagccaccgcactcggcccatatttaaatagtattatatttaaaatagcacaggttgagcatcccttacccaaaatgcttgggatcaaaagtgtttttgaatttcagattttctcaaatttgggaatatttgtatcacactggtcaagcatccttaatccaaaaatctgaaatccaaaatgctccagtgaacatttccttccagcatcatgtcagtgctcaaaaagattcacgttatggggcatttcagacttcagatttaacctgtaacttctatttcaatatgttagactaggacaccatttatatcttgcacaaaactccacaaattaaacatgtagtcctagcatggacaacacagcaagaccccatctttcaaaaaaaaaaaaggaattagcctggcatgatggtagtcgtagccactccagaggctgaggcaggaggagtgcttgagcccaggagtttgaggctgcagtgagctatgatcacaccactgcactttagtctgagcaagagtgagaccctctctaattaataaataaataaatacataaactaaacatgtagcattatttgtccttaaagctcaaataatgtccagagcaagttcatataccacacaatttatttatttatttttagaaatgttcatagtagctttattcataatagccaaaaattgaaaacaactcagtgggtgaatgayaaataaactgtggtacatccacaccatgtaatagtactcagcaatgaaaagaaacaaattattgatacatgcaacaacttggatgttaaagccaatccaaaaaggtcacatataaaatttcatacatttaacatttttaaaatgacaaagttaaaggaatgaaaacagatgagtggctgacagagatcagggaaagggaagagggtgggagggacataaatgtgactataaaaaggcaacacaagaattccttgtggtgatggaactgtatcttgactgtagtgaatacatgactctacaccagacaccacacaatttaaatagcagctattctaaagcatcctagctttaaatgcatattgaattacctatttcaaagggaattttaatcaatcctacttagacagaatgtttccttcaaatttgttacttggtacaataattgctaacacttattgagcattcatcatgtttcaggtactcttctaagccctttataaatattttctcatttaatcttcaaacaaccccatgaagtagatcatgctcccagctaacaaataggaaatcagacaagttaagtaacttgccaaagtcaacaagttagagtggaagagtcaggatttgaatccagacagtctaactctgcaatgagtgcacttagctacttctttcacgttgccttttaaacagggatcaattatgaggcaacataagccctgctgaatttgactccttaaaagagaaatgctatgaatcccaaaaagattttaaagtctaggtgactttaaaaagtctagcaataaatgtaggtgagaaaaagactatcagcactaagagggatggttttgaaaaaacatgtcaattgtgtatttaatgttaacgtaaaatagcccaatccacgaattaaagattagcaaatgatttatacttattttaccttctcatctcacactcaagaatgtgtaatttttgcccagcacaataatccagaggttataaatataccttgactcaatatattactgtcccaatactcttccttccaatcggaagcaaagaggtcctcttacttgtatctcccctggacaccatctcctttgtgtacttcagccttttttttttttttttttttttttgagacagggtctcactctgttgtccaggctggagtgcagtggcctgatatcactgcagcctccacctgctgggctcaggcgatcctcccacctcagcctctcgagtagctaggactacaagcgtgcaccaccacaaccaggctgtacttcacatctctatcatctttaatcactcctatacaggatccttttctttcactgccaagcatattctagtatttctaacattaaaaatttgtgtttaaatccaattcgtctcattccttctgagaccaatctcctggaaacgtcgtctacacctattgcctccagttactaataaatattttactagaaatcttcagcaatctctttcttccatctatcactacaaagaaactgtactttcgaagatcattgtttttgccaaaaccatggccaaatactttgttcatcaagtttgttcatccttactcctctaaactttctgggaccttgtttcctctgacattccattttttaggggcttttctcctccttactttttatagttccaatttatttactgattctttttttttcctcatgttccaatagtaggtggccccagattctgaaaatcattcattctacataggaaaataatcattctatatgactcctaaatctctgtcttcagaccattacagctgcaacccagtcctgcatttccaacctccgtcaaactcattaagttcaaaactaatcatcgcttcacatcttattcaatctttctttgccaactactgtactctgttttgctcagtaataattccattcttccttttcattttctttccccactaaaaaaactttcatcatcttttactcttccttcaacatcacctttacatctaaaaagttaactttgttaactttatcatcaaattctcacatatttcttttttgaagacagagtctcactctgtctcccaggctggagtgcagtggtgcaatcttggctcactgcaacctccacctcccaggttcaagtgattctcctgcctcagcctccccagtagctgggactacaggtatgcaccaacacgcctggctaatttttgtattttttggtagagatggggtttctccatgttggccaggctggtcttgaactcctgacctcaggtgatccgcctgccttggcctcccaaagtgctggattacaggcataagccaccacacctggcctctgacatatttcttaaaaagatatacacttgtcctcttagatgtgggcttcactttcattctcaattatagctacttatcttgttcccaatcttagcccctttccctaatccatcatcagtctttcattgtcaccacttttatcattaccttgcttgagatcccataacagttcccacacatctatatgaagtcaaatcagaattcctgtctggctttcaaggcactactgtatttgatcttattatctgatcctatccaggttcattttctactacttcagttcttccccaagatccatcgacattagcctttccaaaatccaacattctgcatacacttcctctaaggttttgtatacaacattggggggtggggggatgggagtgaagaaagttccagtagacaattctttaagaggttaaatgacagccctatacccaaacatgcaccccctactctagacagatgatcactctactgttctccctgcctttttattcaccttatcgccaattaaaaacacttctctactcccgtttgtctcagtaaatcttatccattttccatgtgccatctcctcagaagttttcctgagcttggcagggctagttctcttgacaattccacttgcagttgtggttcacagcacacaagtaaagctttgttgtttctcttgtgattagtccgtgaaggggctctgacttgatcacttttctacattgccaccaatacctaaatccaaccgccccaatgccaatacttagccagtgttaagcacgtagtgtttaaacacacctcaacacgcaagtattgtaagataatgaccacacaacagggcaaatacaaagttaaagcaggtccgggaccaatacaaagcatctttaccaataaaatgccgtgatgacgctgtcacccattccggattcacgaatcattcttcaaaagtccggctccaaaactatgtggagactgaaatcccctgaagaaaaaaaaaaaaaaccgccaaaatgacagctaagacagaggccagactaacccctggccctcccaaattccctctcgctccacaagtgggttcacaagagacacaaacgcacccaggaagacctccgctccctcagacgcggggcgggccctgcgacttcactctgggagggacatttccgctcacccagctctgcgaccctcgctcctgcggagtcagcttctgctcgcggagggggaagggcaaaaggacagtgcgtcccaacccgtccctctccagctgagcctgtcagagaccagcccagctctgaaatcaagccgttgagaaaagggaattcggccctccgccgcctcttcagtttaaaatcgtttcccgactcgctctgcggccccacgcaggaagcctccttggcgcctcgccgattccgtatcagtgaagcaactaaaattgccattttaactgagggcaaggccgagccacttaaccactatcgtcaacctttccaatcgtgctcggttgctcctcagttttcctaccggtgcgaagctttctctcaaatttccgcccgtagtaggcatggcggcggcacctcaccactgattcgttgaattccttcccggtaatcttgggcactagcgggcggagttgaagggcgcttggaccccagcggcgatctgtgtttgggttcgcgctctgggagaattttggctttgctcgccttcctctttcagaagactcgaaatcggccagcaggtctgcgagatttgaaacgcgactgttactccttgttttccggttctggccgcgggagcctctcgagaagcgtggaaagaggagaagggcgtataccttgtgaccgcctctggttgtcttgggctcgcgcctggcgccgctacgtggagtcgctctctcgtcgtcacttttggctgccgacttgttgagtagaagtgcagactgatgctttaagactcagggagaggtctttcccttatctccaccccagcaagcaccccagagaccttggagatttgtcttgtttctagacacgtgtactccaatgttgtgcggaggaggccttaaatattcgagaagagagtgggaactcctggaattttaagggatttctgtgtatttccaaaactgacttttaactaccggcagcgtgggatttcgtgattgtttttcgccatcgtgtggctccaacatgtacttcccttcttggttaagtcagctgtacaggggtttatccagacccatcagaaggaccacccaaccgatctggggttctctctacagaagtctgttgcagagttcacagaggagaattccaggtgaaaatagcgaagagatctatcctatgaacagtacttcagcctgttatctacggccggagagcttttattccatttttcattttttcccccattattattattattattattattattattatttgagacggagtctcgctctgctgcccaggctagagtgaagtggcgcgatctccgctcactgcaagctccgcctcccgggttcacgccattctcctgcctcagcctcccgagtagctgggactacaggcgcccgcgaccacgcccggctaatttttctgtatttttggtagagccggggtttcactgtgttagccaggatggtctcgatctcctgacctcgtgatccacccgcctccgcctcccatagtgctgggattacaggcgtgagccaccgcgcccggcttttcccctgttcttaactggatagccttatgtgtagaagcgaaattcactctcattatattcattatacggcagttttttttccctgagtttttagaaagaccacaaaaaggtaaccacgtaatatatagaatactctgcttttggttgatgccttaaaaaaatccttcttcggccgggcgcggtggctcacgtcgttaatcccagcactttgggaggtcgaggagggcggatcacgaggtcaggagatcgagaccatcctggctaacacggtgaaaccccgtctctactaaaaataaaaaaaaaattagccgggcgtggtggcgggcgcctgtagtccccgctgctggggaggccgaggcaggagaatggcgtgaacctcggaggcggagcttgcagtgagccgagatcgcgccactgcactccagcctgggcgacagagcgagactccatctcaaaaaaaaaaaaaaatcatttttcacagaattataatagtgttttctagtgtacaagtggctgttaaacactagattcatactaaagctaaatagttcctacaccgtccatttctgcagtttctaaaatcctatttcatttgaggaagaaatgtgcaatattaagaattgggtaattaggattttaggtcaatgcaaatgctagaagatcaaaaaaattttgatttcctaacacaagacagaaatttacattcagttattcacttggcttttgacacatttgcaggtaaatttaatagtgaatgaattaaattacatactctgacttattttattttataaatttcccctgtagccctgacatacctaagatatattttgagaattttcatttttaagcaacctgcaagtgatgtatttttaatcttgccttttaaagtttctttttttttttttttttaaagaattcagtagctttgttgtccggaccaacacatgtggagagttgcgttcgtctcacttaggccaagaagtcaccttgtgtggatggattcagtaccgaaggtaaattgagaaagacagtctaagaatgcatggtggtggttttcccagggcaattccaaacctttactaatttacaaccagtccgaagaataaaacgttttgcaactcctgcaggattaagaacttactgaattttcaactttgttttagttttgaaagacccaagtgtcattctcagtagacattttgaaagacccaaatgtcattctcagtaggtacatctcagtaacatctgttgaagggtataacaacgaagcttgatccaccagtggactgaaatgatactgggcttactaagactgaagagttcctataaccagtaattaaaaatgggccagcctcctataaaccagctgttaaactccaatagcatgggggaaaagctcatcttattccatgtaggtagagaagaagcctagaaacataaacagtgattccttaagatcagagcccattttttgttgttgttcatctctctattccagaacatgcctgaatagaacattaattcacatggaagagattcaaaatacataggttatatgaccttcttaaagaatatgtcccagcctggcgtgtaagcctgtaatcccagcactttgggaggccgaggcgggcggatcacgaggttaggagttcgagaccagcccagccaatatgatgaaaccccgtctctactaaaaatacaaaaaaagttcgccaggcggggtgatgctcgtctgtaattctagctactcaggaggctgaggaaggagaattgcttgaacccagaaggcagaggttgcagtgagctgagattgcgccactgcactccactctgggcaacagaacgagactccgtctcaggaaaaaaaaaaaagtttgtcccaagtaggtggatatttttcccataagtttagtgactgtttcctgaacccaaatctgaagagggtttctgtacctgttcctgatgctgaggatagtatgagaaatagaggttggatgttaaaatgttggcatttctgggaccttttgatgattcatagaggtattaaattagtagttggaactcttccagaaaatgttagattgtatctttttttagaaaaagactatattgctatatttcaaaaatgatccatcagatgtttctattatgctaaaatactatctttggattttactatatgcaaagtttccaaatttaataaaattttcttaaaaggacttaagccaatgaaatttcttttaattgttcatctataataatttttcattaataagccatctgtataagattaatataccaggtaagtagacaataaaaattgaaactgaaataaaaaacaatcttttttttggcaatgagctacatagataacaattgcatgaatgtaactaatgaaggtacataattatcataaaaaacatgaaaaattataattatcataaaaaagaaacatgaaaaattgcatggatttttgtttgctttttattttgtatgcttcaactttggacttagagattttatcttaaaatgtttcttttccccccccccattaatcaggcaaaacacattcttggtcctaagagatttcgatgggcttgttcaagttatcattccccaggatgaggtaatagaaaatttcctgttattatctaaaagcttctttgatgctattgctggggtaagctaagtagttagatgaatatgttagaggttttaaattcagaagtttattgttaatgaaaactgaaaaatataagcaatgttaagacatagcaaaaagaccagtgacccagtagaattaggaacccaggatacgaacaaaaaatttagaggaaaaaaatatataaatggcttgtagacataatgaaagtatgcccagcctcactcataggtagagaaatgtgaattgaaactgcatgtaattgtcatttttaacacattagattgacaacacactgtgtttgggaaagcaggtgctcaatacctggagggagtacaaattggcactagctgaagggagagcaatttggcaatatcaaaactataaatgcatatatcctttgagccattaatttcacttctggtaaattatcttatatctagacttatacagatataaaatgacatatgtacaaggatattcatttcaggattctttttaacggaaaaaaattgggaaccacccagatgtcctccaataagagactggcttaaaaaataatgtatattcttacaatacaatactctactcagccgtacaaaaaagaatgaagaagttctattctaatagggaaaaaaaaatccaaggaatactgttaagtgaagaaccctgtattcttgagtatacaaaagagcagctgttaaactccagcactctaagtgctgtcatctgtataaaaactgggggaaggatgcagaatatacattcagtgtgtgtgtgtgtgtgtgtgtgtgtatttgcttgtatatatgttaggaaatgtctctggaaggatacctaagtatctggtaacattaggtgctgctgggggaaggaactgagggcgttgaaaacaaggataggagggaagctttttactatatctttttgtaccccttgaatttgaagccatgtgacggtattactgctcaaaaaagtatttaatttaattaccattgaaattagataaaatatgacagagtgatattctgaaaaaaaaatttttttaattaaaaaattcaaggccaggcatggtggctcacacctgtaatcccagcactctgggaggccgaggccagcagattgagtacaggagtttgagaccagcctgggcaacagtgaaacctcgtctctactaaaatacaaaaaattggccaggtgcggtggctcactcctgtaatcccagcacttttgggaggctgaggcaggtggatctcgaggtcaggagtttaagaccagcctgaccaacatggtgaaaccccgtctctactaaaaatacaaaaatttagccgggtgtggtggcgggctcctgtaaccccaactactcaggaggctgaggcaaaagaatcacttgaacccagaggcagaggttgcagtgggccgagatcacgccactgtactccagcctaggcaacagagcaagactctatctcaaaaaaataataataatacaaaaaattagctgggtgtggtggcatgtgcctgtagtcccagctacttgggaggctgagttgggagaatcacctgagcccaggaggttcaggctgaagtgagccaaaattgcaccactgcactccagagtgcacaccagagtgataccctgtgtcaaaaaaaaaaattaaaattaaagaattagataaaataaagaacttccatcatacttactgggcaaagttggtttctattgcaatttttactaacgcttgtatgcctaagaaaaatattatttattcagctcttaagttttgaaataaataaagagcaatgaattatcttttagggatcaacatccagagatgagtatagctaaccctggagaactcctttgactctgacccattattgctatgggatttaactgcccctaagactaaccctggagacaattgcttttcaagtatgtgggacttgtttgcactaataatagtcattcttacccttattttcctttaaggaaagtttttttaaagctcttaactaatagttttacttgctgtattatatagagtcaaaatggggatgcagtttttactaaatttggtaataaagtcattaaggagcagccccagcctttatggtaattaagctgtgactattaacgttttttaaaccatctacttataattactgaagattcctgtaagttcatttgtttctcagaactcttttcccccttgttctgtagtcggcagcctctgtgaagaagattttatgtgaagcccctgtggaatctgtggtgcaagtgtctggtacagtcatttcccgtcctgcaggacaagagaatccagtaggtagtttcgaagatatctgtgtaatttttgcttgtatgcatttgcaccatctgtgtacacattctggcaacacatgactggacattaggc

SEQ ID NO: 97775 - DNA, 19739 bp, Homo sapiens
gaagccagttgctttgcggtagaggggggccagggctcaggggaggcctctgcttctcggagccaaagaaaactctacaggagatgctatgggcttgggacaggggaccagtttcccgcctgtgtgcactgagctggggatgcactatcccaaagtagccttcccgggcctgggaccatcaacagcttgtcacccagggcttcagccccgtggcttctaaacataatccctgcctttagtagtctgtagttcccgtggcctccccgcacctcaccaccagcccccactcaatatttcccagaagcttgatatttagaaagccgagtcccctccacacaacactggtgaaaccccagacaggtactcccttatgcatccctcagtaagcggtctgtttccagctcctctctgggagagtaagggtctaggtcttaaggattacacgtcattatgcttcatgtctcctggaaatttgaagcagatccaagtccaaccaaacacttaggtctactgttgaatcagaactagccctcccttttaaaaataagctctacctttaggccagccctggaagttaaactttctagactgaaaatgacaggaaagcaagccttggaagtgcttaaaaccaattgacccaggtgcatagtatcctagactatcagagccgaaaggggccttcaaaatcatcttatgaagaaagaaactggccaggcatggtggctcatacctgtaatcctgacattttgggaagccaaggcgggaggatcacctgaggtcaggagttcgagaccagcctggccaatatagtgaaaccccatctctactaaaaatacaaaacttagctggtggtgcatgcctgtaatcccagctactcaggaggctgaggcaggagacttgcatgaacccaggaggcggaggttgcagtgagccaagattgtaccattgcactccagcctgggcaacagagagagaccctgtctcagggaaaaaaaaaaaaaaaaaaaaaaggaaggaaactgaggcccagaaggtaaaatttcaccaagtttctagaaactggtgaaagagcagtgtcacctcttcctcctacctccactccatgttccaggtcaaactgtggactcagtaggttgtcctagggttaggcacaagaaggaaaggatttattttaggaccacccagaaattcattcacctcacagaacttcctgtgcctaggtcagtgggtctttatcagctttggatgggtcatttggcccagtgcctggaagaactgaaacaaaaaacagtctatgagactgaactagacttaactaagaactgacaaatctcgaaccaagcttggataaaaaaactacgtgggaagtgagacaggcacagcctcatcctggggggatttgggaggatgtggagggaaatgactggggggcacttgtggagctcaatctctgtgattagtgtgacattttcaaggaaaggacatgaggccaggattaggctcaggagtgagaaagcaacaagacctgggagaaggggaactgggttcagggaggtcggctactaaagtattaaacctggaggaagagctgaaaggaaaagtaaagtgcatctctttggagaaaagtgggcttttgctcaagactccccacaaacttgaagtcccatgtggattggcatgacccaaggcccaaatcacttttttttttttttttttgagatgagtctcactctatcacccagtctggagtgcagtgatgcgatctcagctcattgtaacctctgcctctcaggttcaagtgattctcctgcctcagcctcctgggtagctgggattacaggagtgtgccaccacacccgggtaatttttgtatttttagtagaaacaggatttcaccatgctggccaggctggtctccaactcctgacctcaagtgatccgcctgcctcggcctccaaaagtgctgggattacaggcgtgagccactgtgccaggccccaaatcatattattccccctttttccctcccaatattcagtcctctgacagagaggctagacataaaatgctccttattgctggtgcccacggctgtcctgaccctggtcatgaactcttgctcagtcagtgaagctgaatgaatgagttcattgccatgtagggccaattggcactagatccttggaaattacccaccttggagaggttgtaaaatagatcatatcctagtgccaccagcaacttagctttctggggggtcaggaactcttaccaattgctttggaaatttatggctgcctgccagtaccaccaccagcatgtcactgccaccatcaccactaccactgcactctaactttaggctccattgcaccctgcttgcccactcaagccagcaaggggaagcatcctccctggtgaactcagagccactgatatgtttgtgatttcacaaacattcatgacagctcctaggtctcgtctcctaattacataaaggcaaatgaaatgcaacctactgcaactatatttcaaagccaacatttttcactggatacacttaaattatacaatagatttttgaatttcagagggtaggagagggaatgggtaacaattgggcagtgacaagatggctggggtgacttttcaggttgccagaggcttcctaagggtgaagagagggagaagagcagagagagaaaacccatagcagcagctggggcaatctggaggggaagtgggttggcttcctgccagggccagagccagagcctagagaccagggacaaagctgcaaccttccaccgaaaacttctttgaaatcgggatctcctgtgaacatttccttcaaatctccctgtgtgctgatccccagggctctaaggggcaactacaaatttccatttctgtttgttccagcatttactttcaccaaccaccaccccccttttttttttctgaatcagtctcactctgttgcacaggctagagtgcagtggcgtgatcttggctcactgcagcctccgcctcctgggctcaagtgattttcgtgcctcagcctcctgagtagctgggattacaggcacacaccaccacactggctaattcttgtatttttagtagagacaggctttcgccatgttggccaggatggtctcgaactcttgaccttatgggatccacccaccacggcctcccaaagtgctgggattacaggcatgagccatcgtgcctggcctaatttttgtatttttagtagagatggggtttcaccatttggccgggctggtctcaaactcctgacctcaagtgctcttcccacctcagccacccaaagtgctaggattacaggcgtgaggcaccacaccccgcctgaccctgtcttttcacaaacatttctcttagccatcaaggtcacattctgggtcataggacatcagaggcaagatggttcagagttacattgatgatttgatggcattcattctcatggcttccacctattgccctgcacatgttggaagaatcagtggcccaccattgctaacaatcctagacactggtttccactaggatgtgttactctcatcttaaattcagtatcttcaaactacgatcacttttctttcctccaaacctgctctcttcccgacttccccatcctggctcaaatgctggaatcttccctcgtgtctcccttcatctggtccctcattactcaggcagtcaccaagcctcattactcaggcagtcacaaagttccctgcctatccatggtcactgtcaccaccagagcccaagtctgcatcactttgcaatgtagaatttggaagggactttagatgacacatagactcccagtggtgtcatgggatttgctgggtcatagtgacaggaggagctggggctacattgcctgtgttctgacaccgtattcagcgctctcacccacaataccttctttcgtgtatgtgtatatgcttctactcaaaaacttgcaatacaacctcataaccagtcatttgagcctctccctaatttgtccacaatctacctctcttaatttcggtcccattttttcctgacacaaaaaaaagagctaacattgattgagcatttaccatttgccagacactgttctagaatgctttacatgcactgacttacttaatcctcacaaagtgggatggagagtcctgttattcctgtgttacagctgaggagactgaggcagaccgctcttcctgagcctgaaatctctctccttgccttgtctctgttcttgactcctgccccccacccccgcccccaccccaatgctgttcagcttttgtcttttccagcctctcctctgactgtctccagcagccagctgtcttttccctcctcctagctggaacacacatcatccctctgtcctgccccttggcactttttctgtcctggcttgtgacggttctctgtttgggggcttgtgtcccattctccaacaacctcagttgctccttagtggacagcgtctgggtcttacctatgcctttgctacctgggcacctccgcagtgcctggcacacagcattctcctgtctcctttctgtctagtgcttctgtttctttctcccaagcatcccaccagctggagaccctggtcaagagctgcgggtcagatggtgacggggaccaagcttttagatcaaggtggcgcaggtggaactttcaggtcaggctgacggctctttgcctgtcactgagagctatcagacttgcctccaggccagggactgacttcctttggtgctctaaagataggtcccgatttacctcacccccaccctcatccagttatggcctgaccatcaccaaaacaagcccaggacccattttcatttatccctttaagaaaggttctttctcttcctgcccacgtgccctctaccgcttgacagaagcctgctccccattgccaggtgcttttcttcctcctcctcttcttcttttttttttttgagacagagtctcgctctgccgcccaggctggagtgcagtggtgtgatcttggctcactgcaacctcctcctcccgggttcaagcgattatcctgcctcagcctcctgagtagctgggattacaggcgtgtgccaacatgcctggctaatttttgtatttttagtagagatggggtttcaccatgttggtcaggctggtctcgaactcctgaccttgtgatctgcccacctcagcctcccaaagagctgggattacaggcgtgagccaccacacaaggccctttcttcctcttctgtcatctgtggatttcccatctgcctcagtggagtccttgaccttttcctccctggcccagcagcacattctcctctcctcctttctcccaagtcactgacctagtatttagtgtgtgttctcagcctcaccattgacttgctgtgttaccttggacaagtcactctcccactctgacctcaattttcacatctctaaaaggagactgctagactagacggtgagtgaagtcctgctgagccctccgagttcattctcccttgtccagtcagtccttccctcccaccctcccctctgggctccctctctggggccctctcccccaggggaggcctgctccagccccaggggagctgcggccctggctcctgttcccagtcggagtgaccagccctgggcctccttcccagcttcggccctggctccatgtggcccatctgagaggctggcctcaagcccggcggcaactccacatttctgtttttccttttttttccctctttcccggagttaacaagaagcagatgtggcgcacgatggttggagaggtggggggaggaagggggaggccggaccgccagccagacaggggggaagggaggggagccagcagggaggaggaggccagggcccgccccacagccactctcgcgcctccgaacagccacaggggcaaagccctgtcacccccaggatccggtcatcagggaaagaggacagggagaccagaagagggccagctgggacgagggggcggacgcccaggaggcaacttctgagacgcagctcctgagaggggcagggaccaggcgcgggaggccagagggggcacagagaacaaaccccctcagaagtgaagaggagagcggaaggaaccgagaggggacggacaggagctgaggaggaaagaggaggggagaggggtcaggccaggcagccaaggagaagacgtgtggccgggggctatcagaaggaaactgggacggacgggccgggctcgggctgtcctgtggagcagcagcatccccggggccggcagaggcgccagtggctgggcgggatgagtctctgagggccactgtggagygccccrccatggccccccgcaccctctggagctgctacctctgctgcctgctgacggcagctgcaggggccgccagctaccctcctcgaggtttcagcctctacacaggttccagtggggccctcagccccggggggccccaggcccagattgccccccggccagccagccgccacaggtaagagtctggatcccagcccgaggcttgggtggtgaggaaggggtcagaatgccacctcygcctggctctctgctgtgtccgctaatgcagggcagagggggagtgagaagcccatccatcaggtggctcctcacatgcccaccttcccacggggccttttccaggaccccctgaacacatatgttccttgggtcacctagggggtccgctcccacatgccccagggaagctgccctgaggggagcgggccaggccttcctgccagctgccctctgtatcctagccccagagcctcagggagaacttttgtccccttctagggctcccttgaccccatccagtaatccataattctgacaccactccagctctgttccctccagccctccagccagacacagatcagaggccggagtgaatggggccaggagtatagaactgcaatccccaagagrggcaggctcatcaatggcttattctctacttaaccccaagctggcctgcccgtcttctcctggaggggtggggtggaagccagtgttcagatcacccacagggcccgggctggctatgcgcacacagcatgccaatctggggactgagacaggcccagaaagggacacacatgattgtgtacattcagaggctccccgggaccccaccaccatgaggattgactgctctgtggttttccattctgcgcgtctccccatcttgaaaagtctttatctgctcctgctacacaggaaagcgtgggggatagggagggtggcgatgccaaagcccttgctctcactgatccccaagggttctgcatctttggagccttcttcagcccctctggtagcccctgggccctcctccagggcatgtatctttggtccttggacccagagggggttgtacctacaggaactggtgtgcctacgtggtgacccggacagtgagctgtgtccttgaggatggagtggagacatatgtcaagtaccagccttgtgcctggggccagccccagtgtccccaaagcatcatgtgagtcccagggccgggcaacgggcccttggtgggaactgggcgagggcagatggtgggtggctgactcagggagtctgtatgaagcagggagcaagggcaggacaggggctagggtcacagccattttgaggagatactgagacaacagtttggctggtgggagactgagggcaaacctgcctcacgcgccagccccagatgccttctctgggatggctcaggctcaagcagaggagttcaaggttccagcacagggcaagggaaggaagagcagggatttaacccttggccaaaaagctgacagctgtcagctaagcaaggccacatgttggacagtaagagggacccagcctgagggacaggccatgcccaccagcagctgcccacccctgaggacagggaccagggtcactgaccgtacagggaggaataaagaggcctccttctgcctctgccaggtaccgccgcttcctccgccctcgctaccgtgtggcctacaagacagtgaccgacatggagtggaggtgctgtcagggttatgggggcgatgactgtgctgagagtcccgctccagcgctggggcctgcgtcttccacaccacggcccctggcccrgcctgcccgccccaacctctctggctccagtgcaggcagccccctcagtggactggggggagaaggtgagtgtgggagctgctgcgagggtggcaagttccaaatggtgatccaatgcaatgggaaatgtggggccaggctgctgggggagtcccccgtgctctatgccagagagaagagaggggcagaagggttagtgagatcgcagagattccctgcccgtgtgtgtgtgtgtgtgtgtgtgtgtgtgtgtgtgtgtgtgkatttgtgtgtctgtgtgagagagagggagagagcacgcaaaagatggagagactgagaaaaagaaggccaaaaaagagaaggtgctcgcacacgccccatgtggccaagatccttcaaacagctgcaggagaaaggggcattcctttgagaagcttggtccgtggggacagacagttgagactacaaatcctagcatgcattgcacctgactacagatcccagacccctccgtggcctctggagaccgcaggtcccagcatgcagcagttcctgtggcttgccttccctcctgcgtgctgcacaccggatgtgctgtttccctgccccgagatagccttactataattatgcaaacaggaactcctggccaactctcaccgtccacagagcctcttctttgtccccgtggtgttgcagggaagtgtcacccagtggtagctactgttgtggcatccagagtgcctccctacactcccatttcgcccctcttgacagccccatgacagaagagtgtcattatcctttcgcagaagaggaaagagtttccaagaagttaagaggcactctgggcaggtggaaaggacatggacctgggggctggatagatggtctgggtttgaaacttagcactgccatttattaaacctgtgatccatggccaggcacctaatatctctggtccagtttcccagcctatatgatgggaagagttcatggtatctccccaggggagttattgaagaacagagccatggttcatatttggcctagaggcattcagtgaatggagtttctttttttttctcttgccaaaatcacccaaaggagaggcagagccagcctgggcatctgacccttgctggagctggggtgagcaggggccttgagctctggggtccagcccctctgccttctgccttcccctctcctcaggtcctggggagtcagagaaggtgcagcagctggaggaacaggtgcagagcctgaccaaggagctgcaaggcctgcggggcgtcctgcaaggactgagcgggcgcctggcagaggatgtgcagagggctgtggagacggccttcaacgggaggcagcagccagctgacgcggctgcccgccctggggtgcatgaaaccctcaatgagatccagcaccagctgcagctcctggacacccgcgtctccacccacgaccaggagctgggtcacctcaacaaccatcatggcggcrgcagcagcagtgggggcagcagggccccagccccagcctcagcccctccrggccccagtgaggagctgctgcggcagctggagcagcggttgcaggagtcctgctccgtgtgcctggccgggctagatggcttccgccggcagcagcaggaggacagggagcggctgcgagcgatggagaagctgctggcctcggtggaggarcggcaacggcacctcgcagggctggcggtgggccgcaggccccctcaggaatgctgctctccagagctgggccggcgactggcagagctggagcgcaggctggatgtcgtggccggctcagtgacagtgctgagtgggcggcgaggcacagagctgggaggagccgcggggcagggaggccaccccccaggctacaccagcttggcctcccgcctgtctcgcctggaggaccgcttcaactccaccctgggcccttcggaggagcaggaggagagctggcctggggctcctggggggctgagccactggctgcctgctgcccggggccgactagagcagttgggggggctgctggccaatgtgagcggggagctgggggggcggttggatctgttggaggagcaggtggcaggggccatgcaggcatgcgggcagctctgctctggggcccctggggagcaggactctcaagtcagcgagatcctcagtgccttggagcgcagggtgctggacagtgaggggcagctgcggctggtgggctccggcctgcacacggtggaagcagcgggggaggcccggcaggccacrctggagggattacragaggttgtgggccggctccaggatcgtgtggatgcccaggatgagacagctgcagagttcacactacggctgaatctcactgcggcccggctaggccaactggaggggctgctgcaggcccatggggatgagggctgtggggcctgtggcggagtccaagaggaactaggccgccttcgggatggtgtggagcgctgctcctgccccctgttgcctcctcggggtcctggggctggtccaggtgttgggggcccaagccgtgggcccctggacggcttcagcgtgtttgggggcagctcaggctcagccctgcaggccctgcaaggagagctctctgaggttattctcagcttcagctccctcaatgactcactgaatgagctccagaccactgtggagggccagggygctgatctggctgacctgggggcaaccaaggaccgtatcatttctgagattaacaggctgcagcaggaggccacagagcatgctacagagagtgaagagcgcttccgaggcctagaggagggacaagcacaggcyggccagtgccccagcttagaggggcgattgggccgtcttgagggtgtctgtgaacggttggacactgtggctgggggactgcagggcctgcgmgagggcctttccagacacgtggctgggctctgggctgggctccgggaaaccaacaccaccagccagatgcaggcagccctgctggagaagctggtcgggggacaggcgggcctgggcaggcggctgggtgcccttaacagctccctgcagctcctggaggaccgtctgcaccagctcagcctgaaggacctcactggtgaggggacaaaaggcatgaggggacccctttcaagccccttatttttcttctccctcccccagcccagcttccaactcatctgctttctccttgcttttcccaacatgaattgcagccccagccagtattccaggtgttatagtttgcctgcaagagatgatgcaaggtcctagctcccgccctccctctggctgctcactaggcctgtgggtggagagaggatgttgctctgccagccagggatccagcatatgcagcaagggaccccatggccccctcagcctgcaaagctccacctgttccatccatcttctccctgttcatgaagccaccacccaccttccttacccattggaaactccttttatggccctccttcaactcaattttgtcactgtagggcctgcaggagaggctgggcccccagggcctcctgggctgcagggacccccaggccctgctggacctccaggatcaccaggcaaggacgggcaagagggccccatcgggccaccaggtatgtgcactgagacccttgctgcagtcagggttgccactgccccctccaaccctgacccccgctggcagccccaggcttgacattccactctgaacttgacaaggggaattgggtactacctgaccgataagggaaaatcagaggaaagtgaggaggaactgtgatagtcactgtgtttggttaatgggtattaggaggctaatggataatgttggccccactgcagtactggagactaaagctgagtctattatagctgtctggggtgtgaaaggctgggatggcccagcagttgaacagaatggaccctacctattcctgtttttcttgataccccaattcctgctttgaagtccacgtagcaccsagcacaacaggagagcctcagcagatgtttgctgagtgacttagtgagagctgctttatttctcactgctccctttcctcttctcacaggtcctcaaggtgaacagggtgagtgcctttcatttgattctggagggagaagtgactaggggttggaggatagaggtcctcgggcagccctgggctggggatccagcaggggaagggggctggcactctgccctgagcatcccctttaacatccacccttcccactcaggagtggagggggcaccagcagcccctgtgccccaagtggcattttcagctgctctgagtttgccccggtctgaaccaggcacggtccccttcgacagagtcctgctcaatgatggaggctattatgatccaragacaggtagtcctgggaggggctgggttgaacggttggagaaatgggtgaggtgtgcagtgatatcttcccattcttgccttttccgacagtgtgaatcttcattctctgatttggggagaccccggctctttcttcatttattcattctcaggcagtggggagaagaagtagtcattcattcattcagcagatctttactggggcctgctcctgcccaggcactgttttaagtgctgggaatgcatagtgaacaaagcccccagttccctgccgctcacattccagtgaggtgaaaagacccagagggtccctcctcagtccaggagttctggtgcgctccccggagcttccctggcccccctgactgctatccttgtccccaggcgtgttcacagcgccactggctggacgctacttgctgagcgcggtgctgactgggcaccggcacgagaaagtggaggccgtgctgtcccgctccaaccagggcgtggcccgcgtagactccggtggctacgagcctgagggcctggagaataagccggtggccgagagccagcccagcccgggcaccctgggcgtcttcagcctcatcctgccgctgcaggccggggacacggtctgcgtcgacctggtcatggggcagctggcgcactcggaggagccgctcaccatcttcagcggggccctgctctatggggacccagagcttgaacacgcgtagactggggtcccgcccgacgtgtctacgtcggctgaagagacagcgggggcggcgggctcctggggtctcgcctgagacggggcacctagccctgggcgagcgccgcacccgggcccgcagcggcaccgcgcccagagcggcctctccccacgcccggggcgcgccggctcagggaggctcggggccgcccatgcagacttttggcctggcgcgatcccccaagaacccctccagggccggcctgcggaggagccgatcctcgcaccctccgctccctccactggccctccaggtcgattccctgggctccaggctcccccgcgcgsgcgccgcccaccgccatactaaacgatcgaggaataaagacacttggtttttctaaaaaaaactaaacgaaccgttctgctacggtacggggtcgggggctgccgggcgtgcacagggcacggggcgggagagacgacggcctccggagaggaccccgggttccgcactgcgttcgccgcctccgcccggctcgggacggctcggggttggctcaggcagcaagcggcgcccgcccggctcctgcgacgtctcccccgtgtcacgcccgtttcgccggcgtccgccagggggcgctctgcgttcccgccacgtgaggctgcggcccacccggcgggtcctgctcctccgcggcggaggcgtggcctcggctgggactaaccggggcggggcggggcggggcggggcggggccgccgcgaccgcgggcttcaggcagggctgcagatgcgcggcccagctgtacctcgcgtgtcccgggtcgggagtcggagacgcaggtgcaggagagtgcggggcaagtagcgcattttctctttgcattctcgagatcgcttagccgcgctttaaaaaggtttgcatcagctgtgagtccatctgacaagcgaggaaactaaggctgagaagtgggaggcgttgccatctgcaggcccaggcaacctgctacgggaagaccggggaccaagacctctgggttggctttcctagacccgctcgggtcttcgggtgtcgcgaggaagggccctgctcctttcgttccctgcacccctggccgctgcaggtggctccctggaggaggagctcccacgcggaggaggagccagggcagctgggagcggggacaccatcctcctggataagaggcagaggccgggaggaaccccgtcagccgggcgggcaggaagctctgggagtagcctcatggaagagaagcagatcctgtgcgtggggctagtggtgctggacgtcatcagcctggtggacaagtaccctaaggaggactcggagataaggtaggggcgcccaggtcccctaggggaccccaggggctgctgcagtccagcatttgtgccagcgaccgaggctgcagagaccccgcagtgaggccctgagaacccggcttcaaggccggacccgcgccctctacccgggaatcctgggggggctcccagcatgacagaagagaagaaggaattgaggcctttaataagaagacccaggatttaatagcatcgtgttagccaatttccatttcaactcaggcatcaggtgtcaggtgtcaggcatcaggatccccattttactgataagtatagattcagagaccaaggggcttatccaggggcacacagctacctgcttctgctgtttctttttaaaccccaagcctatgcacttgcctctcatcaacatttacttctaacttatttatccacatatctcgcacctatttctgagaaagatttgaggtagcttacagtaaaaagtatgtacagttaaactgttggagaacatttaagaccatggtatttgagcttcaactatagctcagggcttgctggcactggaggcaaacatgagatgccatgggttatgtatggatagagctggttcatgagccctggcaagctttttcctggtgctaaattccaagaggagtttaccagaagtccttttcacagaggtcaatgaacaccgtttagtagtgggaaatatctttctcagttgtctgctagaaactgaagagtcagttgttggttctttttttttttttttttttttttttttgagacagggtctcattctgtcgtccaggctggagtgcagtggtgcaaccatgctcactgcagccttgacctccagactcaagtgatcctcccacctcagcctcctgagtagctgggaccacacatgcacgtcaccatcccagctgtattttaaattttgtataagggacgggttctcactatactgatcagagtggtcttgagctcctgggctcaagcagtcctcctgctttggcctctcaaagtactgggattacaggcatgagccactgcacccagccgatttgttggttctttttctttttgagacagagtctcgctctgttgcccaggctggaatgcagtggcatgatcttggctcactgcaacctccgcctcctggattcaagcgattctcctgcctcaacctcctgggtagctgggattataggcatacgccaccatgccccactaattttttttttcttttgtagagacagggcttttctttgtaaagacatgttggccatgctggtctcaaacttctaatctcaagtgatctgcccgtctcagtcccccaaagtgctgggattacaggcatgagccaccacacccggcttattggttcttgtatttcctcttgataagggccccaccattacactgtaatgctgtgaaggcatttctgtggggcgggacactagctttctcttggtgcagtcagtgagtgcttagaacactgagaattgctcctgggctatatcagttgtcgcagctaagaactggataagaggcagttcaagactgaactccacaaagacacgacagtgctgatggctgccaggctaactgaggtgagagaccccgacactcctcaggctttggggccacaaagcaccatcacatatattattttatactctcctcccagcagcccatgggaactgtgtaaagatcagtgaaatcctttatacagataaggaagctgaagatttggagatgttttttaaggccacggagttaaatggtggcacagtggcagctgcagctcgagtctcctagtgtggagtccagggtccctgccctctgtcatctcctgtataccctgtccctttgctgttgaccatctcttggagttgaccctttgctttggtttgccagaggttagggccccttgccaggggtgcagggacagtggggaaggggcacgggcatgccactgtgtagacctaacccactgtgcaaggtcgaggcagccacaggacatggcactcagtgaggagttgggttcatctcaggggaacagtgcaaattccagggccacaggttctccaaggaccgtggagagcctgggaaaagactcagcgcctctttctgtcagagctgaagtcccatttcctctcagcttaattctgtcgggaaggtaggagaaggaggtcctgctagcacccacactgatggggcaggttctgaaggtgggcactgagcgaggcacttctctaaagggccccttcccatgtccatcatgcttcctgcactccaggccatgccttccccgcagccccatggccctggttccctgcagcctggctcctgaactgttgtgcctcccagaggagcacatccgagtggggacccagtccttcctgggtgtctcagccccacctgtcctagggtctctgtgcttgacaggcagttggggactcttgggagccgccacctggagctcagccagacccctgggacgtgtccttttttttattttttgagttggagttttgctcttgttgcccaggctggagtgcaatggtgcgatcttggctcactgcaacctccgcctccagagttcaagcaattctcctgcctcagcatcccgagtagctgggattacaggcatgtgccaccacacccaactaattttgtactttcagtagagatggggtttctccatgttggtcaggatggtctcgaactcccgacgtcaggcgatccgcctgcctcagcctcccaaagtgctgggattacaggcgtgagccaccgcgcccagcctttagctgagcatttctgcacaggaaatatcagtgtgactttgaagggtttccccagagtaaaattctatatcctttcttagaaacctcaatgcttgggcctaacaacttttagttttaaaatacggagtaattagcaatggctttggggtcaggaaattgggttcccacatcagctttgtccttaactattgatcaagtcagatccctcgagattcctccttttttttcatatcttttcgtaaaaatttctgtaaagctgtaaagctcagcttgaaaatcttttttttcttttttctttctttttttttttttttttttggagacaaagtcttactctgtcacccaggctggagtgcagtggcatgatcttggctcactgcaacctctgcctcccgggttcaaaagattctcctgcctcagcctcccgagtagcagggattacaggcacctgccaccacacccggctcatttttgtatttttagtagagacagggtttcaacatcttggccaggctggtcttgaactcctgacctcgtgatccacccgcctcagcctcccaaagtgctgagattatgggcgtgagccactgcgcccggccagcttgaaaatctttgaccagctgggtgcagtggctcatacctataatcccagcactttgggaggccaaggcaggaggatcgcttgagccgaggagttcgggaccagcctgggcaacataagaagatgccatctctacgaaaaaattttttaaattagcggggcatggtgatgcacacctataatcccagctacttgggagactaaggtgggaggatcagttgagctggggaagttgaggctgcagtgaaccatgatcatgccattgcactccagcctgggtgacagagtgactctgtctcaaaaaaacaaaaaaattactatcctttgtcattgttgttattgttgtttttgagacaggatctcactctgccacccaggctggagtgcagtatcatggctcaccccagcctaaacctcccgggctcatacgctcccccaacttcagcctcctgagtagctgggaccacgggtatgcaccaccatacccagctaatttttaattttttttttttttttagagacaagagctccctttggttgcccaggctggtctcgaacttctgggctcaagtgatcctcctgctttggcctcccaaagtgctgggattataggcataagccactgtgcctgtcctactatcattttttttctaatgacatcgtgctccccttttcccaaaactgaagtttcgcgtacaaatatgctttggcctaaaaattctggttcggttttttctcttaattcgtggttctttggtactgttccttttattgtaaactgccacaattattattattattggaactggcacaatagaaataacaccaccattcttacctcaaaggtaataacattcattaatgatttctcatttgggctccagtaacactgtgaggggatcagtgcgttgaccctctatgtggaagttatcatttttgctgctgatgacaatgaagcccttcacgtgtgtcttgttagtttccttttggttggtttttagtaaagatggagaagtgctccctgctgccacttcttaaacgaccaacgtccaggtttgctgtcctgtcttactcgtttgattttatagctctgcagtttctattgaagtagacactcctaacacaggggtaggtgtaaatgtgatacctttgggaagaggcacttagtccccgaggtccttggagttgctccagctctcaaggaggaggccaaaggtgcagcgtctggagcagctctgactggggtgaaaggtgaggagaagatgacctggagttagtgggtctctcgaatagtgatggacccaagtgagtggtttcctgttgccctaggaacagatggaaatattgaaaggaactgctgtcagcttgaatttagcctgggctggggaggtagacaccgctctcagccaagctccttcccttggccggcctcggctgccccgggtacaaagtgagacgtcggcctagatgctttctgagaggagtccccagctgttacattctgtaggcccctatacaggagactgtgcttgggatcagcctgctggggctgcagggaccctccctgtgctttgcaggtgtttgtcccagagatggcagcgcggaggcaacgcgtccaactcctgcaccgttctctccctgctcgga

SEQ ID NO: 97776 - DNA, 17335 bp, Homo sapiens
gttgacctcattcccatcccatcctctaccttcatataccatccccactgctaaatcctatcataaatcttaccaccccagaatttcacctattctcctcatctatattctcagcttatgtcttcttttccttctcttcccatgtcccctccttacttcatcccttcccctccccacaccagggcttactgcacttaccagagctgtatagacggtacagacaatgcccagggccagcacggacagccacagatcaaagccagtcactgtaagcatagaagccacattcttatccctggaaaagggttccccaggggagaagccctggtagggcaatcacgtcatgccacagagataaagcattggtcattaacaatgaaataaatcattcaccacaacggagaaaaatgtttgcagagctccaccaaaagatattgactaaccagttcagatagggcatggtaacatgttactagctgtcaattgaggtggaccaagccttcctctggtagagacccacccaagggcccaagcggtgaattaattccccattcaaggtcaggttcttttccacatacgctcctccatctgcctctcccaaaggtgctttcctaacctaccacggctgaaagccaggggctgtgtgactcctcacctgcattgagagccaatgacggagcatagagcacaactcccatgtagatcacctgttgcatgtggaaaaaatgtgatgggggccggagaatggtgggaagagagaggaagaaagatgggcctcagcgccaatatgcccatggcttcccctcacctaggctcacttccctcttccttctcctctcaaattctggcttgctgccaccacagtatctgtgctggaattggaaggcatgggcagcaggatgcctctggggtcctcacagatgctaacctctagcaggaatttcaatcctgccaatctgagagcaggggagactccaattccctcagcatgcttgcgttcaggtcccccaacatgccctaggctcggtttctatcctcattctgcttaccatctgaaagatgaaggtcacagttccacacactcgcacagttttattgaatcgaagctccaggtactgggtatacagaaaaaaagatttttctcctgacttcaccccgacaactcacagacaaattccctcaagatgctcaggaacatgagggaatatccaacccatacccactctgagtcctactcggcatagcaccctcctctccaatcctgcccctatacctaacatcactgagaaagaattataaacacacaatgagttttctgtccctctcattaggtggaggaggtctagggtcccaggtccttcctatgtgcctgtccctcctctccaccccaacccgtgtcccacgcacttctcccttctgtccctgctcacctcataggcactggtgagatgcaggcggtagaaaacggggatgaagatgtgtgcaggtatcagcagccccagaaagtagcagcagcccaggaaccaatattgggtcccaaatcggtagatctctgacggcacacccaggatggccacggctgactggaaggtggccagcagggacagtgccaccggaaggcagcccattttgcggtccgccatcagcagctcaccaacagtatgccggccccagccacgacaagcatggtagagcccaatggcaagagagagaaccagcagcaggacgaacaccacatagtccatgatggagaaggtagacatgcccacgcttgtgcccgaggttggggaaagaggggctgaggtgctcacccctacactcatatcctcactgtgtctgtgatctgcagccagttgctgctccagggctctggggtagggcaggggcggatgtgtggctacaatctggcttccagccacagtctcacagtcttcctccacggagtgatactgtccagggtgagctgcaaaggaattagctcttagtgaggcctatctggccttggtagccattcacccttgggccttgtacatcgcatgccatcagaagtggaccagccagcatagtggtagcccttcaaggtctggaggccctggtatgggtttggtaggggacataagtgagggagaagcatcagagtgcgacagccaggagacaatataacttggccaggacctttgagtatgcacagctgtgaaattcaacaaccttcttaggtctccacccgagtaccaaaagaaaaataaactctagcctaagtttcttagcagaatttcccagccccacttgaaggcacagacccagtcactacaatacactaagccagcagagcccagcctggcgccacagcccagcaggaaacacagcatggagactaatggcagcagggcttcccctactgcccctggcctcggccctcgcctcctgtgatccccagtgtcacccttctaactgatcatcagtgagactgcctctgtggcagccacagactccatttcaggcgtccccaggccaacccctttcttaaggttctccccaacaccactagataagtgctgccacccacctctcagcccctctacctgcaacatcacagtcaacagcagacgcaggaagagcggctggattcaaaagtgagaggggaaaggtgagagggcaccatgctggagtcagggtttcagaatgacgattctccattctggagagaagcaacccagccacggagctgagaggcaaagggaccagccaaagagagtggtcgtatcctgctggggacagacacctacctggagaagcaatccctgttctgaggcagagttgcctggagctgcagagctgaggatctggctctatgagtagctgaggtgagagatcaggaattgggggtggggtgaagctcagcagtcatttgttctggccccttcagggaaccaatggctgtgttccaaatggccctatcaccctatggcccccaaactccaactcagccctagaggctccagaacagggaagagggagctcatattcaacagcattcctagatggattagcctttcagcctaaagtactcttggcactctgtgcgggagggagttggaaagaaggaactgaaaacatgggaaagttgaaagttgattttctaactcctgcacaagaaatgttaatcccccaagaatacaccacaatcctcagagaaagagggaagggatcataatatttaaaatcttaaatctttggacaccactattacaaccaaccccccaccactgacgatttcacagataaacacgctaaggctcagatggttcaagtgacctttccaaaagcacagagccgactattgtcagagcataaattagaacccaggtctagggattcaccatccaccctgtctgttctccaagcgtatcatattgtcttcaaaggcaatcctctggggtacttattggtatgaggaaaaaacaccagagaatgccatgtagttacacagcctaacatgacgacagttaacatttgctgaacacctgctatgtaacccagcagtgtgtgaggtgctttataaacattagtaataatacataatgaagctaacattttcaaaacagcatgtctcagattaagacacgaatactctccagttaacacaagaaaactgagagattaaataacttgctcaaggttatgcagcatgatacaaaacaagagagagagaaacagtgctgtctgcagctatgacaggtgttcagcaagggccctgtcctcactattcccagaaccaggacaggagcagagtgttgcagtcagtcattcacaggacatagtttagatttcaactaatcaagagacagactgacataaactatgtcttctgcttttgcccactaggagaaagattaggctgtctttccgctctcccacagtgtgttcttgggcagacactggctggctggcaagatatggcctcatgcagactaaacctgaactctgaacctcttggggccaataaagagggaaaatcagacctggcaactcttggatcacatgttctacaagattcccaacaggcttaaactctggtttaacctaaacatgccctgggcctttgcacattgcaacaccctgagttttctcattcgtctttggcaagtttttactgctatgatagagatgatgggaactactggggagtaagaggaaagaagaggtctcctgtgtgcaaagaacacagaacaaagaactaactatagggttagtggtttagagaggtaggtggccagagacaggaaggaaagtcccagtatgggacacggaggtacagaaataaagacactctgctgatgggacttcctgataaaattctatttgcgtgatgtatggagaattcccctggatggcctgagagagccccagggaagacaggaaaaacctgacctagcaacagaccagattctgagaacagatctgtagttttctaaacaccctacattgatccaaacgctatggtctcgcatctctccagaaagagggcggccaaaagcaagagctagctgttgtttcactacaactataacatgccaaggcacaaacagcagattgtgggacccccccccctttttttttggagacggagtctcgctctgtcgcccaggctggagtgcagtgacacgatctcggctcactgcaacctccacctcctgggttcaagtgattcttctgcctcagcctcctgagtagctgggactacaggcatgtgctaccgcgcccagctaattttttttttttttttttgtatttttagtagagacgagatttcaccatattggccaggctggtctcaaaactcctgacatgacgatccacctgccttggcggatcggtggcctggccaccgcgccaggccaagttcaggtttttaaaaggggtcccacatcactgcctgtaatcccagcactttgggaggccgaggcgggcagatcacgaggtcaggagatcgagaccatcctggctaacacggtgaaaccccgtctctactaaaaaatacaaaaaattagccaggcgtggtggcaggcgcctgtagtcccagctactcgggaggttgaggcaggagaatggcgtgaacccgcgaggcggagcttgcagtgagccgagatcgcgccactgcactccagcctgggcgacagagcgagactccgtctcaaaataaaaataaaaataaaaataaaaacctgaactcactttggtcacacactgcagtggatcgcattgactcctacaaaaggcaatgagaccactgcaggactaactgttccaaaaagattccctcaaaatctgtcctggggcctataattcctcaaggtgtgaaaggctttgggggccctccttaaaatgctaatagctactaacaccttagaaaatttgccagccagctaaacgtaaacctttcaggaacttccaggcagacaccatgggggtaatgtggaagggaagcctggctcggctactcgagatgatcacttgggtcggctttaaggagctttctggctggccctaaccaacactgtcgcgccgggagcagggatcccctggcgcccttcagtcagggcgctggcccaccctggggcagcaacgcactcccttacctccgtggttcagtcagagctaggaaggtccctttgtgcttcctgagatcaacatcgctcccttttcctgggaaggcaaagaaaatgagttagggaagcgtctatcccgctcctacctcctcgccaggctccgggacgctatgcgctatcagcattgaggtgaagaggactaggtgcccggggcgatccaggctcgtgtcctcccgctggagtttgaggtttgcccttccctcatcaccctcaccctcgttctttctcggtttcccgcttccctctacgcggcggagaccaccaccttaccgctcgcacttaagatctcagacccacgccggaggccggctcgctccgcccctccccgcccccttgtccccgccccggctcagacgccgctccccggtgcctctcggcaccggctcacgctctccaggcccacctgcccggtctccacacgtgggtagccagagcccggccgagagccctggccgggagcccgcgggggccccgccccctgcccgccccctgcccgccccgcycgccgtgccgccatgtttactgagggcggatggaggggcccgagtttctgcgaagccgcgacctcggcgtccggacgcggggaacaccgggctgagggagtctgcagtcggctccgggaagccgcgcggcgacgggggaggccttcactaaaggggaaaaggaagagggggtcggccagtatccccgaaagagggctagggcgcatgaagaccagcgcagagctccacgagcaggaaaagcccccaagcagccccagggcgactggaccgggccgcttaggccacgcccggggaagagggcctgacgcgctgcggggcggggccgcggggccgggtcgcgcgagcagcggagcaccaagggaacggaaaatggcgcctcacgrcccgggtagtcttacgaccctggtgccctgggctgccgccctgctcctcgctctgggcgtggaaagggctctggcgctacccgaggtacagaagcaagtttgaggtcgggctgaagcagggtcrctggccagccgtgcgtcgcgctcgccagcggctcccccttctcctcggcgggcctgcggttctgatttcgtccctgacgcttcccgaccctgcccagccaggtcctgttcccaagtactcacgtcgtgcaggccttcggcgccccagtcctgccgactttcaaagacctgtgaaacttgatttcgccccttaattttagaataactttaagttctttctacagacgggtcctctgcctcttgtgtaatctctctacgcacgaacgccatatatcgtgcggtggtagggctgtacttttgtaatgcttgatgagttctttacgtacctgcggtcgttttacaccgcgccaaactagggctgtcagattgagaagtctctgcagaaagcataataaataagttcgaatagtgatcttcagagatgaggaccttccctgtgcgatatctggtactgaaagtgtcgggagctgattcggcgcaggactctggaggaagagatggcatctcctagcctagcctgttacaagggtgggacacgagccgtttatccatttatcggccccgtgttagaggaattctggaaacgtgtactggcagttaattcttgatcgccgtttgttcttttcttggcttttctttctggagttctaatgtttctttctcttctgcagatatgcacccaatgtccagggagcgtgcaaaatttgtcaaaagtggccttttattgtaaaacgacacgagagctaatgctgcatgcccgttgctgcctgaatcagaagggcaccatcttggggtgaggggaagacatccctagatgctggatacaggccattccttagcctggctgcttttatacccttatattatttaaagaatccacctattatggtttcagctgtaatcatcacgcagatgtctaccaaaactagatctctttagtgtcttttttaacctttccacactccaggtacatacgggtacctctagcttcctattaagcatttcctactgagtgcaccctaacttcaaactcaaaatgttatgttttgcttccattctcttctttccttcatctacctaaatacttctctgtattaagcttttagaaaaccaacattttccattatcactctcttgctttaatactatatttagtattaaattttgtctcaggacaaaattcaaaccattaagtaccatactagtcccaacccacttttccaacattatttccaattacttgtccgctcaaacctccataatggtctgcaccagccagatttgcctgccctcaaaggcattccacctttgttcaggcctctctccatacctgaaattgccttcctctaccaaattaggaaatatccatccttcaattccaacatcttttgtgaatatttactactactaagttccagagtaataccttttttaaattattatttatttatttttttgagacggagtttcactcttgttgcccaggctggaatgcaatggcatgatctcggctcaccgcgccctccacctcctgggttcaagcgattcagtaataccttttttaaaaacttcctgtaatctttagtgtccactcaaatatatttatacactgtcctgtggtttcttttatattgtaatttaatgtttacagtgcttttatttttgggcagtgctcttgttcctctaactacattgtaagccactcaaaggccaaaatactgtgttacatatttttaacattctcccagtgtttgcagtttgtagggactcagtaaatatttgtagaataaaggaatggatagcagtagatattgaagaaaaaaataacgtggcatgatccttaatgtccagcagtttacaaccaatctgtggtagaaaatacatgtggaaaaaaactttgatttatgtgacttgcttttttttttaatttaaaggccctctgtggatctgaaaatcataatatgagattcactaatgtagacaagaaacacagatttctcccaatagatgcataaccgattagaacagtgctggcggatagaactttctgtgattatgaaaatgttccgagccaggcgcggtggctcatgcctgtaatcccagcactttgggaggcccagatgggyggatcacgaggtcaggagttcaagaccagcctgaccaacatggtgaaaccccgtctctactaaaaatacaaaaattagccaggcgtggtggcatgtgcctataatctcagctactcaggaggctgaggcaggagaattgcttgaacccgggagatggaggttgcagtgagccgagatcgtgccactgcactccagcttgggcaacagagtaagactgtctcaaaaaaggaaaatgttccgtatctgtactaaccagtacagtagctactaacgtggttattccatttgcacttgaaatacggctagtgcaaatgagacactgaattttaggttaaattaattttcttctatagagtcagggtctcattcatattgcccaggctggtcttgaattcctaggttcaagtgatcctcccccgcttggcctcctaaagtgctgggattacaggagtgagtcactacacccagcctaaggtacattaatttaaatttaagtagttacatgtggcaagtggcgattctattggataatgcagaattaaaatgtctaccacagctcctagtgtgtgactctgaacacagctgtgttcaattattagctgaaaagggggttgtgtagtcaaatacaaactgtgccgtggctgaagaaaaagaggaacacacagttatattgattactttatttcctcaggctggatctccagaactgttctctggaggaccctggtccaaactttcatcaggcacataccactgtcatcatgtaagtagttaggtacctcccacccaaaaggctaatataatgtaggttgatgcgaaagtgctaacattgtgtactttgcagagacctgcaagcaaaccccctcaaaggtgacttggccaacaccttccgtggctttactcagctccagactctgtgagtaagggtatgggaagagaatcaaagagggatgatgctgtgagtttagcaactttgcatgttatgaccacatttctctataggatactgccacaacatgtcaactgtcctggaggaattaatgcctggaatactatcacctcttatatagacaaccaaatctgtcaagggcaaaagaacctttgcaataacactggggacccaggtatgctgtcttacctccaaacttctgggaattgtcttttctcccttgtattttccactttagatcagaaagacaaagttgcttaagcrcctttcattcagagttctggggctataacccctttgaaagaaaagatcttaagatatactctattatttgtctcacgtgtgtccgtgtaaagagaccaccaaacagrctttgtgtgagcaacaaggctgtttatttcacctgggtgcaggtgggctgagtccaaaaagagagtcagcaaagggtggtgggattatcattagttcttacaggttttggggtaggcagtggagttaggagtgctgttttgcgggcaggggatggatcttacaaagtacattctcaagggtggggagaattacaaagaaccttcttaagcgtgggagagattacaaggaaacttcttaagggtaagggagattacaaagtatattgatcagttagggtggggcagaaacaaatcacaatggtggaatgtcatcagttaaggctattttcatttcttttgtggatcttcagttgcttcagaccatctggatgtatacgtgcaggtcacaggggatatgatagcttagcttgggctcagaggcctgacattattgttactgtttttatctgtaattttctttcttcttcctttatcctagcaatgattgagagaatctaagttgaaacagataattgagaaatatgcctaatgaaatggataaagtgatgttctctatttctctctggcctccagaaatgtgtcctgagaatggatcttgtgtacctgatggtccaggtcttttgcagtgtgtttgtgctgatggtttccatggatacaagtgtatgcgccaggtgaggaattaggccgtctaactagggatrcaaggaatgcatagagcaagtcttctcagaaaggagagccacaagaccaggagctgatacaaatttcctataggtggaaaactatagaattgccctagacaaagtgataggtatattaggaaagaactaggtgttaggatgtggccctccgtgtaacgttgtatgggggtgttttttggtctgttgttcacagggctcgttctcactgcttatgttcttcgggattctgggakccaccactctatccgtctccattctgctttgggcgacccagcgccgaaaagccaagacttcatgaactacataggtcttaccattgacctaagatcaatytgaactatcttagcccagtyagggagctctgcytcctagaaaggcatctttcgccagtggattcgcctcaaggttgaggccgccattggaagatgaaaaattgcactcccttggtgtagacaaataccagttcccattggtgttgttgcctataataaacactttttctttttttttcctctctttctttttaaggaaaggcgccctgcctttacgtgtttcttgcttggggtgggagggactgctttagggcagccggttttttcaggtttcccccggttttgcagtgcggagaccacgggggcccactccccgtggctccgcggaccccgccccttacgtgcccggccccgcccctcacgccgcctgtgtccgcgccgccgcagtctctgctgctgccgccaagcgcgcccgaggctcctacgctgccgcgcccggcttctctccagcgccccgcgccgttagccacgtggaccgactccggcgcgccgtcctcacgtggttccagtggagtttgcagtccttcccgcttctccgtactcgcccccgcctctgagctcccttcccatggcggccctagtgttggaggacgggtcggtcctgcggggccagccctttggggccgccgtgtcgactgccggggaagtgggtaagcaagcccggttaggctgcagaccttatcccactctgtgatgcgcctctcctcccaaccttccccgtccagaccccgccattttcccgccagcgtacccccttcccccattcggtgcccatgggccccagcgccataaacccctcgcgaccaaggcagcctccactggggcgtgctcatcgcgcggggagtgttccgaagggtgccctaccggagcccagccctgcttctttcttgcagtgtttcaaaccggcatggtcggctaccccgaggccctcactgatccctcctacaaggcacagatcttagtgctcacctatcctctgatcggcaactatggcatccccccagatgaaatggatgagttcggtctctgcaaggtagccacacccagtgctttctctacattccttttcaagtcagtaattgttaactattagtgaagtaggagacgttgacaccctgctgggcatcctgcagaaaacatacccactgaagtagtaaagtcaaggactaagatcactagtaactgtagttaggggttgttaagtgccttgggaggcacagagtgttggaggcctcaggaaaaagctaccgcctttgttaagggcatcaaggctccaggtatagctgaaagcattctgtatgtagtgaaggcatggatcaaggaaaagtaaaagaggtgtaagggaacagccttgtccaacttgttaggcatgcagaagtcaggagaaaaaagcctgcagataagttaaatccggtgggcatggagggacctgaagccaaagcagagtcaggttagtttggtaaaggatccattgaaggtttttttttagcagcagagtcagatgggagcagtgctttttaggactacataaattagtggaaagaggctggaaactagggtcacatacttctctgtgacagtgagtgccagtttacctacaaaaccagtgacattatcttctagacctactgacatggcctcgtctgattctctgcttttcagttgtgttcttacctctaggtgagaaaactgagtttcttcctacagtgaggtttcccctattccttcacctctgaaatttggaaactaagttgccctctgacagttcaagcattaaaaaaaacccaacatatagtaattaaggtaatagaggaagtcaatctggcctagagtagtatctctcaaaatttgtttggcctcactgcaggtgtaagcctttaattcttaatttgccttcccagccaccctgacgctggggagagtgagctccggataaaggacgtacatgttgttcttcctggaaaagaatttctaggttcatcacaaacctacaaatacactgcattctagttgatagtgaattcttgtgaatttggttaacctttgtcagtcatcacctttgtcaactctagacacactgactaaattgagtttataaaactacaaaattgaggcctgattaggatcagggtgggaaaggcctcttggagccactcgcacatataaatggattactccacctggccagggagggttctgccaaactatccttcagatccctggacagtctcagaatgcaggttccttaaactgttcatcacccagctgaatgcagtttaaatatgctgatccctcccacataaactttctgtttctatgtagctattaaacgcttatctattgagtaacaagtttatggtttttgttttttttttggggacaaggtctcactttgtcacccaggctggagtgcagtggcataatcatggctcacttgcagcctctgccacctgagctcaagtagtcctcccacctcaaccccccaagtagctgggactacaggcacctgccgccatgcctggctactttttttgtattttttgtagagaccgggtattgtcacattgcccaggcttgtatgttatctttttttatttaatttttttttatttttattttgctttgaggtagagtttctttcttgttgctcaggttggagtgcaatgggcaaccttggctcactgcaacctccgcctcccgggttcaagctattctcccacctcagcctcccgagtagctgggattacaggcatgggctaccattcccagctaattttgtatttttagtagagacagggtttctccatgttggtcaggctggttttgaactcccgatcacaggtgatctgcccacctcggcctcccaaagcgctgggattacaggcgtgagccaccgcgcctggccttttcttttttaaataatcccaaatgaagtttgggaggcatgcttagtattgtgccctgaacctttgttttttatttggtaatggggtattttgtacctccctatcttactcagtttttaatcacactctataattaatatttatatgggtgttaccttgttttctagctccctaagtcagaaataaacatcatgaagacaggaacctcatctttttttgctcattgctcttttctcagcatcttttgcaatgcctgcacctcaataaatgtctgactgacaccatgtgccttgctcttgagttctctgtttcgtgacaaagacacaaatacatattcatcatatgacgtaaatagcaagagaggaaataaagtattaaaacagctctaagatggaggcacaagctgtattgggtgagtgggaggggcttcacagagaaaggatttgtgatttcagttttagataaaggaagaaagaggcggggcgcggtagctcatgacttgtaatcccagcactttggaaggctgaggtggggggatcgcttgagcccaggaagtttgagagcagcctggcaacatggtgagacgctgtcactacaaaaaattcaaaaaattagccaggtgtgatgatccacacctgtggtcccaactactcaggagtctgaggtgggagaatcacttgagcccaggagattgaggctgtagtgaaccgtgtatttgtgccactgtactctgcactccagcctggataacagcaagaccctgtctcaaaaaaaaaaaaaaggaatggctaggtgcgatggctcactcctgtaatcccagcactttgggaggctgaggtgggcagatcacaaggtcaggagatctgagaccatcctggctaacatggtgaaaccccgtctctactaaaaatacaaaaaattagccgggtgtggtggcgggcgcctgtagtcccagctactcgggaggctaaagcaagagaattgcttgaatccgggaggcagaggttgcagtgagcttagatgtcgccactgcattgcagcctgggtgacagagtgagactctgtctcaaaaaaaataaataataaataaataaaaaggaaaatgtcattttcagtgatcatcggggcaccctgggcctgtgggttgtgtttcgtataggagagagcgttgttggtaaatggaaatacctatgcaaaagcaccaaaagtttggtatattgaaggccattcaatgtggctgaatatagggtctgtggccacacaatcgggaaaatgctgcaaagaaataacttggcctgaggcttctcacaatctctttccatctacagtggtttgaatcctcgggcatccacgtagcagcactggtagtgggagagtgctgtcctactcccagccactggagtgccacccgcaccctgcatgagtggctgcagcagcatggcatccctggcttgcaaggtatggtggcaagcaggggcatatttgggcagagcacagcatgcctggatggaaagaatcaaggtttctgtaatctgctgggacctgactctaagattgtgatagttggaaggtttagattggagttgggctgggagaaagaattgaactatcactcagaaagaaaatttccaacacaggaaggaactcccaccttccataatcatcagcttagggctaatcttatttcatcaccaccactggattattttgatgcaaatctcagacatcatatcatttcatctacaaatagttcaatatctatgcaaaaggaatctttaaaaaacatgatcataataacgtcatacactaaaaaaattaataattccctaatacaagtgtccaggcaatgtttaaaatttcccaatttttttttttttttttttttttttttctgttcatttgaatcttgctctaaacagggttcacacattgcatttggttgataagtctcttaatctgtggaccttgtaacctatttgaaaacaggtcatttttcctgtatctagtatcccatagtctgcacttacttggttacactcctgtagtgttacttagcgtattctttttttccctttatattattttctataaatggatagatttagagttgttcaattcagatgtgatatttttggcaggaatacttcatggtagtatacttctgtcacaatggcccaggattttgatgcacatagaacagctgtgtgtgactggggctctggaatggaagtgcttctggaagtctaacctcacagatgactgagttgtaggaatgtgatccctaagactgtgctattttgacaggagtagacactcgggagctgaccaagaagttgcgggaacaggggtctctgctggggaagctggtccagaatggaacagaaccttcatccctgccattcttggaccccaatgcccgccccctggtaccagaggtctccattaaggtacagaggtagagtgggagagtgttgcaagctctagcacagtagttatattctgcccacaattggggggtgaacacaggagagaatcaaaggaggctttgaaggtaggagttggtgcaggcatatcttatacccactgagcacagctgccaactgttgccctttattcgtctatttctcagactccacgggtattcaatacagggggtgcccctcggatccttgctttggactgtggcctcaagtataatcagatccgatgcctctgccagcgtggggctgaggtcactgtggtaccctgggaccatgcactagacagccaaggtgagtagctggggcctgttcagggcctcagacaagcagcttgggtggaagatctatcccttggtccaattgctaaaagtcagtaggagttgcagtgaagaagatagacattgggacttaacactctcatgggctgggggggctgcaggtgtgtctcctgtaattgaaatactgattttgatgtcatcttttctgcccactccagagtatgagggtctcttcttaagtaatgggcctggtgaccctgcctcctatcccagtgtcgtatccacactgagccgtgttttatctgagcctaatccccgacctgtctttgggatctgcctgggacaccagctattggccttagccattggggccaagacttacaagatgaggtgggacttgtggggagcagaaggggcccatacttgtggcatgaggggtggggtgtctcaggaatgagaagagagttggtgtttattcgtgttgaaataggagcgggggggttgcaggtgaggt

SEQ ID NO: 97777 - DNA, 25367 bp, Homo sapiens
ttttccaggaagaacaacatgtacgtcctttatccggagctcactctccccagcgtcagggtggctgggaaggcaaattaagaattaaaggcttacacctgcagtgaggccaaacaaattttgagagatactactctaggccagattgacttcctctattaccttaattactatatgttgggttttttttaatgcttgaactgtcagagggcaacttagtttccaaatttcagaggtgaaggaataggggaaacctcactgtaggaagaaactcagttttctcacctagaggtaagaacacaactgaaaagcagagaatcagacgaggccatgtcagtaggtctagaagataatgtcactggttttgtaggtaaactggcactcactgtcacagagaagtatgtgaccctagtttccagcctctttccactaatttatgtagtcctaaaaagcactgctcccatctgactctgctgctaaaaaaaaaccttcaatggatcctttaccaaactaacctgactctgctttggcttcaggtccctccatgcccaccggatttaacttatctgcaggcttttttctcctgacttctgcatgcctaacaagttggacaaggctgttcccttacacctcttttacttttccttgatccatgccttcactacatacagaatgctttcagctatacctggagccttgatgcccttaacaaaggcggtagctttttcctgaggcctccaacactctgtgcctcccaaggcacttaacaacccctaactacagttactagtgatcttagtccttgactttactacttcagtgggtatgttttctgcaggatgcccagcagggtgtcaacgtctcctacttcactaatagttaacaattactgacttgaaaaggaatgtagagaaagcactgggtgtggctaccttgcagagaccgaactcatccatttcatctggggggatgccatagttgccgatcagaggataggtgagcactaagatctgtgccttgtaggagggatcagtgagggcctcggggtagccgaccatgccggtttgaaacactgcaagaaagaagcagggctgggctccggtagggcacccttcggaacactccccgcgcgatgagcacgccccagtggaggctgccttggtcgcgaggggtttatggcgctggggcccatgggcaccgaatgggggaagggggtacgctggcgggaaaatggcggggtctggacggggaaggttgggaggagaggcgcatcacagagtgggataaggtctgcagcctaaccgggcttgcttacccacttccccggcagtcgacacggcggccccaaagggctggccccgcaggaccgacccgtcctccaacactagggccgccatgggaagggagctcagaggcgggggcgagtacggagaagcgggaaggactgcaaactccactggaaccacgtgaggacggcgcgccggagtcggtccacgtggctaacggcgcggggcgctggagagaagccgggcgcggcagcgtaggagcctcgggcgcgcttggcggcagcagcagagactgcggcggcgcggacacaggcggcgtgaggggcggggccgggcacgtaaggggcggggtccgcggagccacggggagtgggcccccgtggtctccgcactgcaaaaccgggggaaacctgaaaaaaccggctgccctaaagcagtccctcccaccccaagcaagaaacacgtaaaggcagggcgcctttccttaaaaagaaagagaggaaaaaaaaagaaaaagtgtttattataggcaacaacaccaatgggaactggtatttgtctacaccaagggagtgcaatttttcatcttccaatggcggcctcaaccttgaggcgaatccactggcgaaagatgcctttctaggaagcagagctccctgactgggctaagatagttcagattgatcttaggtcaatggtaagacctatgtagttcatgaagtcttggcttttcggcgctgggtcgcccaaagcagaatggagacggatagagtggtggctcccagaatcccgaagaacataagcagtgagaacgagccctgtgaacaacagaccaaaaaacacccccatacaacgttacacggagggccacatcctaacacctagttctttcctaatatacctatcactttgtctagggcaattctatagttttccacctataggaaatttgtatcagctcctggtcttgtggctctcctttctgagaagacttgctctatgcattccttgtatccctagttagacggcctaattcctcacctggcgcatacacttgtatccatggaaaccatcagcacaaacacactgcaaaagacctggaccatcaggtacacaagatccattctcaggacacatttctggaggccagagagaaatagagaacatcactttatccatttcattaggcatatttctcaattatctgtttcaacttagattctctcaatcattgctaggataaaggaagaagaaagaaaattacagataaaaacagtaacaataatgtcaggcctctgagcccaagctaagctatcatatcccctgtgacctgcacgtatacatccagatggtctgaagcaactgaagatccacaaaagaaatgaaaatagccttaactgatgacattccaccattgtgatttgtttctgccccaccctaactgatcaatatactttgtaatctcccttacccttaagaagtttccttgtaatctctcccacgcttaagaaggttctttgtaattctccccacccttgagaatgtactttgtaagatccatcccctgcccgcaaaacagcactcctaactccactgcctaccccaaaacctgtaagaactaatgataatcccaccaccctttgctgactctctttttggactcagcccacctgcacccaggtgaaataaacagccttgttgctcacacaaagcctgtttggtggtctctttacacggacacacgtgagacaaataatagagtatatcttaagatcttttctttcaaaggggttatagccccagaactctgaatgaaaggcgcttaagcaactttgtctttctgatctaaagtggaaaatacaagggagaaaagacaattcccagaagtttggaggtaagacagcatacctgggtccccagtgttattgcaaaggttcttttgcccttgacagatttggttgtctatataagaggtgatagtattccaggcattaattcctccaggacagttgacatgttgtggcagtatcctatagagaaatgtggtcataacatgcaaagttgctaaactcacagcatcatccctctttgattctcttcccatacccttactcacagagtctggagctgagtaaagccacggaaggtgttggccaagtcacctttgagggggtttgcttgcaggtctctgcaaagtacacaatgttagcactttcgcatcaacctacattatattagccttttgggtgggaggtacctaactacttacatgatgacagtggtatgtgcctgatgaaagtttggaccagggtcctccagagaacagttctggagatccagcctgaggaaataaagtaatcaatataactgtgtgttcctctttttcttcagccacggcacagtttgtatttgactacacaacccccttttcagctaataattgaacacagctgtgttcagagtcacacactaggagctgtggtagacattttaattctgcattatccaatagaatcgccacttgccacatgtaactacttaaatttaaattaatgtaccttaggctgggtgtagtgactcactcctgtaatcccagcactttaggaggccaagcgggggaggatcacttgaacctaggaattcaagaccagcctgggcaatatgaatgagaccctgactctatagaagaaaattaatttaacctaaaattcagtgtctcatttgcactagccgtatttcaagtgcaaatggaataaccacgttagtagctactgtactggttagtacagatacggaacattttccttttttgagacagtcttactctgttgcccaagctggagtgcagtggcacgatctcggctcactgcaacctccatctcccgggttcaagcaattctcctgcctcagcctcctgagtagctgagattataggcacatgccaccacgcctggctaatttttgtatttttagtagagacggggtttcaccatgttggtcaggctggtcttgaactcctgacctcgtgatccacccatctgggcctcccaaagtgctgggattacaggcatgagccaccgcgcctggctcggaacattttcataatcacagaaagttctatccgccagcactgttctaatcggttatgcatctattgggagaaatctgtgtttcttgtctacattagtgaatctcatattatgattttcagatccacagagggcctttaaattaaaaaaaaaagcaagtcacataaatcaaagtttttttccacatgtattttctaccacagattggttgtaaactgctggacattaaggatcatgccacgttatttttttcttcaatatctactgctatccattcctttattctacaaatatttactgagtccctacaaactgcaaacactgggagaatgttaaaaatatgtaacacagtattttggcctttgagtggcttacaatgtagttagaggaacaagagcactgcccaaaaataaaagcactgtaaacattaaattacaatataaaagaaaccacaggacagtgtataaatatatttgagtggacactaaagattacaggaagtttttaaaaaaggtattactgaatcgcttgaacccaggaggtggagggcgcggtgagccgagatcatgccattgcattccagcctgggcaacaagagtgaaactccgtctcaaaaaaataaataaataataatttaaaaaaggtattactctggaacttagtagtagtaaatattcacaaaagatgttggaattgaaggatggatatttcctaatttggtagaggaaggcaatttcaggtatggagagaggcctgaacaaaggtggaatgcctttgagggcaggcaaatctggctggtgcagaccattatggaggtttgagcggacaagtaattggaaataatgttggaaaagtgggttgggactagtatggtacttaatggtttgaattttgtcctgagacaaaatttaatactaaatatagtattaaagcaagagagtgataatggaaaatgttggttttctaaaagcttaatacagagaagtatttaggtagatgaaggaaagaagagaatggaagcaaaacataacattttgagtttgaagttagggtgcactcagtaggaaatgcttaataggaagctagaggtacccgtatgtacctggagtgtggaaaggttaaaaaagacactaaagagatctagttttggtagacatctgcgtgatgattacagctgaaaccataataggtggattctttaaataatataagggtataaaagcagccaggctaaggaatggcctgtatccagcatctagggatgtcttcccctcaccccaagatggtgcccttctgattcaggcagcaacgggcatgcagcattagctctcgtgtcgttttacaataaaaggccacttttgacaaattttgcacgctccctggacattgggtgcatatctgcagaagagaaagaaacattagaactccagaaagaaaagccaagaaaagaacaaacggcgatcaagaattaactgccagtacacgtttccagaattcctctaacacggggccgataaatggataaacggctcgtgtcccacccttgtaacaggctaggctaggagatgccatctcttcctccagagtcctgcgccgaatcagctcccgacactttcagtaccagatatcgcacagggaaggtcctcatctctgaagatcactattcgaacttatttattatgctttctgcagagacttctcaatctgacagccctagtttggcgcggtgtaaaacgaccgcaggtacgtaaagaactcatcaagcattacaaaagtacagccctaccaccgcacgatatatggcgttcgtgcgtagagagattacacaagaggcagaggacccgtctgtagaaagaacttaaagttattctaaaattaaggggcgaaatcaagtttcacaggtctttgaaagtcggcaggactggggcgccgaaggcctgcacgacgtgagtacttgggaacaggacctggctgggcagggtcgggaagcgtcagggacgaaatcagaaccgcaggcccgccgaggagaagggggagccgctggcgagcgcgacgcacggctggccagygaccctgcttcagcccgacctcaaacttgcttctgtacctcgggtagcgccagagccctttccacgcccagagcgaggagcagggcggcagcccagggcaccagggtcgtaagactacccgggycgtgaggcgccattttccgttcccttggtgctccgctgctcgcgcgacccggccccgcggccccgccccgcagcgcgtcaggccctcttccccgggcgtggcctaagcggcccggtccagtcgccctggggctgcttgggggcttttcctgctcgtggagctctgcgctggtcttcatgcgccctagccctctttcggggatactggccgaccccctcttccttttcccctttagtgaaggcctcccccgtcgccgcgcggcttcccggagccgactgcagactccctcagcccggtgttccccgcgtccggacgccgaggtcgcggcttcgcagaaactcgggcccctccatccgccctcagtaaacatggcggcacggcgrgcggggcgggcagggggcgggcagggggcggggcccccgcgggctcccggccagggctctcggccgggctctggctacccacgtgtggagaccgggcaggtgggcctggagagcgtgagccggtgccgagaggcaccggggagcggcgtctgagccggggcggggacaagggggcggggaggggcggagcgagccggcctccggcgtgggtctgagatcttaagtgcgagcggtaaggtggtggtctccgccgcgtagagggaagcgggaaaccgagaaagaacgagggtgagggtgatgagggaagggcaaacctcaaactccagcgggaggacacgagcctggatcgccccgggcacctagtcctcttcacctcaatgctgatagcgcatagcgtcccggagcctggcgaggaggtaggagcgggatagacgcttccctaactcattttctttgccttcccaggaaaagggagcgatgttgatctcaggaagcacaaagggaccttcctagctctgactgaaccacggaggtaagggagtgcgttgctgccccagggtgggccagcgccctgactgaagggcgccaggggatccctgctcccggcgcgacagtgttggttagggccagccagaaagctccttaaagccgacccaagtgatcatctcgagtagccgagccaggcttcccttccacattacccccatggtgtctgcctggaagttcctgaaaggtttacgtttagctggctggcaaattttctaaggtgttagtagctattagcattttaaggagggcccccaaagcctttcacaccttgaggaattataggccccaggacagattttgagggaatctttttggaacagttagtcctgcagtggtctcattgccttttgtaggagtcaatgcgatccactgcagtgtgtgaccaaagtgagttcaggtttttatttttatttttatttttattttgagacggagtctcgctctgtcgcccaggctggagtgcagtggcgcgatctcggctcactgcaagctccgcctcgcgggttcacgccattctcctgcctcaacctcccgagtagctgggactacaggcgcctgccaccacgcctggctaattttttgtattttttagtagagacggggtttcaccgtgttagccaggatggtctcgatctcctgacctcgtgatctgcccgcctcggcctcccaaagtgctgggattacaggcagtgatgtgggaccccttttaaaaacctgaacttggcctggcgcggtggccaggccaccgatccgccaaggcaggtggatcgtcatgtcaggagttttgagaccagcctggccaatatggtgaaatctcgtctctactaaaaatacaaaaaaaaaaaaaaaaaattagctgggcgcggtagcacatgcctgtagtcccagctactcaggaggctgaggcagaagaatcacttgaacccaggaggtggaggttgcagtgagccgagatcgtgtcactgcactccagcctgggcgacagagcgagactccgtctccaaaaaaaaaggggggggggtcccacaatctgctgtttgtgccttggcatgttatagttgtagtgaaacaacagctagctcttgcttttggccgccctctttctggagagatgcgagaccatagcgtttggatcaatgtagggtgtttagaaaactacagatctgttctcagaatctggtctgttgctaggtcaggtttttcctgtcttccctggggctctctcaggccatccaggggaattctccatacatcaygcaaatagaattttatcaggaagtcccatcagcagagtgtctttatttctgtacctccgtgtcccatactgggactttccttcctgtctctggccacctacctctctaaaccactaaccctatagttagttctttgttctgtgttctttgcacacaggagacytcttctttcctctwactccccagtagttcccatcatctctatcatagcagtaaaaacttgccaaagacgaatgagaaaactcagggtgttgcaatgtgcaaaggcccagggcatgtttaggttaaaccagagtttaagcctgttgggaatcttgtagaacatgtgatccaagagttgccaggtctgattttccctctttattggccccaagaggttcagagttcaggtttagtctgcatgaggccatatcttgccagccagccagtgtctgcccaagaacacactgtgggagagcggaaagrcagcctaatctttctcctagtgggcaaaagcagaagacatagtttatgtyagtctgtctcttgattagttgaaatctaaactatgtcctgtgaatgmctgactgcaacactctgctcctgtcctggttctgggaatagtgaggacagggcccttgctgaacacctgtcatagctgcagacagcactgtttctctctctcttgttttgtatcatgctgcataaccttgagcaagttatttaatctctcagttttcttgtgttaactggagagtattcgtgtcttaatctgagacatgctgttttgaaaatgttagcttcattatgtattattactaatgtttataaagcacctcacacactgctgggttacatagcaggtgttcagcaaatgttaactgtcgtcatgttaggctgtgtaactacatggcattctctggtgttttttcctcataccaataagtaccccagaggattgcctttgaagacaatatgatacgcttggagaacagacagggtggatggtgaatccctagacctgggttctaatttatgctctgacaatagtcggctctgtgcttttggaaaggtcacttgaaccatctgagccttagcgtgtttatctgtgaaatcgtcagtggtggggggttggttgtaatagtggtgtccaaagatttaagattttaaatattatgatcccttccctctttctctgaggattgtggtgtattcttgggggattaacatttcttgtgcaggagttagaaaatcaactttcaactttcccatgttttcagttccttctttccaactccctcccgcacagagtgccaagagtactttaggctgaaaggctaatccatctaggaatgctgttgaatatgagctccctcttccctgttctggagcctctagggctgagttggagtttgggggccatagggtgatagggccatttggaacacagccattggttccctgaaggggccagaacaaatgactgctgagcttcaccccacccccaattcctgatctctcacctcagctactcatagagccagatcctcagctctgcagctccaggcaactctgcctcagaacagggattgcttctccaggtaggtgtctgtccccagcaggatacgaccactctctttggctggtccctttgcctctcagctccgtgrctgggttgcttctctccagaatggagaatcgtcattctgaaaccctgactccagcatggtgccctctcacctttcccctctcacttttgaatccagccgctcttcctgcgtctgctgttgactgtgatgttgcaggtagaggggctgagaggtgggtggcagcacttatctagtggtgttggggagaaccttaagaaaggggttggcctggggacgcstgaaatggagtctgtggctgccacagaggcagtctcactgatgatcagttagaagggtgacactggggatcacaggaggcgagggccgaggccaggggcagtaggggaagccctgctgccattagtctccatgctgtgtttcctgctgggctgtggcgccaggctgggctctgctggcttagtgtattgtagtgactgggtctgtgccttcaagtggggctgggaaattctgctaagaaacttaggytagagtttatttttcttttggtactcgggtggagacctaagaaggttgttgaatttcacagctgtgcatactcaaaggtcctggccaagttatattgtctcctggctgtcgcactctgatgcttctccctcacttatgtcccctaccaaacccataccagggcctcyagaccttgaagggctaccactatgctggctggtccacttctgatggcatgcgatgtacaaggcccaagggtgaatggctaccaaggccagataggcctcactaagagctaattcctttgcagctcaccctggacagtatcactccgtggaggaagactgtgagactgtggctggaagccagattgtagccacacatccgcccctgccctaccccagagccctggagcagcaactggctgcagatcacagacacagtgaggatatgagtgtaggggtgagcacctcagcccctctttccccaacctcgggcacaagcgtgggcatgtctaccttctccatcatggactatgtggtgttcgtcctgctgctggttctctctcttgccattgggctctaccatgcttgtcgtggctggggccggcatactgttggtgagctgctgatggcggaccgcaaaatgggctgccttccggtggcactgtccctgctggccaccttccagtcagccgtggccatcctgggtgtgccgtcagagatctaccgrtttgggacccaatattggttcctgggctgctgctactttctggggctgctgatacctgcacacatcttcatccccgttttctaccgcctgcatctcaccagtgcctatgaggtgagcagggacagaagggagaagtgcgtgggacacgggttggggtggagaggagggacaggcacataggaaggacctgggaccctagacctcctccacytaatgagagggacagaaaactcattgtgtgtttataattctttctcagtgatgttaggtataggggcaggattggagaggagggtgctatgccgagtaggactcagagtgggtatgggttggatattccctcatgttcctgagcatcttgagggaatttgtctgtgagttgtcggggtgaagtcaggagaaaaatctttttttctgtatacccagtayctggagcttcgattcaataaaactgtgcgagtgtgtggaactgtgaccttcatctttcagatggtaagcagaatgaggatagaaaccgagcctagggcatgttgggggacctgaacgcaagcatgctgagggaattggagtctcccctgctctcagattggcaggattgaaattcctgctagaggttagcatctgtgaggaccccagaggcatcctgctgcccatgccttccaattccagcacagatactgtggtggcagcaagccagaatttgagaggagaaggaagagggaagtgagcctaggtgaggggaagccatgggcatattggcgctgaggcccatctttcttcctctctcttcccaccattctccggcccccatcacattttttccacatgcaayaggtgatctacatgggagttgtgctctatgctccgtcattggctctcaatgcaggtgaggagtcacacagcccctggctttcagccgtggtaggttaggaaagcacctttgggagaggcagatggaggagcgtatgtggaaaagaacctgaccttgaatggggaattaattcaccgcttgggcccttgggtgggtctctaccagaggaaggcttggtccacctcaattgacagctagtaacatgttaccatgccctatctgaactggttagtcaatatcttttggtggagctctgcaaacatttttctccgttgtggtgaatgatttatttcattgttaatgaccaatgctttatctctgtggcatgacgtgattgccctaccagggcttctcccctggggaacccttttccagggataagaatgtggcttctatgcttacagtgactggctttgatctgtggctgtccgtgctggccctgggcattgtctgtaccgtctatacagctctggtaagtgcagtaagccstggtgtggggaggggaagggatgaagtaaggaggggacatgggaagagaaggaaaagaagasataagctgagaatatagatgaggagaataggtgaaattctggggtggtaagatttatgataggatttagcagtggggatggtatatgaaggtagaggatgggatgggaatgakgtcaacagggtcacagcaattacatgcctaatggcaggagagtcccctcactggtagtatgttcttagggtggatggtttcaggagtgtccaagggagagaatatagtcatgggttcttagtttctgtttctggttgggtcagtaaagccccttcgtcatccctcttttatacatatcaccagagacagaaactaaaaactggcttcaggctgcaaaaagcctaaaacaaaacaaaacaaaacaaaatggagcaacaacaaaataaggcaggttggacaagctgggtttagaaggcctctgtggcaggtttgctgtgctttccttgcagggtgggctgaaggccgtcatctggacagatgtgttccagacactggtcatgttcctcgggcagctggcagttatcatygtggggtcagccaaggtgggcggcttggggcgtgtgtgggccgtggcttcccagcacggccgcatctctgggtttgagtaagtatacccctactcctggctggggtctgcagtgcctgggcrctgagcccatcctagaggctggtctyggctatagtaagcagaaggtaaactgggaagcctgaggtgtaacagcagacagtgggaaactggtcctgcagagatggagggtgattacaggtgcccggctagtgtttatagagagtcaggacattacctgggatgagtacctggaatgagcctggggtggaagaatggagcctccctctaactggctgtgctgtctctcgagtgcacccagcttcttgctttcagtgtcccccttggccctagcagtggtgtctctcctttcctgtccactgactcctgttgccaagagggcaggaaggctgtgtctctcaggctttgcacaatgactgggtggtgtctgttacaggctggatccagacccctttgtgcggcacaccttctggaccttggccttcgggggtgtcttcatgatgctctccttatacggggtgaaccaggctcaggtgcagcggtacctcagttcccgcacggagaaggctgctgtgctgtgagtgcagggacaggaagggagtggagcaaggtctaggggaaggrgttccccagagataattggggtggggcaggatgccagagtgcatacacatccactgtggtcaggatgtgggtctcctttctggaggtcaggggcacacacctkagggtgtctgttaacgccygctctcctyctggcactgacctcttttgcagctcctgttatgcagtgttccccttccagcaggtgtccctctgcgtgggctgcctcaytggcctggtcatgttcgcgtattaccaggagtatcccatgagcattcagcaggctcaggcagccccagaccaggtgagaaggcgctgttctgttcccatgarggcaggcctggccccacaacaggagtgtctaggtaggaaaggactgactgcagaaaggactcccaccctgggtgggagacggttgtaaaatcctttcccactctgagatgctaggaatctagcatgtgaggatcgcggtccctagcatcacctaaccacagtgctcatcctactggggtgaggacctacccttactgactccccattgggctccatgtgctctgctgggagctatcacatacctggtctcacctaagcctctaacagcctcatttcacagaggagaaaacagactcaatgaggtagccagtaagcagaagtcacactagtagccagaaacagagctgcgggcgaattgtgtcattccctctgtagagctcattttctctccacttaatgtgtagacacttgggtcagcagargtgccccaggccctggcttcccttgtaatgcacccagtctcggtagactcgctggggcacatgtaaagggagcttccctgcagagccggccctgggaagacccctctctgaggactgctgtgtacctccgctctgcttgcagttygtcctgtactttgtgatggatctcctgaagggcctgccaggcctgccagggctcttcattgcctgcctcttcagcggctctctcaggtacccactttaacgatttccctcaggcctggtgcacctgacccctatttggtacaaggtgatgggtggagcggggtgatagtgggtggggaatccctctaagtttctcactgtgcctgccccatctgtgtgsatgacaagggatagctcatctttgtaggccacagcacaacagagatacccctgttttggttaagagttcttttatggtaccagaaattgatctactcgaatgaaacccatatccacattcaaaaaaggactgtgtccttgccttccaggccygctctgaggtggcatcaagtccaactatgaggaggtttcttggtggtacctgtcatctccccgctttaggacaccatttcctccatagagtcccatagagctgacaattttgcctcgctcaactcctcatcctcttcctctttttcagcactatatcctctgcttttaattcattggcaactgttacgatggaagacctgattcgaccttggttccctgagttctctgaagcccgggccatcatgctttccagaggccttggtggggttatgcttcctcatctcttcagtctgggtctttctaagcttcatcctgaccattgtcatcagtttgctgtaaaacacccactttatccggggctcagcacttgcctaatgaagcacacaaccttccctgcatgcatggttgtttccatctcagggcatgtcctagggaggtctctgagtcacataggagtgaggacttggtgggaggaagctggggcgtgatgtaatatgccttttgtttccagagagacagaggtggtagtttggctgggcagggagccttgctttaccccattgcttgtgttaactcacaccttcttgtttcctctcctgtccttttcccccagcctttggctatgggctgctttgtctaggaatggcctatatttcctcccagatgggacctgtgctgcaggtaataactatagaggrtaggaagcaattttaagggagagaaggaattgattgaaacaggaagttgagaagggcagctatattgaggggaatgaccggggggcaggcgtaagagattcccctttgatggaccgtctttactgtgaacagacttgcaagcagccagaggacgcrgggtcattcctgggatgttgtaggctgagagagagctaaggatcagcctcagagaactcaaaacacatccctctccatcagccccctagcagcctttcctgccctctggagttctttttttttttttttttttttttttttgagacagagtctcattctgktgctcaggctggagtgcagtggcgcgatctcagttgactgcaacctccacctcccacattcaagtgattctcctgtctcagcctcctaagtagctgagggactacaggcatgtgccaccgtgtctggctaatttttgkatttgtagtagagacggggttttaccatgttggccaggctagtctggagctcctgacctcaggtgatcctcccgcctcggcctcccaaactgctggaattacaggcatgagccaccgctcggccacctctggagttctgattgttcccacagaagagacagatctgwcaagtggggctccaaggtcatggctggtggctatgctttatggtgagtctgggcatctctgagtctgtgttctttttccttttcttctcaccctgtcctcctaggcagcaatcagcatctttggcatggttgggggaccgctgctgggactcttytgccttggaatgttctttccatgtgctaaccctcctgtgagtgatgcatctggatccacagtcatgtgtagcaggatggacctgggggttggcagggctgtcaccaggagagctgaggactgccgtgagggctggcaggactggccttgtgacaggcctgcactgtgtctcggcagggtgctgttgtgggcctgttggctgggctcgtcatggccttctggattggcatcrggagcatygtgaccagcatgggctycagcatgccaccctctccctctaatgggtccarcttctccctgcccaccaatctaaccgttgccactgtgaccacactgatgcccttgactaccttctccaagtaaggcagggcttgctatcttcttgttttctcaaagycctcctttgagggctttcacaggggtcttgctaagggatggrccaccagaggccccagggaaatgttgggtattgggtcccaagaccctgggaccatgcgggcaagtagagattggtgcccaaggaatgccctgccaacgaattgctaattgttctcacctctgctcttcccaggcccacagggctgcagcggttctattccttgtcttacttatggtacagtgctcacaactccaccacagtgattgtggtgggcctgattgtcagtctactcactggtaagggtgtgggattgcggtgcagatgagcaccgaggggttaacagagggccctaagggactctagggagaaaggctcctgccctctgagctcttgggtgtccgtagctgtcaggcttttctgctgggatgtaggaggtgggtgggggctggggtctytgggggccaagggaggacatggggcccgctgctgtgratggttccacccagagactcagaagcacatttccattcagggagaatgcgaggccggtccctgaaccctgcaaccatttacccagtgttgccaaagctcctgtccctcyttccrttgtcctgtcagaagcggctccactgcaggagctacggccaggtagtacctgctgtccaagtgacccctccctgcccttctccacagatgccactgactcttcaggttcccttctaccccttttctctccccctgcccygggtgcctctctcaggatcagctaagcctaggctgtcccacacggctgtctcaggttctacccacaggactgcactggcttggtgggcagaaggatctcagggctcagaggagctcagccccrgcctgggccagtcagctcccctccccagcccaccctgtgctccctgctgtgctatgccctccctcttttccccctgctctccctcccgaacccagccttgctgggctcccttctggcggggaccttttttgtgtgaatcctgtcaagcacccgtcatccgtcttcaccagttccacccctttggctctgtgtttgcaggaccacctcgacactggcctgtttcctgagaagccgaggaatggtgtgctgggggacagcagagacaaggaggccatggccctggatggcacagcctatcaggggagcagctccacctgcatcctccaggagacctccctgtgatgttgactcaggaccccgcctctgtcctcactgtgccaggccatagccagaggccaccctgtagtacagggatgagtcttggtgtgttctgcagggacaggcctggatgatctagctcataccaaaggaccttgttctgagaggttcttgcctgcaggagaagctgtcacatctcaagcatgtgaggcaccgtttttctcgtcgcttgccaatctgttttttaaaggatcaggctcgtagggagcaggatcatgccagaaatagggatggaagtgcatcctctgggaaaaagataatggcttctgattcaacatagccatagtcctttgaagtaagtggctagaaacagcactctggttataattgccccagggcctgattcaggactgactctccaccataaaactggaagctgcttcccctgtagtccccatttcagtaccagttctgccagccacagtgagcccctattattactttcagattgtctgtgacactcaagcccctctcatttttatctgtctacctccattctgaagagggaggttttggtgtccctggtcctctgggaatagaagatccatttgtctttgtgtagagcaagcacgttttccacctcactgtctccatcctccacctctgagatggacacttaagagacggggcaaatgtggatccaagaaaccagggccatgaccrggtccactgtggagcagccatctatctacctgactcctgagccaggctgccgtggtgtcatttctgtcatccgtgctctgtttccttttggagtttcttctccacattatctttgttcctggggaataaaaactaccattggacctagaatttgggctcctgtactgtcttcacctgctcttgtccaccctactgcatcctctggtgaggataaggagtcctatcctatgtacaggtcaccttcctgtgctgaggaggggggctgtggcttcaagtccctgctgtccctgtgtctgcaggggacagtgttgtgctcaccatggtagaagatgcacaccctctcctagggcttctcatcccctggggcttacttagtctgtcccttctccggccccactttccctttgccagaaccttttgctctcagatttttacttttggaactggaggaagaatgttcccatctgattttagaaacggaacattctagctggacttttatggtcttgtgaagaacactgtgctcacaccctcccacacctggcctctgcccctgcctggccctgttcagctgcccacatcagctctgcaccagctctccggggtctcttaacagagaccgggtcccaggcatatctgaattcagcctcaactgaggccttctcccagggcttctagagcacattccagctgttctctcatactccatgtagcttaggcctgggatgttctgtgtccctttttctacctctaccccagctcactcggtcacaccccagcccctttcacctctgccctggccagccctgtggaggaacagggcctggttgtgccagagccaagacactagctactcccaacctgcctaggcctcatttatattcatgacgacaatattgtctcctaatgggtcttaaacctgttgccctggatttttttttccattccacaaggctctggtcttgaacataaacattccttccagtatggacttcaggtgtctggtcatgatctattctcagtctgggaaggtactttgacaggccaaaggtgtgtccactgaatctaccatatttcagacatgcctgagtggtactccagggagaactggggagaatgatccccagggtttaatttgctgaattaggtagggtggaagtgagtctatgtaagaggacatggaaacattttacgaggggcccttggactcaggcctattttgttttgtcctgtgaattaaaacttcaatgatgggaagataagaagcctataattattatttagaaaagattcctttgggagaccgaggcaagacggttgcttgaggccaggagttccagaccagactgggcaacataaccagatcctgtctctacaaacacaaactagccagcatggtggcatgagcctgtagttccagccacttgggaggctgaggtgggaggattgcttgagcccaggaggctgaggttgcagtgagccaagattgtaccactgcactccagcctgggcaacagagcaagaccttgtctctaaaagaaaacagaacacaacaaaatcccttttccttcatagattgtttttggggaatgtaatcgaatctatcatgccagactcccaaattcaagccttatttgtttcctggttcaggtgtcctggtagagctgcttctaggacaaggtcttaccaatggaggcaatagaaactgagaatgtctgtaaaaactagaagtggacgatttatatctcaagccctacaagaaggagagactggtgattgtcaccaagaactgttgagggaatgggatcatctctggattcttagggcctgatctctgaacccattttctggccaagccagtgtctgtaggagagttgagagcaggatgcccctcactgctgcccttggtccaggactttacataaaaaataccacattggtcatatctgcaaacattgggattgtaaagtaagtaatgcccagaactgcactctgtaagtcctccaagaactgtgcatccttccattagaagtgaggacagtccccgaacatgccaggttgactctgccccgaggtctgccctcttctccttagtccctcctcctgggacccaagggcactgttccttggttaactaccttaccctaccaatctgacaaaattgtagacctaagtgggacctcatttgttcggtatatttatcaatcacctactacattcaagggcctcacttttttttttttttttttttttttttttttgagacagagtcttgctggagtgcagtggcgcaatctcagctcactgtaacctccgcctcctgagttcaagcaattctctgcctcagcctcctgagtagctgggattacaggcacccgccaccatgcccagctaattttttgtatttttagtagagacggggtttcaccatcttggccaggctggtcttgaactcctgacctcgtggtccacctgccttggcctcccaaagtgctgggattacaggtgtgagccactgcacctggccaggcctcaccttttatacagctaaagaaactgctatgccaccccaggactctaccaggtgtcaatctgaaattcttgcattttaactatatttgcatagaagaggaaataagaatgccacaggattaaaaactttcaagagttatgatatttaagggcaagtggcaaaaagatccaattcgtacaactttcaaaccttataacagagggcaaagatgctctttcatttctaacatagtaaacctttttcttcatgcagcatttaaaaagtactgtttgatggttatgagggtgtagtctaaggcttgggttcaaatactggtgcatgcatttaaccttaagcttcagtttcttcatctgttaaatgtgaaattcacagggttaaggactcaaaactatgttgcgtgcatatatgtacatatatgtatatatgcattccttaaatatcagttattgtaataattattcattgtagttttcaaagcacttttcatatactacctgatattattccttgggaaagaaatacttcctatatcgcctgcgtttttaatatataaagtaactggattgcttggctggtaagtgcttgaggcagagctaaaatgagggtctgtgactcccagtagcccaccaagttgtatttgtgttgtcatgaaaacaatgtccttttggataggatattgttacctgtgttcacagagtgttttctgggacatcagtccctagtacagtgaggtgctaagttggcggcgatggtgctatatcattctagaatctttctggagcagtggcttgacaacttttttgactgagacccacagtaagaaatatattttacatcatgatccaacacacacataaattacatatatgtttgtttctttttttttgagacagggccttgctctgtcgcctaggctggagtgcagtgtcaccatcttggctcaccataacctctgtctcccaggctcaacttgagcaatcctctcacctcagccagggctacatggggaagtagttagccagggaacaacccataacatgatgtgaagaactcacatcaattacaaacaaggtagtttggagccattgacttgattcatgctaagatggctgcagttttacccagattgcttttacaatatcagtgcaaatatccatagagtgaaaatggcaaattacattttagtattaccgtataagaaaacagttttccaatttcatccatgtccctacaaaggacatgaactcatcattttttatggctgcatagtattccatggtgtatatgtgccacattttcttaatccagtctatcattgttggacatttgggttggttccaagtctttgctattgtgaatagtgccgcaataaacatacgtgtgcatgtgtctttatagcagcatgatttatagtcctttggggactgttgtggggtggggggaggggggagggatagcattaggagatatacctaatgctaaatgatgagttaatgggtgcagcacaccagcatggcacatgtatacatatgtaactaactggcacattgtgcacatgtaccctaaaacttaaagtataataataaaataaaaaaaaaaaagaaaacagttttaactttagcgaccccttgatgtcatctcagggacccctagggtttcgtggaccacactttgggaactgttgccctaaaccaggagacatacaagaactatcataataacacactaacctcaggccaggcgccatggctcacgtctataatcctagcacttcgagaggccaaggcgggcagatcacttgagctcaagagttcaagactagcctggccaacatggagaaaccccatttctactaaaaaaaaaaaataaaaataaacgaaaaaattagccatacgtggtcgtgcacgtctgtgagcccagcgtgagctgagatcgcgccactgcactctagcctgagcaacagagcaagactctgccaaacaaaacaaaacaaaacaaacaaaaacataaccccaatctggagacaacccaaaagtccatacgatctagtgttacgtgcttacaggggtgctatgtagcaatggcaaacaaattaaccacaatcacacacattgacagaacaatgttgatcaaaagagagcagtcacagaaggaaacactatgattctctttgttaaagttcaacatggaaaaaattaagctctattgttcttggccccataagaaggtggtaaaaccatgaaaaaaaggcaaggcaatgattaaccccagggtcaggatagtggctccttgagggaagagggtggatgatgtggtcagggatgagctttaaaagtaccagcactgttgtagcggacatcatagaggttcacttcatttatttatttattttctctttgagacggagtttcgctcttgtcacccaggctggagtgcaatgatgcaacctcagctcactttaacaaactagccagcacgggttcaagcaattcttctgcctcagcctcccaggttcaagcaattcttctgcctcagcctcccgagtagctgggattacaggtgcctgccaccatgccaggctaatttttgtatttttggtagagtcagggtttcaccacattgtccaggctggtctcgaactcctgacctcaggtgatccatccgcctcggcctcccaaagtgctgggattacaggtgtgagccactgagcccagcctagatgttcactttaaacattacaaatatgtatgtattaaatgtgtgtatctcacggtaaatattttaaatcaattgatatcacatgatgatcactggcattgctgtctattttcaatatattattaaggagaaaaagcaagatgcagaataacatataatatgctaccatttctagtaaaaatgatgagcaaaagaatatgtcagtacttggctggccgcagtggctcatgcctgtaatcccagcactttgggaggccgaggcaggcagatcacaaggtcaggagatcgagaccgtcctggctaacatggtgaaaccctgtctttactaaaaatacaaaaaattagccaggcgtggttgcaggtggctgtagtcccagctacttgggggactgaggcaggagaatggcgtgaacctgcgaggcggagcttgcagtgagccaagattgcaccactgcactccagcctgggcaacagagcgtgactccatctcaaaaaataaaataaaatatgtcagtacttgtttgcatatgcataaactatctctagagtactatagaagaaactaacaatgatcactggctgagagaggggccagcaggaagggagacaggggtaagaggggcctgatctcttatctctgtatgcttttttttttaaaattctttttgatttagacatggctatcacagaatttctatgcctttttatacaatttataaaggataatattttagtattagtaatacaagaacaattccagtattactaatactaaaatcaatccctcccttccttccttccttccttccttccttccttccttccttccttccttccttccttccttccttctttccttcctttttcttgagacagggtctcactgtgtcacccagac

SEQ ID NO: 97778 - DNA, 19027 bp, Homo sapiens
ggtggctgtaactataggggtgccagtccctaacaagacccttggtggcggggagggggtggttcatgcctataatcccaacacactggaaggctgaggtaggaggatcacttgaagccacgagtttgagaccagcctgggcaacatagcaagaccctgtctctccaaaaacaaaaatataaaaaaattagctgagtatggtggcgcgtgcctgtactaccagctactcaagaggctaaagtgggaggatcacttgagtccaggagttcaaggttgcaatgagctatatcatgccattgcactccagcctgggtgacagagaccctatctcaaaaaaaaaaaaaaaaaaaaagagggcatggtgtggttgctcatgcctataatcccagcactttgggaggccaaggtgggcatatcatttaaggtcaggagttacgagaccagcctggccaacatggtgaaactccatctctactaaaaatacaaaaattagctgggtgtggtggcgggtgcctgtagttccagctactcaggaggctgaggcaggagaatcacttcaacctgggaggtggagggtgcagtgagctgagatcaggccactgcactccagactgggcaacagagcgagactccgtctcaaaaaataaaaaagaccctggagggtggtgtcaaaggaaacggagaggccagaaagagcaggtgccatgtatccaaggaggacaagggacccacaaggcctggggacttgagatatgcagagagcttggccaggcccttcacacatctaattcaactctgtgggacagatattggcatccccaaagatgaagccactgcgctattcctctgggtgcaccttaggttaatgagaatgcaggagagggcgtctctttgcagggaaggacatcccttgtgctcgctctcaggagtgcacaaaggtcctcatcagatcagaaacccgagggagaatggagtgtcaggcgcagaagatacctgcccgggagccaaactgccccctctgaggccagcaaagcagctggccacccaccaagccaccagcccaggagtgtgaagccttgagaaagggaatggcagacaccacccctgccaaaagtgggcgataggcgttaaggatgacagacgtgtcctcatacgaggaagcaatggattcagcatttgaagtcaggtttatttttaagttcatgctgcctccgttaagaagcaagagactccggtggtttctggtgtgtgccctcgggcaaatcacttcctctctgaggtaagatgcaaaggcctgtgctcctaggagttggcatatcactcctcagatgggaacagtccttatttgaggattttatgtgtgtgagagacagggtctagctctgttgcccaggggctggagtgcagtggtgacatcactggtggtccagcgcagcctcgacctcccagtctcaagtgatcctcccgcctgagcctcctgggcacctgggcccacaggtgccacgatgtttggctaatttttaaatatttcgtagggacggatccccatgttgcccaggctgtctcgaaagcctgggctcaagccatcctcctctctcggactttccgaaagtgttgggattacaggaggattacaggcatgaaccaccgtgcctggcagaggatttttttttttttgagacggagtttcactcttgttgcttgttgcccaggctgaagagcaatggcaatggcgcgatctcggctcactgcaacctctacttcccaggttcaagtgattctcctgcctcaggctcccgagtagctgggattacaggcgcacgccaccacgccctttgtatttttggtagagacggggtttctccatgttggtcaggctggtctcgaactcctgatccgcccgcctaggactcacaaagtgctgggattacaggcgcgagtcggatttctttattaaaggttgaccttcatcaacctccattggctccacctcctccgcccgcgccccgcgccccgcacaaaaatggcgaagtcggtgctgggcgactctgcctccgcgccaggggtggagaaccgaagccccgccccgggaaacgcggccccgcggccggctagtgctgacgcgtgtcggcgctcctgcgcctgcgcggagggagccgcgagacaggtgcgcatgcgcagtgcgcgtctgcgagaccgacttggacggagccgagctgaggctcggcttcctgctgatggtcagggttttggcaactccccggtgtgagaggggtagggagtgctcccggcggcgacggggccgagttcaccagccgccggggcagtagtcgaaggcccggcgcggcatgtcctgggtgccgcggtgcgggcagtgaacgcgcgccgggcgggatgggccggcgccgggcgccagagctgtaccgggctccgttcccgttgtacgcgcttcaggtcgaccccagcactgggctgctcatcgctgcgggcggaggaggcgccgccaagacaggcataaagaatggcgtggtgagagcgcagggccactggggctgggtcttgctgcgggctggcggcgattccagggtggccggggggtcgcggggcgggccacactccagcttcgggccctgcccacttctgttgggaagacccgcttgcctgacgcccaggggcgaatttcagtcgagaactcagcgggcggaggagaggcttttaaggtaaagtgaaaactgcacacagctgcagagtcgccaggaacgcttcagctccgcctcagagcagctccaggggtcttatactggccttttccgggaggtcttgcctgccctctagcagcggcgagagtggtgcatttgggtttaggctaagttccttccctctcctgagcttcaccctgttctgtaaaatagaggtaataatcccagtcctgctcactgtgtagatttgtgaggcccaaatgagagaaaaaagactcgagaaacccttgtgaactagaacgtgcagaaagcaaaggggtaagacatcagactcttccctaaacgtgctctctgggcacccctgaacttgctcatccgggttccccctcccacagcactttctgcagctagagctgattaatgggcgcttgagtgcctccttgctgcactcccatgacacagagacacgggccaccatgaacttggcactggctggtgacatccttgctgcagggcaggatgcccactgtcagctcctgcgcttccaggcacatcaacagcagggcaacaaggcagagaaggccggtgaggagctccctctctacccccttggggaaagggttgaacgagtaaggtcactcttggtgtctctaaagaagtgggtctggaagtagggttttggtagcaagctagaagttgtatgggcacctgccatggagagaggggccagtactccttactgtagaagcctggaacctggccaagtgtttgtgttacaggttccaaggagcaggggcctcgacaaaggaagggagcagccccagcagagaagaaatgtggagcggaaacccagcacgaggggctagaactcagggtagagaatttgcaggcggtgcagacagactttagctccgatccactgcagaaagttgtgtgcttcaaccacgataataccctgcttgccactggaggaacagatggctacgtccgtgtctggaaggtgtgggtttgcagggttagggagggtgaatgtcagtagcaacaggatcaaaattgtgagaagttgaacgtggcatctgggaaacttgtgaatgaagcttgcattgaggggccattagaaggggtggcgtgggcatcagtcacagtgtacttgctggacacctgagttaaccatggtggttgtttggctacaggtgcccagcctggagaaggttctggagttcaaagcccacgaaggggagattgaagacctggctttagggcctgatggcaaggtgaggggctgggggtgggaggaggatggagaaaggagagaggaggtgcttatgctgcttgcccagtaagtggatcccctaactgtccatccttggaatctttattcctaactagttggtaaccgtgggccgggaccttaaggcctctgtgtggcagaaggatcagctggtgacacagctgcactggcaagaaaatggacccaccttttccagcacaccttaccgctaccaggcctgcaggtgtgaagactttgggtggtggctgaaagaggcatagcccagctgtggtgggggagagggaaaagactggggatgggagagctggggaggaacttgttgagtgttaccccaggtctgaccagggtgcaggtggtgcacaaacctctgaggagggttgggcaggccctaggagctgaatagcccctcatccggcccccaggtttgggcaggttccagaccagcctgctggcctgcgactcttcacagtgcaaattccccacaagcgcctgcgccagccccctccctgctacctcacagcctgggatggctccaacttcttgccccttcggaccaagtcctgtggccatgaagtcgtctcctgcctcgatgtcaggtgtgagacattgctgccttggctaggtagggggtccctgagggagcttggaaaggagtcctgcctgggtccctacggaccggtattggggtatgagggttgctgcacaagcctccaggacaatgagctctttattgtttgttgcagtgaatccggcaccttcctaggcctgggcacagtcactggctctgttgccatctacatagctttctctctccaggtaatgggtggaggttggcatggccctgtgggtggactgtaggcctgtctctaccctgagtttgcaggaaggagtctggcccatcctatcgagggaaatcctgggggtggggaacatgctttccagaaagagagttcccagctaggcctttcctcactggtattccttctgcccacagtgcctctactacgtgagggaggcccatggcattgtggtgacggatgtggcctttctacctgagaagggtcgtggtccagagctccttgggtcccatgaaactgccctgttctctgtggctgtggacagtcgttgccagctgcatctgttgccctcacggcgtgagtcattggggcagggcaggcaggcaccaccccacgtttaatgaccagaaacgtgccccccggaggctgggctctttgtgccactcctcctttgaagggttctggttttcaggctgggaagcccttttgcccgctgacctcctccctttccctcctgcagggagtgttcctgtgtggctcctgctcctgctgtgtgtcgggcttattattgtgaccatcctgctgctccagagtgcctttccaggtttcctttagcttccctgcttcctgggaatcaggagcctggacactgccatctctagagcagagtggaggcctggactccctttgctcactccattcgggtccacagctgaggttgcctctgacaagatgaatgggcactgcctgcccttctagtgaaaaggcttggctatggccctgtgtgactccaggtcccaggaaccttgccttcgtcatctgtggatccatccagaacagcggtatctgaagcccaggccatactccctgcctcctttcttctgcctaccagaggctccagagttgagcttgtccttatctagaaacatgtgaagatgcccaagagcctggaggcactgctgtccttcctgcagaaacagtttctcctcctcccctcagccttgtggccagttcctcttcacatgaagcccctggcatttgctggggaagggactggcctggtacttgctgttagggcaggaaggggcaaaaggaagacttgggtagtaatctgggggttcagatgggtagcactaagccagctggcctaaagatgcaataagttcctaggtagtctacccttaccttgaggaatgggaaaatgaacctcagcccattaggcaggaaaagttgatatttaataaacaaggaaagagtgaactgagascccaaatggtactcttgtcagctgtttctgtcctcagaaggtaagagagccctgaggtcaggcagcccctctgggtcctggaagatggctttggcgtactgatgcaagaggcggctcatgtascagtgctgccacgggagcagcccttccaggaagccgatgtggccaccccgggctgtgatgagcagcgcaaygtagggggagtgttgggcggcctgtatgggaagggctaggagagggtcagaggttagaaacactggccttcactgggagcccaggctgtctgttgcrtccctcatggcccattttccttggggccaaagtgtcctgaatcagagtactcaccacagacgggggagaaggggtcatctgctgcactgagatagagcacagggatccggatggcatctatcttggttctagggcttgctgctttgtagtaggtaacacagtcttgatatccaaaggccacagatgtgtagcgctcatcaaactggcggattgtacgggcctgcaggtcttaccataggataggctaagatgataaagaataggaagatagtggaagactcatttgggggaaccaggggcatggctgaatattatacctgtagtacaaagtctatgtccaccaccttttcaatcacctttctgtttctgcaaaagtacataagagtttggcttgacacctggatctgatcccccacccccaggccctgtcttactatctcatgtgtgaggaagcccagagagaactgaccaagcactaggagagcctggagtgtctgccatcctactctgtctactgcctcctcccacttgccacgaccctaccgttccacaagttggcagagcccagcagtgaggggctgattgaagagcagtgagttgagtggggtttccagggagcgagtggtctcaaaggaatcccagcatgcagacagagtcagtgctgccaccagccctgcagcctgcctggcctgtgccaggtgattcagcaccagtatcctgtggaattggacaagggaccatgaaagaagggtttgcattaatgtgggttgggacagaggaaggggacatggaggaggaaaaaaaggaagactgggcctctgggctaagcccaggcaatctttaccctccaaaagagatgcccacggccagcagtggagcttggggataacgatgctttatgtggttcacgactgtctctagatcttcagtattgctggcacaaaaagccctgtgggtctgagggcaaaccagatcattgggtagggagggagwccgtggccagaaggtggaggggaaactgaggaaggataggtaggaggtgagccccagggccaaggatctctaaagggagtgggtgaagggctgctatgaggaaggcagctactcacccgcagttcctccccacggcagccccggttgttaaacacgacagccctgtggcacacacaggtacatcttagccagacccttcttagcccctctcccctttcagtattcagaaagacccctgtccaaagactccctttgtgtagcattcttcttatctatcagtgtccggattgacttctccctaatacacgttctcagatgccaccccactctggggctgcacccatccttactggtakccatccctcagagcttggttaactaggtgcaagacgtatgtmtcctggctactgccagtgatgccaggaagcagcagcacaatgggctgggtagtaggatcagggtcttggctgctgtcaggctgcttggcccagtctagcaggagctggcctccatctggtgtttggaggatgtcactggttttggaggaagaggcacacaaagatactattaagaacttaatgtaattcaaaagctttgccccctgccccacccacaaacaagtcttatcacttcccgtcagcatcatctgagggtgttcttcatgtaaaacagtaaggcttgacaatgtgtgatggggacataaaagatgacctggtggccgtgcaattatatagcccttccatataacatccrttgtcattgaaccctcaacacagggatgtagatgaggcagattacctacattttaaaagtggtagataggtttttccctagatacctggggtttcatgttcaccctgttctgtcccttcttacctctgataaaggactaggggctgagactgcaggaggacttggaagatgctttgtagtcgcccctcaaaacaccacagcgttgggtagaaagtctcggtggtgatggaacagtgtkgctccaggaaggccagaaactgcggcccagccaccagccgaggcctctgtaatcacacagcagtctgccccacttycctgacttttgcaccaagctartgaggcacccaacaccagagggtgagggggccccctctccagagcccagcctggaggaccctgctttgtctgcatgtgagatactcagcacagctcagttgaatggccaagtctgataatacactccagctagagcccctaaaaaacccagtcctggagtgtcactgcccagaattgaccctgaactgggagctgctgagttgactgagtgctgactttcctgctcagcctatccatgccccaaacccattttggagagagcaggtgatgtaaacagccacgctcagtggtgtgcgcctgtggtcccagccacttgggaggctgaggtgggaggatcacttgagcccaggagttcaaggctgcagtgagctatgatagcaccactgtactctagcctgggcgacagtgagaccctgtcaataagtgcccagctgatcccctgcagaaaaagtcggggttctgggcaggggctgaagaaatgcagcaccattcaatcttcagcctttactttgcagttgaaaatgaagccggccgggcgcagtcgctcatgcctgtaatcccagcactttgggaggccgaggtgggtggatcacaaggtcaagagatggagaccatcctggccaacatggtgaaaccccgattctactaaaagtacaaaaattagccaggcatggtggtgagcacctgtagtctcagttactcgggaggctgaggcaggagaatcacttgaacccgggaggcagaggttgcagtgagccgaggttgtgccactgcactccagcctggtgatagagcgagacaccatcttttttttttcttttttttttttttttttgagacagagtctcgctctgttgcccaggctggagtgcagtggcgcaatctcggctcactgcaagctccacctcccgggttcacgccattctcctgcctcagcctcccaagtagctgggactacaggcgcccgccaccacgcctggctaattttttgtactttcagtagagacggggtttcactgtgttagccaggatggtctcgatctcctgacctcatgatccgcccgcctcggcctcccaaagtgctgggattacaggcgtgagccactgtgcccagcaacaccgtcttaaaaaaaaaaaaaaaaaaaaaaaaaagatgaagctacactgtcttcttcctaagactgactctggccactctggctcctgattttagcaccacttcatctgtatattcctattctctaatgttcttgctcactgccaaggggtttttttgagacacagtttcactctgtcgcccaggctagagtgcagtggcgtgatctcggctcactgcaagatctctgcctcccgggttcacacgattctcctgcctcagcctcccgagtagctgggactacatgtgcccgccaccacacctggctaatttktttttttttttttgtatttttagtaaagatggggtttcaccgtgttagccaggatggtctcgatctcctgacctcgtgatccgcccacctcggcctcccaaagtgctgggattacaggtgtaagccactgcgtctggcctaaggggcttctttctaccggggaccttatcttctcttacttgtggggcccctgctgttagattgtgctctaaaggaagaacagccctaatgtgaatcgatttttttcttccttcatgccagctagggggaaggtgacaaggatgaaataacagggacagatgaggtcagtgggcactaagccctgactttcagcttctctgctgtgttctggacagacatcaagtgaatgagagagcctagccacgtggaaggcatgtgaaggaggagtatgccataggttcaagaatagaaactgcatatccgcagtgggccctaaggaacatgaggaccagatttctatctccagtacagttcctatagtctacaggggcaaatggtagagaggccaagttgatagtgcaactgttgggagatgtgactttggaccctagtccttaagccctggaattacgacagctgtcagtcgtgtgaaggcactgggctaagcccaaacttatgagatattttataagtgaagaagttatgactgacagagattaagtggtttgtccagttacacagcaagcaagaggcaaaacaaaattattaactatgacattaccaccagtacttgtaggtaagatttgttgagttctcattaagctccaggcattctgctaagcacttcacacaaattttgtcttgtgattttcataacagttccatgaaataggttctgtgatccccctatgtgaacggatttgaatgctgaataacttgtcaagggccagaagcttgccagagctagttagtggcagagcaggagattcaaacccaggtctgtctgactctagagcctgcgctgtctagtcactgtcgggtattgcctcctaattgccaagattttgagttgctatccttttttttttttttttttgagacggagttttgctctgacacccaggctggagtgcagtggtgccatctcagctcaccgcaacctccgcctcctgggttcragcgattctcctgcctcagcctcctgagtggctgggatgacaggcttgcgtcaccacacccaactaatttttgtatttttagtagagataggggtttcaccatgttggccaggcgggtctcgaactcctgacatcaagtgatccgcccgcctcagcctcccaaaatgctgggattacaggcatgagccactgtgctcggctgagttactatcagtttattaattccttggtcaaacggcccagtagtgtggaacaagacttataaatttgttcacaggtttgatttatgtgggttaatttgattttaactcaagaaaatgtttcttgactccctcctgagaatgaattagtattacaatatggcactggttgctatgcttaaatcagtatagatccattacagtgctggccaatccaaacaccgtatctagagggcctccagaatggcacttttcctgcattttaaccagtattcgttagcttataaaaggtttagtctataaagcagcaggggcccagatttctgtgcagctagttgcaagtaaaggaaagtgtttccttaggggcagttttgttctgaagtgaccttccaaatctgatgtataaagtgaggcctacagagtattgtgaggcttggagtttttaactgttttattarggaagacttttttttttttttttgagacggagtttcactcttgttgctcaggctggagtgcaatggcacgaggctcattgcaacctccgcctcccagkttcaagtgattctcctgcctcaggctcccgagtagctgggattataggcatgtgccaccatgcctggctaatttttgtatttttagtagagatggggtttcttcatgttggtcaggctgctctcgaactcccgacctcaggcgatcctcccgcctctgcctcccaaagtgttgggattacaggcgtgagccaccacacccggccctaaggaagacatttagtaaacaatatatgctaatgtagaaagctctgaaaatatggaaaagtctaggtaacactaaagtctcctatagacctttttaaaggactcgaaccagtaggtgtcttgttagactcagctacctagaacagagtttaatgaagatgaagagatttggcttttcctggatatgtaaattatgtatatatctaaatttcagtgagaaaagtctccaaattcatcaaaatcaacctcttcaaactttctcatcacactcactatatggagagcctggaacataaaacggctgaatgagcaaggacagttggggtcatccatcagttctgagctaggccagttctgacctcagccagcccttaagggaagggaggtcctactaagctatttggggggtgggtggtattgggagttagccatgacccacagacctctggttccttccttcagtgcagctgaaagactcagctaaaccacctaaaaaggaacgcaaagtgtgcacatctctgatacctcaggatgccttccaccccacctttccccaaatgcttgtccacattatagggagcagcaccctccggtacccaaaaggcccagctggcatggggatcacatgggatgcagaggcactagagaggcagagccgactstccattcggtggtagcaaatttcacctgtggggaagcccaaccatcccagttcccaccaagggcccaagcccgtgtctggaagctgccccctacacccaaacccgctggccagagcggtggacccgcacccacctgaagcacacatgcccagtagtagcccaagtagagggcaacggcaagagccaagagcagagagaaggtgtctgcccaggtgccattctgggggctcaggaaggagctcagcatcttgtgttgggggcttccgaccctcaggctcctggctggccccagttggccggctgtaactcgcggtcccacccgccgcccgccataggcggcctgtgcaggtccggtccccgctgcrggcagtttgcgctrctggccccgcccaccgccggtgccccgggatgggcggcgagaggcggcgctagttggtcgcggggctgggtggctggtcgcctagtgcctcgcgcggatctaacccgagtgacctgcgaatggcctcccgccctcccctgccttcttcccctccgcggttcttggctgtgcagcccgagacaagcggcctcccccagctgccatcttggtgcggggcatctccagctcccttaaactcttccccggcgacgccccgagtccagcagcctggccagagtcccttaggcgctcgcagtcagtcacgcacaggacacagctactcctgcagtgacattctgctctgtcacacactacagccattcacagtgaccctcaccagtcactgtccgactgtgacaccccacactgtcacaaagctttcagctgctcagtggtggcattgcaacacatgcaccttcctgcagtgtcactctgcattgtctcatacagtccctgccacacagtcctcgtacagtagataatttgctcaccacccgccctgtaccaggcacttgatacagaccccccatgttactgtccgtgtcttcattgaaatataggaggtcgtctactaagagtagtggctttcaaccttgactgcagatcggaatcatctaggatttttaaaactaccagtgcccaggccctacccccgatacagttagtctggagaggagcctaggtatcaatacaccgtaaagcttctaggaggtccacaagtcatcagggcttaacatggtccacacaagagaagtaccagctgccatgggagcactgcggaggtgcccggacttcacgcgagggtgttctagcagagggggcagcaaaggcaaaagcctggaggtgaaggatgtcttaagggaacaaagaaagttggtgtggctggagcatgtgggtggtcaaggaccacataattgctgcagtttatcctagggtcagaggaaagccatccaggggttttaagaagggaagggtgacatgagttatgttttaggagaatcattcagttgcttggagaatagattggaggaggaggaaagtagaagcagagaggccactgggaggctgctaacagaacgccaggctcaaaagatgcccggactggaggatacccaggagaggagtgaagatcttcaagatcagtggcagaattgataggacctggtagtagattggaggcaggggaagaaggaggaacatggatgacctccaggtttctgactgcacagatataaagtgtccatccctgggacagggaaacagaggagaggaaggtttgaagaggaagatgatgcatttagacacagacatgtagaagttggggtgctggtaggtgttttaactgtgtttccttaggttctgtatttgtctatttggcatccataaatcacagggccaacctaatggccaaggttgtttacatctcccctacaatccagagctcacactctgagcacttcctttctctaactttcacattccaagccagtatctcccctgccctaaatcaacccaggaccaggtaaccaggacctgtccctgtgccccagagcactctggaattattcaaactagccagtcccaaactgcttctcctgccttactgggagaagtaaaccccaataaaggcctgtaccttcccttcgcttctttctgcctcctgagtgacactggcacttccccctgtgaccgtgccttttgtttctaggggaactgcaaataacattaagcttttctttcaatagcagtgacctcttcatgtcctcactcagccacctttataaattaaaactcaggcacaaattagtaggatattcaatgcctgaagtggcctggggcttagagattggaggtggagaattggcaatcatcagcatttaggtggtgtattagttggcagtttgctgtaagaaagcactacaaactgggtgtcttaaaccaggggtccccaaccccctgggctgcaaattggtactggtccatgacctggtaggaaccaggtggcatagcagaaggtgagcaggatgagcaagcattactgcctgagatcagcagtggaattagattctcataggagcgcaaaccctatgtgaactgcacacaagaaggatctaggttgcgtgctccttattagaatctaatgcctgttgatctgaggtggaagtttcatcccaaaaccatcaccctcacccccaacccttctgatctgtggaaagattgtcttctctgaggctgggcacgtggctcacgcctgtaacgcccaatgctttgagagttcaaggcaggcggatcacctgaggtcaggagttcgagaccaggctggccaacatggtgaaacctcgtccctactaaaaaaatacaaaaaaagaaaaaaaaaagaaaaaaaaaaaagattgtcttctctgaaactggtccctggtgccaaaaaggttggggactgtcttaaacaacagagatttattgtctcacacttctggagactagaagtcaagactgaaatatcagtagggtgggttcattctgggaaccgtgaggaataatctattccatgcctctcccctggcttctggcattttgctggaaatctttggcactccctgactggtagaagcatcaccctgatctctgtcttcatcttcacaaacatcttagtgagtttgtgctgctataacaaaatcccacagactgagtaatttacaaacaacagaaatttattcctcacagttctggagactgggaagtccaagatccaggcactggcaggttcggtgtctgtgaaggtccattcctcagagatggtgcgtctgggtttcctcatgtgatggaagggacagaaaggcaagagagcaagaggggtgaactctctcagaaacctctttcataaggtcattaatcccttcatgaggggagagccctcatggtttcatcatgtcccaaaaggccctactcctttttggtttttttcagaggcaggatgtcgctctgtcaccaaggttggagtgcagtggcaggatcacagctcactgtaacctcaaattcctggactcaagggatctgcctgcctcagcctcccaaatagctgggactacaggcgtgcaccaccatgcctaatttttatttatttatttattgtagagacacggtctcactatgttgcccagactggtcgaaaactcctggcctcaagagatcctcacacttcggcctcccaaagtgctgggattacaggtgtgagccactgtgcctggcttcctcctcttaatatcaccacaatggggactaagtttcagcacatgaatttggtgggatattcaggccatagcaatgttcttcctatgtgtgtgtctgtgtccacatttcctcttttgatatgaacaccagtcatattgattaggggcccaccctactccagtatgacctcatcttaatggattacatctgcaatgaccctatttccaaataaggtcacagtctgaggtattggaggttaagacttcaacatataactttgtgaaggacacgagtcaatgcataacagtgatgggagctaggtgagcagatgagcacatgagcagatggaaagtgaggagagggccctgaggaactctgacggtgaagaaaatggagacctttttgaaatgaccagaggtaggagaggtattgccgaaaccagcagaatccgtgatctaaaaaggcagtgacaagcagtgttcatcactgggaggaggacaggatgagagtgggcttgtcgctgtgatgacagtgtcgctgtgatggagtgtcacaaacaactcaggaagagttcaccctgacaccccaatacatatgcctctaacactctgcaccgccacacccctgggcagtcagtcacacattggccataccctgaagcccacactatcatttattttttatttatttatttatttattgagacggagtctcagtcttgctttgtcacccaggctggagtgcagtggcgtgatctcggctcactgcaagctccaccacccaggttcatgccatcctcctgcctcagcctcccgagtagctgacactacaggcgcccgtcaccatgcccggctaatgtttttgtattttcagtagagacggggtttcactgtgttaaccaggatggtctccatctcctgacctcgtgatccacccgccttggcctcccaaagtggtgggattacaggtgtgagccaccacgcccggcccctgaagcccacactatcacacggatgcacagtcacacaaaataccccctaccgtgtcacaaattcctcatacacagagccacacatgccagtcacaaccgcacatgctaacagtaagttaggttccattttgtcacatacatctgggtccctcaggcagagaaagtggcaaccaaagcatgagcacagttaaacatacttctgatgcacactggcctcactgtctcttggtctctctgtactcacatgtgtgcatacaggcacacgcacacatccgcgcacacatgcacgctcacacacgtgcatccttacacatgctcacactcacgctcacaatgtcacacgcatgtgcacacccgcacaagcacacgagcgcactcacgagcacacgcggactcgcacacgcgcacatgcgcactcacgcacgcacacacgcgcacactcacacgggcgcgcgcagcccctccggccgcgggcgcagcgggggcgctggtggagctgcgaagggccaggtccggcgggcggggcggcggctggcactggctccggactctgcccggccagggcggcggctccagccgggagggcgacgtggagcggccacgtggagcggcccgggggaggctggcggcgggaggcgaggcgcgggcggcgcagcagccaggagcgcccacggagctggacccccagagccgcgcggcgccgcagcaggtgggtgacaccccgccccggccggccggagacccgagcccatcgccgtcagccagccagggccgcgcggggtaggtggcctccagcctctggtccagatcccgagagcgcagtccctctgcatcccctgcggctcagacgcggcgggagcagtggcccttgcccctgtgtaccctgagggcaggtggaggaagggactggagagcgagcctgaggctccttggtgtgaatttggggcttcgcagttccccaggcgcttcccccagccccgcattccgtgttccagcagtcctgggggaggggcagctggcgggagctttccccctcatccgacggggaagaaatggagcgctggggagggcccgaggctgtcgtccgcttgcaggtggccgagggaccagctcccgggtgtgggctcctctagccctgtagccgctgtctcctttcttgggggatgggtgctgggaggcacaagggcaccagagggataaattaagaattaagggagaggattctactcaaaattttagcttcccaacagttcgactctacaggagatggaactgccggcctgtgaggtgctaggttcctgtcctggaatgattcaagcagaggccatttgacagggttgctgaggaagaaatttttgctttggatgggaagttacccaggataaccctgcaaggcccctgccacagcccagaggctctgaaatacccaagcagcacctgcttggtgccaggcacctaccctaagttttctcattgcagcctccccaaacctttaggagacagataccgttatcctcatttttaaaatgcagatcccgaccaggagcagtggctcacgcctgtaatcccagcactttgggaggccgagacgggcggaacacgaagtcaggaaatcgataccatcctggttaacacggtgaaaccccgtctctgctaaaaatacaaaaaaaatttagccaggcgtggtggcaggcgcctgtagtcccagatactcgggaggctgaggcaggagaatggagaatggcgtgaacccgggaggcggagcttg

SEQ ID NO: 97779 - DNA, 41241 bp, Homo sapiens
  misc_feature (1)...(41241): n = A,T,C or G
tgttgaatctggtagccacagtcacatgtggttattgcatccatgaagtgtaactagtgtaactgaggaattgaattttttaaaatttgatttcatttcatttaattgaaattgctacatgtggcagatagtcattgtattgatctgtgttgctaaagaagattgtgtaaaatggttttcataactttggggtagcagttggcatttttatgagactaggaagtatatgattatgtagtgttgtagtttatgtgactaaatgtggctccttatggaggagttctttaactttgccatacttataaagatagttattatttattctctctacttatattttgaaagtccctctcttaaagcaagtagatatcatggagtgagtctggaaactcctgttacagaacaccaggagtggccaaattatgactggtgccccctggagttgtgcacacagagtctgtggctacccctataagctgagtcacatctcaaggcaatgtcatattcacttttatgtctacaatgcttggtatggaattgattactgacaaatctttgttaagtaaggaatatatatctcaattttgatatccgcaataataaaggatagtgaataaaaaatattttactatgtgctcatagaacacattgtatgaatttgccctttgatgtatatattcattaagttctacatttatgaagtacgctttgtggaaagtattaatttaagtatttaatacgaatataattcagacacagtatgtctactgctgattaatgaagaagggaatgtaaaaatatgtgctgcatcataaagtaactgcactaatgaacatatgtgcaagatgtagttcccaatagcaaaggaagagaaagggatttttgtttggttgattgattttctcagtcctgtggcagaacaaaaaaggcacatcagagaaggaaggctgccatcagggaaatgacttttgaggcgggttttggaagatgagctggagctagcagaggggtggtgaggaaagtaaggcctgtgctgctccaggtactttgctaagggacatcatctcacatcggttttctccatactcctccaacgtagatgtccttaatcctcatttcaatgatgatgcagctgattcggatttaaagaagtttgcctaaggtgacatcgctattcagtgagggtactaagctttgaacctaggtatgtttaacgctaaagcctgtgaattgcaccatagtcattggtatcagtaatgaaaaatccaacgtgtttggtgaaattcaagtagtgtagtatcgccaagcacatgatacaaagagaagcaactgaagtgctggaatggaggcatgtgataataaaaaaccatctatgccatgacaaatacactggacttttttctgtaagtaatgtggagccctgggtgggttagttttaggctggcaatgacatcatgattcctaaagaaattcaggagctaaaatcaacagcatatttagctaattatttgacttgaatttccattcaaattggctttattttttcctgaatacgcagttgcttagaagtggttgagttccatcctggtgcgtgctggctatcaaccaacataggagtaaaaattcaccatgagtagtcagccaaaagacacatgcagatgcttaggaaaataaattataaatatttcttatgtctgccagtagcaatgagaagattttgctatattgtgttttttgatagttggcttgttttactgtatgcttatgaaaacataaagtagcaggacaacagatcacattgccaaatgatttctaggatttggcccaaggtttgatgatccctctgccgcttcttggctttgtatgctcagaagcacccaccatcagctgtcagccctgtggcaaaaggaggaatggggtcagagtcaggcaaacagaagccagagccaagtgttgttctgagaaatactagcatctgtttagtgcagtgagttctctgctttgtacttggcaacccacttgggactcatgctgcaaagggggctgatgatttaaaactgagggaggagatccagaggggagaccttggctcatgaaacatcctcttcacctctgtgatgggccgttcttcatgtcctacagtttgaactaaagaatggcctcggcttctcctgtggatgtaaacatattttgttgcaagtgccattcgttttatttgttgtataccttttccttcaaatatattcctggctaaactcctggctgtctctcctggagtgtttttttttttttgtattcttggggttgtaagaatcaggttcatgtggaggtgtctagaaacaggctggctggacaggaaggaaataggtggatatagttttaaatttatacacatcttttggagccaggaacttctacacaatctagcttctatgagataaaatttgtggtacgaaagaggagtggtaacatgaataataagagattttttttaagtctagaaaaccttagatgttgggagtgtaatcaagcattttagccagtcattttgaaaggtaagtgagtttaaatgaattgaatactcagttgtgaattagtgatactgaacatgtacactgtcttatcagtgtgtttcatagtgattggtaatgcccagatttccaatttgatacacagtccattttaaaaagatatatgtgtgtattttatacgatgctttgtagttttgaagttttgagataaattatttagaatcaaatgctcatggaaatgtctgtaatattaaaataggtttatttcaagattattaattcatttgttcaacgagtgttattgagcgtctgttgtgccgaaccctcattaacctcaatagggaaggtactaggttcaagaggctgaagaagagaccccgagccaacaaaggagacatggagtttcattaggagcttacatacagtggagagagtcagtggcagtgggctggacaggagaaccaacttacctacagaaatgatccagtggtggcaggctgggcaggaaaaccgcaaccacttgcaaacagcatgcagtttatgtagcattttcacttaacactctctcctttatgacctccacctggcaaccctcattaaccccaaactcagggcctcattcctctgtatggcccatgttccatgggatgggatggggtttcagatgttcctcacagacaaagaacaaatcttcgggctgtccactagattccctagcttgggacacactttcaggtgtgtctactgtacagggtcattctaagggtttgcttaagtttaccctacagcatcattcacgtctgctctctcatgtgcttgcgatacagtgaccatcaacacaagggccctggtctccaggaacttacactctgtagagcagtgtttttcaaagtgtggttcccagatcattagtatcagtgtgctgggaattgctagaaatgcaaattctcaagtccccggcctagacctattgaatctgaaactctgagagtggggttcagcaatttgtcttttaacaggtgattgtgaaagtttgagaactactgcaaaagacagataaattaactgatgattattaagtatgccagaaaaggctgagttttacaaagaaaataaaacagggaaagaagatggacagtgtaaaagtgtgtagcttttggggtgttgtctttgtctttgagcacttgactgatgtgagaatatctgggaggaaagctttgtggttatctcggttagagattttagtgagttgaggcacggttgggaattgtgatgtctttagaagggctgaacctccagaatttgctgttgaataaattggaaatggtgatgtgagagggcagaatgatcctaaaggttgttgatggtacctactgatctctgatgttacctcatagtaagatgggaaaaaatgaaatggggtggggcagggaaaagcagactttgggggaagaataacacattttattttagaaaagttgtttcaaaagctcattagccatgtgtgaagctatatttgtgagtatgccattcatggggaaggttggcactgggaatattaactggggagtcatggtcatataaatggtattttaaaaaactagttagcctgagatcaccaagggaatgaatgcacatggaggaggtctaaataccaagtcctggggtatacctggggggtggggtgggtggcattaggctaaagatagtgaaaattctaatgaatgataagtaatattttgctatgttgatcttgagattgatatgttgaaatggcagcatcctagaccaatcccaagtttaatgccttccttgaagttgccatgtttctgtttcggagtccttggtgccacaggtccctcttgactttcacaggccagggcttcttgccatacaggtaagtgttctcccttcccagcttatgggatccagactcatcagctgcccgctgtaggttgtccttaaaacttagagaatatgcagagagcatacacaattctgcttagaggaggagcactctccttttcctcttgtctcagttgtgatcttgtcttctttctctaatttccttttcctctattgaactttcaacaggcaaattctttggtctgcagagccaaaagaataattgtctttctttttaagttaatagtacttagatcattttgacagttgtcttatttattaccacttacacagaggcatttcttaatgttgaattcaaatgttgatttttagtgtcctagaccttgatattttctgatttgaataccctgagctgttgaccaaagcaacaatgaaatttataatttcttaacgggtgtgtgattcttgggatttctttcagaaaacaatacttccctgatgtaggaatgtatcacttaaagtaaaaaatgtttttaaaatttgaattatagaagagaataatcagtggatgattcacttcgtagaaaagttctttgctttaaaatgactcatcaagtgctattgggaacatttaaaatgttatttcaattgcacatactctttaggaagatacaagtttattgctttatatgtgtgtatcactgataaaaggtattttcatatatttaacaaaaatttaaagggaggaatggttaaatgactgtctaaggactcatacctctttagtgggcaaccaagtcttgaaccctagttaccagttgtcatgtttacttgtagaactaccatcacggccccaggggaacagcttaagaaagggataggaggaataaaatggaagcactctatagaataagtcttcatctgtactcctgatttaacaaattctgatattacccactgtgtttaggtttcagtgacaagttttcgtagcagttgcggctgcatttagctcttcacatcctcccaattctaaaactgcaaggtattgtaacgataatctgtcccatttcctcgtttttgaatgagaaaaccacagcctagagtagccattacttgccaaagctttttttcttagaagagaggggggatcttcagttatcttctagaatgtgacaaaattttgccaagatcatggtgcgtgctcactaaaagatgatgaagtttattgcctaaatctcaaattcagtcaagatgctacttaggccagcttttaaaatttgtataatagctagttttttatttaaatttttaaattgtgaaacagatcacaaattaaagagcacatataacatatatagtattacatatgcatatcatttaaaaatattttatatatagctatatatcttatgtatgttatttttactataagaataataataaaatataaaatgaacacacaggcatcaaccattgagtctaagaagtaaccattccacaatcttggaaagcccctgtgggtccctaatctgtctcaccccattccttgccctcagaggtaacctctgtgcactaccctcttgtggttagaagatggagctaggccgggctcggtggctcacgcctgtaatcccagcaytttgggagactgaggcgggtggatcacctgaggttggtagttcaagaccagcctgaccaacacggagaaaccccgtctctgctaaaaatacaaaaagccagacatggtggtgcatgcctgtaatctcagctacttgggaggctgaggcaggagaatcgcttgaacccaggaggcggaggttgtggtgagccgagatccaccattgcactccagcctgggcaacaagagtgaaactctgtctccaacaaaaaagaagatggagctacattactgctccggagccttgggcaagttattattctccctgtgcgtcagtttcctcatctgtataaaaggaatagyaatatatgtgttgtgaggactgaatgaggtcacccaggaagtgtgcttacaaaaatatgttgtgtagtcatcatcgtttactattcttgttactatcatcatgttcagttttacatttgaaggacttgtaatgttgccaacaagatggagtttgagggactaaaattgattttaagaataataatgttgttgttcctttttcaaatcttttaacatggaaacattctgatttgrttgggggggggrgcttttgacatcatctgtttcaccttatcactgtgtactttcaaaatatcttcaagatgctttcattgargcaacaagaaaattgttttgaacaaagaccctttagygtcagtcactatttcagaatataacaccagtcattgtttatatgatttactcttaataggattttgatattctgctgtgtaacgttgctgctgactgaatgtctttgaagacagtaaaatttgaccgactacaaaatattacttcatttttggggggtttagtctgtttggtaaggttactaaagagtacttctaaaagtatgagaggataaaggattgagatataagagaaaagttgacaaaatcagaaaactgtgcaatgaggtaatgagtaaccaaaacttgctatcttatcagtactgagaactgcagaaaaatttcttacttggagatttgtgcttttctttgagtattcataaataagagtgaaaaacaataatcacttttctcagtaaaagaaaacaaccttatacttgaggacttttgtttcaaagttggtaaggctttggatactaatataaaattcaccagtaaagtattttgaaactcttaatgccacctgtgcttctgaattcatatgaagattattgtttgagacctctgtggtgacatggacatcacacttgaggggtgagacatatcttcaccttctttacacactggctcatcttctatttagttgatactattgttcctcaataaaattatttttctctctattgatattattttcaagttgacttctagtcagcaactctgtaagtatctttttattggcttttagattctgtattttaaatgagccagcaatatttcaatttcattgagattgcattatatcattttgaaaacttatttgcctgtgattaaatttttgaacaatgtctgggatctaaaaactcacttgaaaatcattttttaaatcaaatttttttaaaaaagtgttacaattatagcaagtcatcatggaaaaataaagtaatatgggtatgtataatatgccttctaaacctctaagcatctggaagcagagatccatgttctgtgaatgacctactaatcttcttaatgagttcatagcaaggcatgtggtatttgcgatagaaaagactcagtaaaagctgtcttccattcagtttttgaaaagtgaatggatrccagtttatgttatttcctatagtgcctatcttaaactgatttttttttttttacttgctgaatctcatttcatgtcaatatgagttttgtattggtaatatagtgtttgtaattgatgatgtagccaactcctttattgaagtaaactgtgaagctaataaaacatcttcatgttttaaggccattaggagacatttttttctgtgtgtgtgtgtgtgtgtgtgtgtgtgtgtgtgtgtgtgtgtttgagaccaagtctcactcttgtcccccaggctggagtgcaatggcgcgatctcggctcactgcaacctccgcctcccaggttcaagcaattctccggcctcagcctcccgagtagctaggattacaggcgcctgctgccatgcccggctgatttttgtatttttagtaaagagggggtttcaccatgttggccaggctggtctccaactcctgagctcaggtgatctgcctgcctcggattacaggggtgagccactgtgcccggccgtgtttttttgttttgtttttgtttgtttgttttttaacataatgaatactacaacagaaacataattaaatagcttctaaacatttgagaagatgaatggatcactcgtttctaaatggatagccaggagagttagttaagtatttctgatcttatagtgaatgataatgtttgtacaacctaatagttgccccttttcctttctttttcttctctaatartaatagcaaaaacattgtttctggcattcagtgagtgccagataaatagaaaggctatgagcttgatgcacagtttcttttctttttcctgggtcctctctcctcccaacctacatttcttggcatctttccgctgtctgtttgttagagttctgactctgacgtcaaggactcacagtgagtgacccccgtggcaaacctgtaaaacattatacaacatgaataagaactttcttattagatctgcagctggctgagtacagacatatggcagcaaggatgttttggaagaaaggcattgcttgacaaagaacccagtctcttgaataaaggtttatactggcactctttgatgtttataatacccgatgccaggggcaaaacttttttccccccattatattgttattttactgtttaaaccccatcattttatatgttgcggtggctaaaatgtagaagcagacattttatgtgtgtctgtataactttaaaaggaaaaaaaaaaaaaagcaaaactcaaaaaactttctcaggctctgtctacccggctgtaagtgttcgattttctgaggctgagactcagattgaaagtgagggagtttgtaagaatgggcccagtccttttgagcaggttttaaaaggatgattaaagggtacataggctttgtaatgccctgacaactttaattgtttcttttggtggttgtcctttttatcgtgagtagttgttctcagttgctaaaaatttaggctgggaataatttccaacctaggaggttgtcacactgatttgcatttggtttgttatttcttagtcttttcaatgcagccctgctttcatcttactccctttctcaaaccccagctactgacattatgtacatggttgtgttttgtgatctgtgctagcacactggtgttgaataatatattgtgaaatattctgatggtgacaattcggtagttgccccaggaggaatgatgacactttgaatcagaggcacaaggacagagaagttcaacctagtggagagccaaggtaaatgaatgaaagcttctgcctccacaaggaatatctaagtccttttagcatggttctttgcaaccttgattatgtttataatgttcaaaatctttgatgaggccattgtcttcctagtacttactgcatctacaataatttagtcataagatattgataaataaggtatgcccattggacatgcctgatgggattttaattaacatctgcctttgacaactgaaacaactgaagggagggagaggtacatgacttttgcagagcacatattatgacagacgctaggggtataacatctagcaaataggtacttgatgacatttttatgaatactatgatttatcaaaataagtatatcctgagaagtatatatttatagatgaaacrgtatttacagagaatagactctagtttagagaaactgaagagcattagtaaaagtgttaataagaataatattttaagtactatgagggacttttttcctggtttttaggttttcatgttaaaaattcatgagcaggacagatatgtttgtcttgttgattttatctctataacgggaattcaaattttaaatatgttctagaatcatgaaagtcatggctagaaaggtcttggagattatctaattgaggagtcccaaatctctaaataaaatctaccagaagaatcataggtcaattactacatgtataattgttccaaataggtttttccagaaagtgcagaaggtagcacagtcctcaccaagttctttcattcagcaagtgctatcaataccacttaccaagcatatattttacttggagaaaatgaaaattgctccatccataattggttgagagcccctttaggtataataataatcttccctattatgtagttgagaaaactgagacccatatactaagagttgaattgtgttttccccaaaagatatgttgatatcctaagccctaacacctcagaatgttaccttatttggaaatagggtctttgcagaggtaaccaagttaaaatgaagtcattatggtgggtcctaattcaacatgactggtatcattataaaaaagagaaatttggacacagacacccctggagggcagatggccatctgaagacagagaattctaatgatgcatctacaagccaaggaaccccaagaattgccagcaaaccaaacagaagccagggagaggcaaggattcttctcttacagatgtgagagagcataggcctgttgacatctagatttcagacttccagcctctagaactgtgagataataaattactgttgttctaaaccactgaatttgtttacctagttatgacagctctagcaaactaatacatcatagatattagtagtcatggtctcctggagaagtaattagcaaggtagtcaagtctggaacccagtttaattcccaggttcagtgctcaatgcctgtctctagaaataaaactttttaatttcttttgctgtaaagataaatgcaccgtaattcacaaattgttatgaggactatttttctgttgtccatttttttggttatctttttactgacttatttcatttataacacaatcttgaagtctgataatttcaggtacagacttcatttattaaaataaaaactcaaacttgaggagacgaaagttattcgatcatttctttcacttcccacagttggttaatgaaatctggagaataatataattgttatatctttttctttgcttagcgtaaacactcaaactataagttatagctgataacactcaaattataacttataagctgtaccataattcatagtagtcaatgaattagtcagctaaacttgaacatattactacaacttatgggcatacccaactccagatagtagaaataagactcagagtatacatttcatgagataaatctaatgtgagtatccaataatagattcaaatatttttcaagaattgactatgagtctgtgaatatatattaatgactatacaatacttttttttttttttttaagagatggggtctcactgtgtaactcaggctggactctagctcctgagctcaaatgattttcccactcttagctcagccacactctgcgtagctggaactataggtgtatgccatcacgcctagcttaaaatatattttattaagaattggtgctatggaaaagtattgcttcaaccatttcccccttttcaagctaaaattaattagtaatttaaaaagagacatgaacatcaacaaattaaacaatggaacaaggatcattcaagtcctcctataggcctcttgatctgtacattaattggaataatggtctgttctttttgtagaaattaatcatgttcttaaacacctccatkcagtgtaagttctgactgtttaattaaaactttatagtaagctcaaactgggatcctgaaaatgaaaagatattttttgttatctggttcaggtttttgttaggatgagcactctcccttatgataatccagaggtctgctcctttgaaatgtcaccccaaagtaggttgcttgaagttcccagaggctaagagggttccccctatcaggacatagttatgacacctacacagctcccctcttagcttcatccctcttagaagagtttctatttatcttcatattctgagacgaaattgttccatttattctactaacctcagcaaaagctggttatgttaaaaacaaacaaaccaaaaaacctaactgcatctaggtaaacattttcccatatttgttcttgcaagatggctgataaggcattataagtggtgatccctttattccatcattacaggaaaaaataatgtttatttgatgtgaaggggaaaaattaaaattaaagataattctatacttcggatacttgaccatattaaatttacaaaatgtatagttgagttttaaaatcacaatataagtagatttcttctactcacaatcattatattagataagaaggtactcctcttgatctctcctttgctccatcataaaatccttactagatgggtaagacggtagttgtgataagacagtagtagcctatcctgtcttatacgtttctgtgaagcccagagaggtgacatgaatttctgaaggttgcagaactgagacttaaaacttagtgtgaaatttattctgttggaaaaaaaaattgcactgtaactatttctttgaactttgggaagtatatccttattagagaattacagtgtcaagacattgcgctattattaaacaaatgataccactattttgacaagagtggtactttccaaaatacctaagaagttaattgaagacttggaattatcagaggatttattttatgttgaaaattctgacttatttttaaattgtttattccatctcataaacttctatttgttatttaattttaggaactttgaaataaaagtttttttttttaatatatcttatgtcctgtgtgcaagtctaatggatagatctgtaccttgaagttccaacttctgccctcagagatgaaagtgacaaacagcaaaatatggagcagatacattgaaaactttaagaaacttaatttttatttagtttgtgcttatttactaatatgttctctgaatgcaaagtaagtatacatgtagagtcatctttatgaaaagctatataaagagctataaataaaagggatagataggtaagacaaaaaaaggcacactgacaaaatctgcggtaagaaatataatgagttagattctaggcatttgtcttatttaacatggagtaatttgtggatatatatatattgtgtgggtatttgaaatttatgtagttattttaaatcatgtaatttatttatgcaattattttatatttatgttaacttatttatgtaatgattttacatttattaagctgacgattatggtatatggaacttaaaggtataaatatacccatttatggtatatggaactgaaaggaataaatctatccatttaccaatcagtctgagagattctctggtttcttacaaatacagattggcaacaccgatgtggttaaacatgacaggcaaataactaccattcaatgtgaatattagcaatactgacaagagaaataacatttgggttgaatagatacatttatgtcaggtttttgtgtattagtttctctctctttttttttttttttttgagacggagtctcgctctgtcacccaggctggagtgcagtggcgcgatctcggctcactgcaagctccgcctcccgggttcacgccattctcctgcctcagcctcccgagagctgggactacaggcgcccgnnnnnnnnnnnnnnnnnnnnnnnnnnnnnnnnnnnnnnnnnnnnnnnnnnnnnnnnnnnnnnnnnnnnnnatattaagcgtcccatgctatattgagataactttcaaacataatacaattatggtagtaataataatttggaacttcaactatactacttgacattttagcatttatgtaattaattagttaactaacttgtaggtgccaggcacagctaggcctaccattaaggagtttgcatttttttcaagatagttatttatagtacagtatgaaaagtacacaaattttgagcagtattttccttttttcatggcttcccttattcaacttctttaagtaagtaaaattccacctcagaaatggttatccatgttccctatctcctccattcctattgtctctgccttgactcaagacctccttatctcttgcctggattatagaactgtgtcataacaggtctttctgcttggagttacccaccttcacttgaccacaatctgtgatacccagtttctttttctttttttttttttttgttttgagacgtggtctcgtcctgtcacccaggctggagtgcagtggcgccatttcggctcactgcaagctccgcctcccgggttcccgccattctcctgcctcagcctcccgagtagctgggagtacaggcgccaccaccacacccagctaatttttcgtatttttagtagagatggggtttcaccgtgttagccaggatggtctcgatctcctgacctcatgatccgccccgcccccctttggactcccaaagtgctgggattacargcatgagccaccgcgcccggcccccactttcttacactgtatctttctaaagaataagtctgaacaaagtagtgactattttaaaccaatagtatacatttactaaattcttagcctgcctttcaaaattacattcagatttttccaccattttctttttagtgcatcttaagtacaggtcatccgtgcgcccgtcttttttctgagcaaatcacctgtgtactttcacattcttagcatctgccaggggtgttccatatacctggcatgatcctccagcccccactacccgacctactttatttcttcctggtaaaaccctcttcaaccttcaagccacacgttatgcagcctttcctcgcactgagaaacagatactttaagggttatgatatttattatattgtaattatttacatgttttgtttccctctagagaatgagagttcctccaaggtggagactcattcagcttttcgtctctcttacataacctktgcctggcaggttgtaggtacccagtgattattgaattagttaatatacgcaatatggatttgcttgtcagagcatgagtatccatggctttctgaagtccttcaacctttgcttgtgctacttcctctattttggtcctcttcaataggcgaggtgattatgatctacctctaatgggtcacagtgaccccaaaggcaaagcaatatattgatctcccttaaaaggatgtatgccacgaaataagtgtttttatcttctcatccatattcacatttatactttaagtgcaatgtcctgagtgagacaaaccttcacactaatctgtgtaattaaaaatattgaaatctcattgcttggcaaccactctagacctttggacacattttctggcgctgttaagggggctcaggctgcaattgagatatagattacctatttaaaggaatcatatttttcccctttgaaatgtctgtcctttatctccttttgatggattttctaatttattaggctttgcttttttgggaagtaaattatacctgttgacacagttgcatcctcatgcaaaaacaaagatgatatcattaatattttatggcttaatcattaaatgtgaaagggtgaaatgcttgtattgcaattgaaatgaatcttgaattgaccaggtctttctctgtgggaataaaaagagaataggtatgaactttaataaaaaatggtgtttaactctacatttagcagaggtcttctaagtaattttgccatcagttttcttcccacaaattctcccattacataaataatctgctattatgttgatagactcatctttctgaaatatagacatgttcatataattcatagtttgaagtgtctgatgtctcctcttgcctttaaagaataccctgaactcttaaacttcacgtataaggttccatctgtcttgaccccaatctacctaggatttctcctcatccctggtaatctatacataccttaaaacccaactcaagcattacatgctttctttagctcagttttcactgatgccccagcctcttagggaagaattcattgtttccgtatttgtgaattatagcacctacccattcatatgtggaggaataaaatgtagagagtaagagttagtgtttcaaaggcagaccttctggctgtttgcattctgtctgtgggaccttcagaggattccacggagtaaaagcactctatgtgtcccagttctatcatttatgagagaggggaaataatactgctccagaaggttattttgaggatttttaaaataatgcatgaacagtacttagtacatgcctggtacacagtaaggactcaaccactaataaaaaaaatgttttgtgtgcttacattttgttttgatatgcttacatatttttcttccctattaaaatgagatggccagaattctgtcttcgttgtacaggcagcatccaacagctctcagcatataatattggatatgtgattattaatatatgtaaagggtaacatattggtcaaaacattaattatttggagaattattcgattaataaaatatgttttatacatattaatgctgaaatctctgctcaagtgttttaagaggggatttactcacagaaaataaaggaaaatgaaagctactaggtgaactatagtttaaaataacaaatccaaaaatgttagatattgcatctcttcagtggagtattatgcctggagccaattttgaaataaaaacaatgtaagtacttacaaaatctccatttggttcagactctgcaggtggaactaatgtaagtggaaagattcctaaataattccaaagtcactatgaataggaataatgatcatcatacatatacttatcacttctattagaaataagccatgcttatacatattgtttaatatagccaaaatatcttacacataaagaagttagttataattccctactctattcctcaatatttttaacagtgcttctcaaatttaaatagggatgacaagactgatgtttatcaggttttcctcaaggagatcctttactgtgaggtgtgtgtgtgtgtgtgcatagaggtattattgaaatatgattcacataccatgtgatttatccacttaaagtatacaattcattgttttttagtatattcacaaagttatggagctatcgccactaatccagaacattttcatcatgtcccctaaaacacctatgcctgttaacagccacttctcatttcacctacctctctactacttccaggcttaatcaatgactaatctattttctatctttatagatttgcctattccagacttttcttataaaagtaatcaaaatatttgcagtcttttgtaattaccatctttcacttakcataatgttttgaaggtttatccatggtgaagtatgtatcagtactacttcatttctttttgttgccaaataatattccattgtatggatataccatttttgtttatccattgattagttagtagacattttagttgtttttgctttttggctattatgaataatgctgctatgaacatttgtgttcaaatttttgtgtggatatttgttttcatttctctggaatatacatctagaagtgaaattgctggatcatatggtaaatccttgtttataagtttgagaaactgtcaaatggttttccaaagtgaatgcatcactttgcatttccactagcaaattataaaggtcctcatttctccacatcctcaacaacacttgttattttctatgtgtgtgttttaaaaatggtttttatagccatactgatgggtataagatggtatctcactgtggtcttgatttgcatgtccacagtagctaatgttgagcatcttctcatgtacttgatgaccatttgtatgtcttctttggagaaatgtctatttaatcctgtgcccatttttcagttagattattttcttttcattattgaagtttaagagttctgtatttcatatacaagctttctggtataagtctcatatcagatttatgatttgacaatattttctctcagtccttgtattgtcttttcactttcttaatgccattgttgtgtgtgcttatttttaaaacaaaatctgatgacagattattctaaaggctagattttaaggttgatatttgttttcatgatgcatctactattatttattttcgtattttctgaaattattagttttttaattacagctataacattttgaacaataaaattcttaattttagtgttttccaaaccgtgctctgtggtacacaagatgctccatgactaaggtagattgagagatgttgtttgctttatttcttactctgagcacacaatattaaaggccatatgatattctattttaaaaataacatgtctagcccagcatttccaaaagccgttttaatctttttccctgaaacagctattaaacccaagttctgtaatatatacttcagaaatattgttttaatctattctctgaactagttttacctggcttgtaggactatctgcctttgttcttaaaaaaaaaaaaaaaaacttgtgagagtctttttaaaattctatagtcagatctatgacaacaaaagagactgagacawccacaagttatttctaccatgtttgtttaactcaggagattgaatttgatgtgttatatacatggtatgaaccaaacgcataatagaaattgggtcttctctaccaatcagatagttagaaagatatgcttttacttcagagaaaattcaaagtcagctaaagtgtgtaggtctgtttcttttcaatttccagggccttttccattatgtatttgctgcctaccattattgctactattccatgaaaaatcgcactctgtgtgtgtgtgtttagatttgtatatgtctgctcaaatagagcttaatggtgacatttttatggcttcaggatgttggggtggagggaattatcttcccctcatggtcgctttgtgtcagatgatcattgcttcatctctagaatcctatattgcttctggacagggaaaataggaaggcagaaaggcaaaagagacaagctagctgagttttcccctttttaaagactttccttagaagcttcacacagtgacttctgcccgtatctcattaaccaggactgtgttccatgatctcctgatctgtaagggagttaaggttgggggaaatagtttcctagctggacccattgccatctctatgagaaccagggttctgtgaataaggaagaagaatacgacgtattataggatggacaactagcatttttgtcacacaaggcatgggatgacagaaaattctgagagtgaagagctaaaaattctttactacttgtgtattcaacagtagaattttaaaaatcaactccttattgtagcctaaaccacctgggttcaagcaatcctcctgcctcagcctcccaaatagctgggactataggtgtgtgtcatcaggcctggctaatttctaaaattttttgtagacgtgagatcccactacattgtccgggctggtcttgaactcctggactcaagcgatcctctggctttggcttcccaaaatgttgagattacaagtgtgaaccaccacacctagccttattttttttttttcctggacaacaccaatcagttattctttttaaaaagcatgtattgaatcccttaacacgtgccaattatattccacatagcaaataagatccataaggtttctgctatcctgaaacttactttctaaaatggaagatagacaaaagcaagtaccggttgagaatcccttatctaaaagggaccaaaactgtttggagtttggaatttttcagatgttcaaatatttgcatatacataatgaaatgtcttggggatgggacccacgtctaaaacacaaaatttatttatgttttatgtctaccttatacacatagcctaaaggtaattttatacattttttaaattttctttataaaacaaagtttgtgtacattgaaccatcagaaagccaagatgccactatcttagccacccatatgggcatcctgtggcaaaaaaagtttcagatcttggagcattttggatttttggactaaggatgctcgaactgtaatgaaataattacacaaggttatttcagattgcagtaaatgcaggaaacacacttggtcatatgctgaagagtgacaagagaagatgagggtaagactggccacttttgttcacttaataaaacccagcacctaataccatgcttggtgcaggataggtgctcagtaaacgtttgtgttggatgaatggatagatggatggatggatgatcagtcacagaaagtgtcctgaggaagtgttayttgaagtgacacccgaagaatgaaaatgagctgacaatgctaagaaaatgggaaaatgtattctaggcaagatgaacggcatccaaacctttaggttatatcagtgaaatcaaatttaattctaaaacaaatgagaagccattgaaaggtgttacattgattatctcatctgggcttcacaaaaattacgtgaagtaggtagtcttattatttccattttgcaaatgaggaaacttaacctagaaattataaaatatccagattcacagagctggtaagaatgaaattgggatttgattataagaaattcagctcgagtccacccttaaccactgtgcaatgttgtaaactataaaagtaaactgtaacaggactagattgtttaaacagcaagtaaaagcctgaaaagaagatatctgccaatttaatggattcaatttttaaccacattgtctattagtgactcttatgaattgaatacatagcacagtttctcagagcctccactgaccatctttctctttcaaagtaaaaattgtctttgtatattacattatggactggattattataaaagatctagtttctggttctaatgaacgctgaaatatggaattgctaaaaagtaaatttagttagaataacaatagcttgatagaggaaaatcattacaaactcaagcggagaattccagtttagctatgcccttgaagttgttattatactttgcatataatttattgattctgaaaagttggatttgccatcttctgagaatattatcttgggcatatggggcacaccctgcaaccagaaacagcacaggaatagtcattccttcatgacaacttctacgaaagtgtaaattgaggctaacaggraaatcaccctattactcctgtaaagtgacgatagctttcagttttcaaatgcgactttctgatcatgtttgaatgtgtttctgttcatgtttatggagaaatttaagaattagaattgtgattcttaattctaattcttaaatttctccacaagtaataggaaactaaagaatttttctgtggtaatttcattaggaaaactttggctaggacatggtgataatgtgcagatattttgtttgccatgtcacattcttccccttcttttctggaatgcaatcaatggtgaaacatgttttacggtaaaacatttaatactccaaattgtgaataaagcaaagagaatgtgtttaatrtattttttaaatcatatactttctttaagaccctctcactcctaacataagctagagttttccgtttcaatatataatcaaaaaaccaagtatcctattaagtgtatattrttgactcaaattgacaaggacattggtaaccttccttttttttttttttttttttttttttttttttgagacagggtctccctctgttatccaggctggagtgcagtagtgcaatcgtagctcactatagcctcgaactcctgggctcaagcaatcctcttgcctcagcatctagaatagctaggactaccaggtgcacaacaccacacctggctaatttttaaaatattttttgtagagactgaggtctcactatgttgcccaggattgtctcaaactgctggcctcctcaactgatcctctcacctcagtctctcaaagtgctgggattacaggcacaagccaccatacctacccctctatttatttagtttttgccttcaatcaaggatacagtacatcgcatttgcttgaaatagaaaaaaagaatgagcaagtctctcggttcttgtacttgtggtaggaatagagacagagaagtacctggttaattatttctgcacctgcaattctaacgacctcagttaactacagttttaggtcatactttactcttcctttttttctatttcttcctttttccttgccacatcatctattccactttattttcttttattcctaaatagaggtctgcataatatatcactaagaggaatacatttgcaataaaacttttttctgcaaaaaaagcattggttttattgtaaacaaacctctgaaattactttcaacatatcaaatgggtcatggacccgtgaagaattgagggggaaggtcaaatttaggggcagagatgtactgtaaacttagtcaaaagaatatcttcaagtcttataataaattactttcttcagcatttaagaacttgaacacaaaatgcacatgtcttgttaaaatctaattgaaagtggaactaaagtaatttttggcacaaatcggctttagaggacaaataagaaagccaagggtcgcgtaatggggctagtatatattgtagtccgtctatgcttttctcaacaacctcccaaagtctagctgattggggagtaagaaataagtagcagggaaaatgtttggaattttgtcttttgctgaaggtttcttggcacttatgaaaacttcattgaatgaaataagactttaaaaattttgtaaaagactttttggaaaaacgtaactttcacattaaaattatataaaaaccaattcagtatttttctcatttataagacttaaaaatgaattcaatgttttaagtcacaccaattactgagatatattttttaaaattacctatttatcaattttaaagaccatttctaaaaaaggagtttaagtagagaatattcctttgagttagatagtttttggtatacgtaacagcatacacacacacacacacatacacttttaattttcttggacttatatattttaggcccataaatgtaaaccatttggatatcaaagcaatgtttatgtttttcagcacgtaattttaatgctacagtctgagaaattgtatgttgtttaaatgcaatacatcacaatgtttgataaataaaaataaaaaccgttaaacctatccaaatgcaagaactcmtaaatattgttgagttaaagcttttgatgcagctgaggctatgtctggattttattattttccctaggatttccaattttttctaagaaaggagatcaattttatagattagtctcctgaagttgtgccagtgggttcgtctgagttttaataattttctgtagaaaatagccttgaatgtgtcttttcacggggcatggtatgaatgaaacctaaatatatagggaaacagagatattagcatgatccagtcataaaacaacaggtgaagagctagaaataataaatgaggcctttattttattttttatttcctactcatttactcaaattgacataaataatgcaagaggtagtttgacaaactgtacaatacagatttatagtcacattaattggtgcttaggggtttgggtttcacctgaagttaagttcatatagttaataaagtcataatgccttgtttaaatatttcatgagaaaattgcattttgttttgtctactcagaacctaaaatctgttttattgtggttattttataaatatttgcatggaatttttggagtaagtttatttggtttgtttgttttttttttaaacaggcctaactatcaattgcattggaaatttgattgtgtttccaactaacaaataataatacacctggaagtgcaagtcctttccatattgaacagactctctctagcttttccttagctgatcttttcaaacgtttgctatttgggcctctctggccccaaagagtagccttttgctactctttacgcttgaggaagattaagctatcccaggcctctcataaccaaggggatccattaatattaaaatttagatttttccactgttaatgcagaaaaccattgattcagtagacttcatggtcatgcacatgcgttacatgttactctgagtaatgctgcatgaagttttaattacagattgatcaaattctataaattgtgttttggcgtggccaaggaatgggtttttcctattctagtttaatagaaagtcataatatatatcatgtgaattttacgtttctcaatgaattagattgcaacaatgcctaagtttgattatatacttattaatagtgataacaattatagctcacatttagtaagtccttactatgtaccaggtatataaggctttttaaacctaatgattcatttaatgcttacaaaaccatacaaattggatgctattattagctaagtcatggagacatgaaactgaggcacaaagacattatataacttgtcaagatcaagtatctggtaagactgaatatcaagtcagaattgggatttgaaccagtctggactctagagctaacatgcataacatatagcctacactttttaattattcagaaggtacttcaagactcctgtggtgcctttgggttggcagtttcagtattttttatgcttacatagagcataagatatataaatataaaacattatatataatatatattcaaatatatattttatatgtgtatatatatttccctaataaatattgaaagaatgcacacatgaatgagtggatgggtgaatacagaaatgaaaaatttgtattgagatgtgctaatagagaatttggtataactaaacatctgatatataatttatattttgaggtaactctttagccaacattttaaartatgattaatttatagtacttacgaaggattttcagagacattacatttttctgttatttcactgttttaaacaagatggagattagagggtggaaaatggattctggagaaataaacccatcatattaactataaccatgagttccttgaagacaaatcaaatctgatgtcttttctttytccttatgaatatacttcagtacgaaggacctgatacttagtttggacccagtaattatttattgttgtaagtagcacagtaagaataaaaacgtttatgatttgcaaccagccaacctatattttaatccatatttaaccactggctgggttatgttacatttctcctctcttaactcatttccatatccataaaatatggagcatatgcctctatggtttcttggtgatgaaattatgtattaaaaattataaaactgtaaaaaatatatctcaaaatgtgtttgtgttccatggaaaactgtaaatctctcttgaaacaaaaaagtttctataatcacatacttctagaaatatttcatctgagttcctttaaaacttcctcaagctttaacatgctaacaggtactgggactatccaaggagggatgatattttgcagaatttcacaagcttattttactttattaccatttttcataaaatacctcacaggaaaacttaagcatgagactgatgtgattacattattattaatagtctccaaaattcaaattagcaatagaagttgtaaaaatttcaagtaatcaggataaaccagatgtattaaatgaaaataatggaagctttgtaagattagtggcagcatataggtttagaggaattattatcattgtgataacagggacagatacagaattatggaaacattctaaagcagtatataggaagatcattatcagaaatagatagagaaattgtagtagagaggctagaatttcaaactccagaatatctgaatttgcctctatctgaagccttctcattcccagtgcttatgaaatttacactggctgctatattgaaatgctaagaatcagaatcagggatttagtatcaatcaagtggatggaatttagctagttatcaccaactgtgaaaggaaaaatatccgttaaattcagtcacaatgctatatatcaggctctcagtgattttttaaaggagggtcaattttaagaattctaaggaatctctttgttcctgctaatttgtcygaaggtttacgaggaatacaggagaaagctaaattgtttggggaacagtaagagatttagattctgagaaagatcctggaggaaaagctggggccagtatgctgaaaaagacacagtcctcttgccctaccccaagagtaaagggcaagaggtagtggctgccaaaaaaaaaaaaaacaaaacaaaacaaaacaaaaaaacctgaaaaaacaaaaaagttttgtggagagatatcgaatggatatttatatggctttttgctgtattttgtataatgtaatgatgtcctcttgtctccccatgaaatcgtcagtgaaatcaacatcacttgctaatacattgtagagtgggattgatttgaggagcggggagatgtgatgaagtagctgtaatagaggtattgtgtttatgagactgtggctgctagtcacatctgttttacccacacgaggctgatgtggtcttctagtttgtaaattatgatatgcaggcggttcctgccagcagagatttaaaaaaaattatgcaggtgggtaagtctttttcagcaccacctgtattaggtctttctagatcccaaatcccagtattgacgactggagggctgataaacagtatatggcaaccccaggaattctgttagcttctttggcctaagccccggaccaaatgcagacttccactcttacttttctgaagagtgcaaggtaattttgacattcttactccgttaataagaagagacccaggaaaggaccaccaaaaaaaaaaaagaacaatttcccaaaatgactagacaggtgctgagactggcctaaactatcagagatcttcccaatccagagcactgacctctgctagagcctgcagtcaggggagacatacagttcaggctcatcttctcacatggaatgctgcagagagcaaatataggtagcatagaaattaaggaaaaagagtatgccaaggaargaatccaatcaaacatgcccaggttaaagaagtgcttttagtttcttatcaaatcaaaaaccgtgtgctcatcagagtaaatgtggttctaaaaggcaacccctgctctcatgcattttgtgactcttgaaaaacaaaacccatatgtaaagggacaataaaattgtactatttagtatgactaatataagggtgtctttgtggcatgtggtgcatattctataaattcttgttgtattgaatggaattaartaagagtttggggacagaagaatccctggtgtattagtatttccctagataattttttcttgtaattttgaattaatgaagctaataattaacttgtagaccaattttatactaaaggaaaatagtaaataccaaatatatagctatgatcacaaagatccaatccctttttaaatttaacatagagatgctttgctgctcctaaggtaccattcctgctcccgcctcagagcctttacatcttctatttcctctgtctggcatgcatttcccccaggtttgtgtgtctggctctttatacaattatctgataaaatgtcacttttttcagaaaggactttttcgatctactgtacttatataaacttacctctgcttccagcccctaccatccattacccccacttgttctcccttcgtttattctattctaagcttctttatagctttatcatcacctggtatactatgtttctgtgtttrtcttcttccttcactaaaatataatagccaggaggcagagatacatcttgttttgttcaatggcatacagtttgtgcctagaacagtgctttgcacataatatgcatacaatacatatttacttaatgagtacatgatgaaatagaaagtggactgtgtggtaacctttacatccttatatgtatattagttttatatgtcttcagaaatatgttttagccatcttcagctgctgtaaaagaatagttttcttgagagtagtgcaaagataactgtggtgactattactttccatcgttatcctctttttttcatatctaaaacttctcacctctttaaggtacacacaaataataattttttatttcccatctagttacagtcctccttcagctttcatccctttagtaatagttgtggtgaattttttctcccgagaagcycctaaaaaggcgttcatttttacgtaaacaaacaacaggagaaaaacatataaacatgaaagcaaaatattttacctacagaaatatattttcagcaatctatttctcatgctattgttaaaaatatctctrcttggatagaacctttttgtttccatgctgacttcttctttgcttctcctgtgaactttttaaattctgtgtttggcagcagttttgttttccttggagctaagtactgtgtaacatactgttagctgaaggctgtgatgtagaaatttattattaaaaataaaagacggagagaagaatttattccataaggatcaaaatgacttagtgtcaaagcagttaggattttcaaaatgctttctataacagattgtgtttcttttcaaggaagtttactttgtttgccaggaataaatttaagggtcttcattgtgcctatcttggttaatgagaactgagaagagaagaaacattctcttttaaaaaaaattttttttagagaatttcttcatcagacggaragattttatttgccatttgcaggcataaccttggtgacctatatatccccagaccttctggtaagatgcttattaaaatgtcattacccagaggagtaatcataaactagccagagggtattttttatagatggtgagagacaaacattttttttctccctgaattaagtagttatgtactcttatcaactagaatatatttaaacttacttttatttatttttccagtctcaatctctccctctctgttttatgtttctagcaactttatgtaactaatcttaaaatcattagcattccttctccaaaaagagtatcatatcatcttaataaagtttctcttttcccagaattgcttaagtagcatgctgctattcatttctcttgaaaktttagtcaaaatgaattattttgcaaaaaggaaaattccacagtttctatttcttttcctcattgtctgtggcccattaacgtcttttatctgctactatgataatgtcaaatgattactttggtcatctgcaacttaacactaatcttatctgtttaattgaaaggatgttttgactttctctttgaaataatatcaacatcattttgcacttaattctgaaattcattgacctcaatgtgcaagctgtcttctttactatttattgtgaataaccatttttttttatttgttgtaatcacacatcargaaagggctagggagatgtctttgtgaaacatttatccctatggttctgtttaataggagtacttaccagtagctaaatgcctcattttattttaaataatctgtaatattaagtcagtttatcacactatgagtagttttttttaatggattctgacaatatgctgcttattgtagtctttcatcctttatctgagaacwatgtttttatgacagtaaaatattttttatacaaataggataaaaattcatatgctgtcatgcgctaatatgaagtttatccttacatctcccactctccaccccatgccccatctagtggccagaatgctgtaatcgtgggaaggaataaagctctgacactatgcagtccctacccccatcattgcctctttctttgcattaaaaaaaaaaaaaagaaaatacactgaaataataaatgctaaattttggctcagattattttaattagaaatggaagtttaatgataaacactttgtattcttcaaatccaaaaggagaaatatcctgtttacttcctttggtgctcttattgactgtagaacattacagtatctcatttgtcatatgcagagttcattctttttgaatatatttcacataggatgtagatttctgtaacattttttattactttgaaaaaagtagccatagtgtacattttaaaatactaccacattcttggtcagctcatacctttcaaatataatataaagatgatattaatatataaataagaatggaaaagaatttctttgccctgcatatttctcagtttgttatataatgctaggaaataactctctgatacataacacacttggcaaattttactgttttatgctttaaaagaaaaagtcaaatttagatagtgaattttttgaaatgcatcttacaagctctgatttgcaaattaccaaattgatcttatcttctggagtaaatgatgacccaaattagtctacattttgagtgtttttgttctttgactaaaatcgtcatcgttaagataattaatggcagaaggcagtgaattacatgctttcctcattttaattctggtcctacaaaaatgtttcctttttgacttactgtcatcatgaaatattctctcttaaatcaatatattgtggattataacttgtgtttgtaagatttatttacctcttttagttgtgataggagaatttaccaccttattttgatcctgttagtttaaactcattagcaaggaggataacagtgttaatagtcagcattttgtaaatcttccagaagattttgataaatcatttcactagaagcctattgctcaatttattgccactttaaagttgccaaaaataatgagctcatcttcctattttaatgtaaggtattgtcaatgtttgaaatgtgtcaagaattgtttttgatagttctagtgaacaactaatgtttctaaatcatactacttatttcattagttaattattgcttgtgaaccatattataatcatctttagtatcaataaatatttttgagatgatataatgccartaaatccataaattaaaaaattaaagcattaaagaaatayctactatgtaagcattcaattttatataatgattatctgggtcagtgtacccaaaattgtgtgctagccaaactacaattaaatcatcatgataattccaaggcttaaaacaattgactatgtctgttaaaaatgagtagcttaaaattcattaaattactttgttatgttttttacctattatactgtgaacatttcacatgttcttttttataaaggccttggaagccaaattttaattgctctatggtatcaytttgtataccgtaatctattgagtaatttcccttttgttggataaacaattagtagcacattatagttactggatttttagatcttagtttactggttcaaagggtatgaatttttaataatatatgtattatatatattttatatgtgtgtaaatatatatatacaatgtgtataaatatatatttgttatatagtagcaatatatatgcttagtttactccctgttttccaaatattcaacattattaatttgcaaatataataggcaatagtagtatcttgtcattgtttatattgaatttcttttacttccaataaagttaaatgtctttccatagatctatttattttgtaagttgttctcactcttccctcagttttttactagggttgggattctttcaaatttgtaagaacccttgatatcttgaagatattattctttacctaagtttactacagatattttaccaatgtgacatttgtgcaaatactctaaagttttatatagccagatcaatttgtcctcttttgtaataaaaaaaaaaagtctttaaaaaaagatttacggacaggattgacagattgatagctctttctcgattccgtgggtggtggtgcatggccgttcttagttggtggagcgatttgtctggttaattccgataacgaacgagactctggcatgctaactagttacgcgacccccgagcgggtctgcgcctgccacctgtgcgggggccggcaggaccccgacaagcagctcatgtgcgatgagtgcgacatggccttccacatctactgcctggacccgcccctcagcagtgttcccagcgaggacgagtggtactgccctgagtgccggaatgatgccagcgaggtggtactggcgggagagcggctgagagagagcaagaagaaggcgaagatggcctcggccacatcgtcctcacagcgggactgggacaagggcatggcctgtgtgggccgcaccaaggaatgtaccatcatcccgtccaaccactacggacccatcccggggatccccgtgggcaccatgtggcggttccgagtccaggtcagcgagtcgggtgtccatcggccccacgtggctggcatccatggccggagcaacgacggagcgtactccctagtcctggcggggggctacgaggatgacgtggaccatgggaattttttcacatacacgggtagtggtggtcgagagctttccggcaacaagaggaccgcggaacagtcttgtgatcagaaactcaccaacaccaacagggcgctggctctcaactgctttgctcccatcaatgaccaagaaggggccgaggccaaggactggcggtcggggaagccggtcagggtggtgcgcaatgtcaagggtggcaagaatagcaagtacgcccccgctgagggcaaccgctacgatggcatctacaaggttgtgaaatactggcccgagaaggggaagtccgggtttctcgtgtggcgctaccttctgcggagggacgatgatgagcccggcccttggacgaaggaggggaaggaccggatcaagaagctggggctgaccatgcagtatccagaaggctacctggaagccctggccaaccgagagcgagagaaggagaacagcaagagggaggaggaggagcagcaggaggggggcttcgcgtcccccaggacgggcaagggcaagtggaagcggaagtcggcaggaggtggcccgagcagggccgggtccccgcgccggacatccannnnnnnnnnnnnnnnnnnncgggtccccgcgccggacatccaagaaaaccaaggtggagccctacagtctcacggcccagcagagcagcctcatcagagaggacaagagcaacgccaagctgtggaatgaggtcctggcgtcactcaaggaccggccggcgagcggcagcccgttccagttgttcctgagtaaagtggaggagacgttccagtgtatctgctgtcacgagctggtgttccggcccatcacgaccgtgtgccagcacaacgtgtgcaaggactgcctggacagatcctttcgggcacaggtgttcagctgccctgcctgccgctacgacctgggccgcagctatgccatgcaggtgaaccagcctctgcagaccgtcctcaaccagctcttccccggctacggcaatggccggtgatctccaagcacttctcgacaggcgttttgctgaaaacgtgtcggagggctcgttcatcggcactgattttgttcttagtgggcttaacttaaacaggtagtgtttcctccgttccctaaaaaggtttgtcttcctttttttttttttatttttatttttcaaatctatacattttcaggaatttatgtattctggctaaaagttggacttctcagtattgtgtttagttctttgaaaacataaaagcctgcaatttctcgacaaaacaacacaagattttttaaagatggaatcagaaactacgtggtgtggaggctgttgannnnnnnnnnnnnnnnnnnnnnnnnnnnnnnnnnnnnnnnnnnnnnnnnnnnnnnnnnnnnnnnnnnnnnnnnnnnnnnnnnnnnnnnnnnnnnnnnnnnnnnnnnnnnnnnnnnnnnnnnnnnnnnnnnnnnnnnnnnnnnnnnnnnnnnnnnnnnnnnnnnnnnnnnnnnnnnnnnnnnnnnnnnnnnnnnnnnnnnnnnnnnnnnnnnnnnnnnnnnnnnnnnnnnnnnnnnnnnnnnnnnnnnnnnnnnnnnnnnnnnnnnnnnnnnnnnnnnnntgcaagtgcctttgattcgttccttctttctaaagacgacagtctttgttgttagcactgaattattgaaaatgtcaaccagattctagaaactgcggtcatccagttcttcctgacaccggatgggtgcttgggaaccgtttgagccttatagatcatttacattcaatttttttaactcagcaagtgagaacttacaagagggttttttttttaatttttttttctcttaatgaacacattttctaaatgaatttttttgtagttactgtatatgtaccaagaaagatataacgttagggtttggttgtttttgtttttgtattttttttttgaaagggtttgttaatttttctaattttaccaaagtttgcagcctatacctcaataaaacagggatattttaaatcacatacctgcagacaaactggagcaatgttatttttaaagggttttttttcacctccttattcttagattattaatgtattagggaagaatgagacaattttgtgtaggctttttctaaagtccagtactttgtccagattttagattctcagaataaatgtttttcacagataaaaataaaaaaataaaaaaaaataaaaaaagatttagatttatttaattttttttttatttcccaagataggttgagtatttacctggattttattctattttatatttacagttttgtctttttaaaaatttgtcttttaaatctataattaatattaccatttattataaggttaggctttaattattttttaccctcaaaagtctatttttctttttctttcttttttttttctttttttgtgagacagggtgtcactctgtcattcaggctggagtgcagcagcgcgatctcagctcactgcaatcttggcctttcaggttcaagcgattctcctgcctcaacctcccaagtagctgggattataggcgtgccccaccacgcccacctaatttttgtatttttagtagagaaggggtttcaccatgttggccaggctggtcatgaactcctttttttcattagttgaataattcatcaaatacaaaatatttttgatgttttcttgcttatattttgttagcacacatacgtatatttattccaaattatttcattcatttgcatttttaatgctaaaccattatccccaaatttggttaagttttataatatatcttaataaccagaaaggtattttcatcacttgtaacattttctaatggattcctttcttttgagatggagtctcactttgtctcccaggctggagtgcagtggcgtgcgatcttgggtcactgcaacctctgcctcccaggttcaagcaattcccccgcctcaacctcccaagtagctggggctacaggtgcacactaccacgcctggctaatttttgtacttttagtagagacagggttgacccgtctggtctcgaactcctcaccacaggaaatccgcccgccttggcttccctaaatactaggattacaggcataagccactgcgccccggcctctaatggattcttttttattgtatatacttgaggtgtacaacataatattttgatgtatatttacaatgtaaagtaattactaaggtcaagtaaattaacatcgatcgtctctcatagttttaactttgtgtttggtgaaatcaccgaaaatctaccctcttagcaaacttcagcacactgtataacatcatgaggtatagttctcatattctgcgttgtatcgctacacttattcatctgacataactgattatatatgtttatactctccaatgaaatttatattctttcaaaattaaaaatactgttagcttttgattgaaatctagttaaacctgaaatctagttaaatttgtttgagtagaattgagcactcaatagtttatagaattaagtcttctttaccagtagcactgtatgtcttcagtaaacttttaccattttctgtatatggttatcaaacatttcttgataatattcaaaggcatattatttttgttgctattgtgaacagttgtttgttgttaagtctacttaggagtcattgctgctatacagaaaagctaataacgtacataaattcatttatagtccatcttattggtgtgctagcttattagttgtaaatacttcttcagctggtactgatgactaataagattactgacagatgaatggagtttcatttctctgagtcaatatcttttatttccttaatattcttaatgttaaatgttattttcaataagtaaatattcttctttgtaagcaaggtagctcagggctattaccaccataggaataacgtgatgatattttataggttattattaaaaatctacgttttgtgactatgtgggcatatttcatattaaatatttaataattttactctttagaactctcaagatttttatagttttgaaggaggattaaaaattattgaactgatttggccttctggttcttatcatttgcggcagtagatttaactgcagtagtcatttacccagaatattttcttaaaaagctaaaggcttaataatatgcaaataaagctttacatggtttaacatctatctaggatgttcctgacagagctacacagtagcttcttttatcacacagtgatattaaaatactctcaaaatgattagaagttgaaatattagctatcaaaccaggagtttgctactaatttaggtatgttaatttattcatgatagctatttaatatattactaataaagattggaacaacctgattattctttaaaataaagaagaaaaatgtttgtcaggtaaaataatcatttaacttattataattttcatctttccagctcatggggcattcagaatgggaccacaaacgagggccaagaggatcacaggtaagtttcttttccttttctttttcacgtttcgtttcgtaacactttcagccacgggttttctaaaactcaagagataataaaatgtagagcgaggaagaggcaaaataaccatgccatttgtttttatttaagttaactataattaaagtctggatttcaaatcccaaaggcagatgccaggatattccttctaagagctttctggtatcccagattggttgtgtttatatgaatatagattttatattcatcttgtctcggcagaatacattttgatcagcaacccactctctttattcatttcctttgacaatttttccgtgtattttcttttttcttcagcttcctgtttttggttaaatattttgaaatataatcagactaaactctgaactaattacaagattttgtctctaaattaactctcttcatctgagggaaacagaaagatgaaaggacctattatttttgaaaagaaacaaattctaagtctttctgtattaccagagtgttttcattgtcttgctttatgtcttaggcaaagagaaaagcttccatgacgcatttatgctttttaatgacctaattagacaatgtggatttgttttgctttcataattactttccctgatggaataaaggctgagctttacactgagaaaattatttctcctcctagagcactttgtgaagaaatgtaaaaataatttctctcatggcaggctatggttacctgactgtaaacatgcaaaataaaaattaagtgggtggaaatttttgcttctattgcacacattttgcatttgctactaaaaaatatataaattacaaagggcagttgaatgtgcaatactgtaaatgaaagttcattggaaagtgggggcttctcccaagtgtttacaaagctgatttgttcttgtgttgtcattaaacttgtgtgaataactctatttaattccggtcactaggaaaacaaaaccaagtcaatcaattgttttagttcacattttaatgactgattttatttctgtccagtatcaatttgattagtaaataatgtaaaccaattaaattaggatcatctaaaagaatttatgccttactttatttccctcattcttatctccccttcattttctctgaaaactcttcctctgtacacatctataaaattttaaatcaaaatttgctgcaaggtcagtaatgaagggattaaattaacatagagtaaattcttcatgattcgaaaccagtaaaaatgtaaagataagtgcaaataagaaggtccatggtttctgatgattgccaccaaaacattttgatattcaaaacatgccaagcaagttgttgaggacatgtctcttcaaagcaagggtagtgttatatatagaaaattattgtttaagatatacatcatttactctctattttgcttactttggtataatttatcttcaggtttagattggtcactatgtcaatataaattgacaaaannnnnnnnnnnnnnnnnnnnaaaaaaaaaaaacctcacaattgtacagtatggtttttgttaactttcagtataaaaaggacaaaatttttaaaattccaaatattgcatatagctagaaaatgtgagaattccacatataaacaaaagctattttcataaataaaatttgattatatttgaaagcctgaggtggttctaaaaagcaaaagcattaaaatcggcttgcatgaattaccattatcaacatcaagtcttttttggatctcttaaccagcaaaatagctattctaaatatagtatacctttgtcccattttgattcctcaactcagatgaaaactgtcaaagtaaaaaacaaacacaacacaccaaaagataagaacaataagaaccatagcaaaaaacattaaaaagaaagagaatttccaaagaatttggaaatttcaggtagataaattaagtcttaagtaataacctcttatctgatttcaattccctgctgacgaaataataataataataataataataataacaataatgttttcatgttttggataattgatcccttcttttattgctattatctccttggtcaatatgtctaaagccttccagcttttcaaggggaacttcagacaagttgcacttgaacacagacctcttaatagtttactccaaagccttgctcaagtcccatcttagttaatttagaactggtttctaagcacttcctatgtttacagcactgtggtgggtctaactgaagacaactgaaaagacaagtatactgctttccaagagctcacaaattatggttggaaatacagcaatatttgtatatataattcacatataaggcaatctgatagacgcaacattacatacagtatgtggtgcatgatgacatatctgtgaatgacagtatatatgatggtggtcacataaaattataataccatgttttcagtatgccttttctatgtttagatacacaaataccatttgttacaattgcctacatttttcagtacagtgacatgctgcacagatttgtagcctagtaacaataggctacagcatatagcctaggtgtataataggctataccatctggtttgtgtaagtatactctatgatgttcccacaacaaaatccccatcattaagtgacatatatacaaagtgtaataagactatatatatatattgggaggccgaggcaggcagatcaccagaggtcaggagtttgagaccagcctgtccaacatggtgaaaccccgtctccactaaaaatacaaataatgataataataataataataatagtaataataataagccaggcatgatggtgggttctgtaatcccagatactcgggaggttgagacaggagaatctcttgaaccctggaggcggaggttgcagtgagccaagatcatgccactgcactccagcctgggcaacagaacgagaccccatatcaaaaaaaaaaagactgcatatatacaaagtgagataggatttaggtggaagagtatttcttactccctagtagactaggaaatacctctgagaagtgatgatgtctgaggtgtggctttaaggatgggtaagctttcgaaagtacagaggaaaaggtggatgaaaaagctttggtaaaagtctgaactgagaagagtgtgggacacctttgaatatatgtgaatttttttataacttctgtataaatgcttttggatggcaactcttacagcaattactgtgaagggataatctggagaatgctatactttattgactagataggcagaggaagttaagagggtcaagagtttgaaactgagtactctaagaattaggaccattaacacagaacagtttagatgaaagatgatgacttcagggttggcaatattaagtgacaagtgaaggtgacaattccaaaatgaagtttcaggcacatactcgaggcctgattagaacaaagggtgtcagtttgggaatgctaatcatacaggagataattgagctcctccagtagataggcttccagaaaaatattaaaagaaaaaacagaataaaagtctgatttttggaaaatatgctataaagactagaaacaagctgaggagggagttaatatgagt

SEQ ID NO: 97780 - DNA, 92541 bp, Homo sapiens
tgaagatatacacaccctttggggtgtgtactccagttagaggaccactgaatagaagagtttggtttttaaataagtgatatgtatgtagaccagaatcccagagctgtcgttgctagtagctgcgtgaccttaggcaagctgtttagtctccctgaatctcagttttctcgtgggtattctcgtgggtaaaacgagaataatgggacatataaagttatagtgacaattaaataagataatatatataaagcaactaatacataacctaatacagtggtaggccctgaataaataggttttattatatatttattatcattataattatcattatttttattttggtacagaagttactattattattctcctgaggaggcataatattactaaaataaaataggcaccaaaagagaatccagaggaaaactgagcctattttggcaaggagggaatatcctaagatttcactgcttgatggtgaaaaggcattagtgaggggaatcagaatctgttatacaaccaattggtgtgatttttactacagagaatggtttagtccttctcagtaatcctgctgaagtctttgggaagtctcttatttataaacctctttagggttctacttcattatcgtaatgaagtttctggtgcttgtggtttgtgcaattgggtagtagaaccctttacagaattctttccttaatgaggtaaagaccacttctttcagctaaagggctttagagggaggcagactagagtctaggtctaaggacaattccagccataatttaccagctaggatgcttgagtgactcaactttttcctaatttgtaaaaggctgtaagaatgctaacttttcaggtagtaagaaaaaggtacataaagcccctaacaaaagtacctgatatgcagtaggtgctcaacagacagaagttagtactattaaagaagataagaagaaaccccatggtaaataatcatttctggcagaatgttaagtaccatcaaaaacagtcaaaggactatgacagttcaaagaagagagaaggaacaactttttgttctggaaagggttgacggagaaaggccgtctgaaagagtttgagattgccctaacaggacaggttggattttgacaagtggagatgggaagaagggacatttaaaggataagaggtggaatgagaaaagtgcagaggtgggagattctagggactgattcaagggatgaatacttccatatgtatatgtggatgatagtgagagatgcaactattgccttgtttatgtacagtccctccccaaatgtcaggtagaaaaactcagaaggtaatttggagccatagtgtggggaattctgaatgctggatttggatctgaaggtgaaagagctggtgtcaaaactgactcagagatgtcaggttgggtgcaggccctcggctataatatgaaggcagaaaatagaactggttttatattccttacttatatcttataatacctgggttgaataacataaggatatatttcagaatactgtttggataatgttcttaggacagcatttcccaaaccatcttttggatacacaaaaaactcttacagttaacatacacataccacgaaatagtccatcatgatcacacaaactctctttctgagttacaatgtccattaacatattaaagatcctgagcagtcctgaaacaaatgaacctttttccttaatttaattcagcatttcccatatgtttttcagcctagcatagtgtcttcacagcacacttgttaaaggcttgggaaaaggggttctgcagacttcatttgggaaatgtgtcttatacaagacctggttaggcagctgaattatagttttgagaggtttggcggaagcaaggagatgggggtgagagtggacaggtttacagggagaatagctctcagtgtgtaaagccaagctgtctgacccaagagctgtatagataagcttcattgcaaaaagttaatgagcagataaaagaatttggtcatcctgaaatttggcaagattgaataatactttcttgtttaaactctaattcttaaaaacttctttaaaaacttaagtttttaaactacctcttcaaattctgtttgctggctcttttaagagccagaactccagactgctttctgcttgttttgaaagacaattctgtagcctgtccaaaattgagtgtgaaatggttaaaaggtaaaatcccaggtcatggctgccagagctctttttgaactagtgttgctcccggcatctttgactctttcctagtaacagaggccttttcagttcagattggagatacacacatttcttcccactgaaaatgcaggggatagaaagcaggtctccccaactcccactgccctgtcttccctcctcctgcttgacagcctgtggcaaaacttgtaggcagcagttagaaagcatttagagaaaaaaactggaaaatgactaaaatatagagagaaaccccttgggagtaacatgtacctagtaatagatatttttttcaaataagattagaagctagaaactttgctaacctgcagttgataaatttgcgtggtttagaatccaaactttgcgccgttgcagataacagagactgaaaattctctgtcaacagaataaggaccttgatagaaaaacagtgtgagtcaaaaataagagcatctgcagaaccagaccaaaatgatcaaaagatatcaaaacaaagacaattctcctagacacatatgaaaatatttcaataatccctactgtggaggaatttgaggttagttatatgagccataagagagtatctatagtttgttgcagattattatgcttgagttcattataaagcaagctatatgtctatatgtaaatttagtcattctgaattagtgctttgtgctgtatttatagtctagtgtttttaaaaaaatctctttaaatacatatattaatacatatacctatagcaaatagacttttgtgacaactgcagacaagattttggttcctagaattaacagaccagataatagcatgccttgcaatagaccatctttgccaggcttactcttggctgatatgccatagttatcctgccatatattggtggcatgactttctccaaatactatggctatatattagctttagaaaccaaaactgagcttgactgtgttttgctaaaatgaaatgctaaaggcagcatcatgggtttccttctacatgcatttatgtcctgatgaaaagagcattaatttgtagggacatggatgaagctggaaaccatcattctcagcaaactatcgcaaggacataaaaccaaacactgcatgttttcactcataggtgggaattgaacaatgagaacacatggatacaggaaggggaacatcacacaccagggcctgttgtggggtggggggagtggggagggatagtattaggagatctacctaatgctaaatgacgagttaatgggtgcagcacaccaacgtggcacatgcatacatatttaacaaacctgcacattgtgcacatgtaccctaaaacttaaagtataatataaataaaaaataaataaatgaaaagcttgactgtctttctttctattgtagggaagtgtgtattataccacaagactggtttgactctgagaaatggcactgctatgggatacctactctctcttgaaaagtaggactatcaatgcataataataacttttcccaccaaccgctagggctgatggcaaccttaataaaatatccgtagcagtcagaaacatgtttatgcacgtgaagtattaggaagttgtgctattaggaaacagtgctactaccacttactgttcaaggatctcattatgctgttgaccatgtgatacaaatgtatcttagagtagaaaagtcagaaataataagagaattgcccagagacaggacaactcagggacatggatagcaagaagaacgctctctaaagctctcgcttccctcccctgcccctctcccaattcgctgtgctgccatcacagccagactctctcgcatggtattttctttccagattgttcacttggctcagaggatgcagggaaaattcattcacgaaaatcgaagtggcatttaagaggagtgaatgctcactcttgctctcactggcttctatatattctggggagagaaagaaaaaagaaaaaaaaaacaaacctgggacccagacacacacactctgaatgtcctgtgctgacgggagggagacttggttcggctccaaatcataggctgtttgttacagtaggtagctagtcaggtatgagcagggcagaagagggcttccccccacacaccaggagtgttgggcaaccatcaagtgatggtcaggcagctgctgtttctctaaagtaataagtggtcacagccagcgctagaaggtagtctcctaatagatagaaaacaccgaaactgatcagcagcttcccaataaaatcccggaagtatgccaacaaataaaaccacaagtcaagatgtcaagctgtgcacttggtttctcaagtcacccgcttggccctcttccaagttgtactttccttcttttctctcctttccctcctttctttccttactgttctaaagctttttaataaactttcactcctgctctgaaacctgccttggtctttttctgctttatggccctcaatcaaattctttcttctgaggagacaagaaatgaagttgctgcaggcccacatggatacgccgccggggtaactctgatacctgccaccgccaacattttggtgtggtgaaactcggatatttgccactggtaacaccttgggttctctcatttctggctcccattgcagaaatccagaatgctggccagtcccattgcaaggcgtctttcctctggcctttagttagcagtgatttctaaagaacaaacaggtatggaaaaaaggcttacccctctggaggtacatcagatgcatctggcaaaagagggaaacttttttatttttgagacagggtcttgctctgtcacccaggctggcgtatagtgacacggtcataactcaatgtaactccaatgctcctgggctaaagcaatccttctgcctcagcctcccaaaattctgggattacaggcatgagccatcatgccctgatggatcttttttactgtaagatttcctcccaccctgggaaaatttgatacaccctgaggaaggcttgcttgatcttctcttctatccacttctgtgcagtcactattttcgggagatactatttctcatgggattgggcaaatccttgagctgtgttgagtcaaaaaaaaaaaaaatggaaaaagaaccacagacagatatagagactcttcacctaacttacccaactttgaataagctgaaatttgtgccaaaggaaaaagctaaaactctgctagaagggctatgactaattaaaatctgaatattgttcaaggtcaggaacatccaaaccagaccatgaaggatatctaaggatcaggttgccaggtagaagaagagctgggagaatgcagagagccataaacaggcagcaaggtcagtgacacaaagagaggttaggctcctattgcagaatcagtttcagagcaatggtcagagttaggaaatggaagggaaagacaatgcttgaggctctgggctagagtacagcacagccagagagccaagggccagcagaaaggactgtcagatgggggtaaacacgtggtgagtctccctcttgatgagaccctccatccaacccttctgcttctctgacaattttctagctgcaacactttctgcttctggggcagctttgctaacaggtgttttctaattacctgaagacctcaggtacccttcctcagcatccttaagaagatctttttttttttgagatggagtctcactctattgcccaggctggagtgcagtggcgtgatctcggttcactgcaacctctgccttccaggttcaagtgattctcctgcctcagcatcccaagtagctgggactacaggagctcgccaccacacctgactaagttttgtatttttagtagagatggggttccaccatattattgatcaggctggtctcgaactcctgaccttgtgatccacccgcctcagcctcccaaagtgctgggattataggcgtgagccactgcgcccggcccaagaagatcattttatgtgaggaaaggaaagcacacttttctattgtttgcctttggtcttctatatgaaataatcacaaaaatgtgtgttgttaagggccgattttttaaacaaaatatttggcttttccccatgctgaattgaattccacatttagagaactctggtttgttgatgtggagatttaatttatatttccaactccacattagcatcttcctgagaactcaaaggcaaaacatagtctaagccacccattttcttcctttcccttaaccctggaagcctgacaccttacccattccttagctttgcrcagatgcaaatcctggcaagatgaaatgcctgctcagcaagtgctgctagacaagtgagacggctgccacaaaccatgggtggccagtgttgaattgtgataccactcaggaggggcaggatcaggaaggaatgttttggcccatgttttgccatgttaccattgcaagaataactgcaatgttgtgccatggatctcaattccaatttatatttcacactatcaggcagatttcagataaaagagcttctgacccaaagccccttgatgtcttatcaagccacattggattcatgccattgcttcttggactctgtctacatctttgaacacacttcatcaatgaactaaatctagatcccctacatctttctcaaagcagaaagtaggattcattttcacgttcaaatcatcaaatgggtcaaaactatggtcagagaaggcagagaaaaatgtataagatgagatcaagaggtaataggtatttgggcaagattctgccatttattctggcctctctcttgaactgcagcaataagcaccattagtgcccttaattgtaacatttataaattagtgaatttctacaaacacaaagaaactagccctctcattttctttactgaacaaaatgtgcttcttcatgaaattatcaagctatcatttaaggtcagtgtcactcgtaattaattcattatgaaataattttgaagagaaaatgatcctttcttcttactatgataactaacttatttttaaaaaatggaatacatgtattacaacctgtcagagtaagscattttgattagttctgaatcattcttctggttaacagagagatgccgtaataaagctagggctattatttcataagaaggagggtcaggatcatgttaaagaaggtcagtgaaagagcaaaattggggctttccatggtatgactgcttttaggtaattgaagagaaattagccatgrtttttgctgatggggtagtattgactcactcagagtttcccccaccctacaccacatccacgtgggccaagacaaaggctaagttcagccacccctctcttgggagccagcagaagcccctggggaagattccactaatgtccagctgaagcctgagatggctgagtgcgcaagacacaagagggaacagggtttggatcttctaacctgtgaagagatgcagtgtgcccccaggaagaaagagggacttggagtattcctcatgtcagaagagcatgtggaagactggggagatggagttagagaaagatagacagctcagtgaggcctagcactgccctcagcccatcctgcctcattcagccttgtaccccataaggaagcaagttcccaaaataaactcatttcctcatcctgccctccataatgcttttatgggacacttgatttcttccatcctccattcacatttcaacgtgtgagttttagggaggacgcaaaaggcagcattgagcactccctcagtcatctcctgaagactgcattccccttccttacacttctccaggccttactgtctctcaggtagagagttagttgattcatgactctctctgcatagtcatgcacaaaggaaggattcataggcaatctttccctatggaaaaaggaaaaggcagtctctgcaacctagaaagaaaacactctgagaaactcttttcaacacagcttcctgtgccactttactacaaatcagagaagtttgagatcgtgtagctaacccttcttgaatcataggactctgttctttaactcctattgttcaaggaaagaagtttggatgaccacatgtgaaagatcaaaactagctatgaattctttcaacttctcgcatcaaaaggtagagcgtatttcctactccttaaagctggactggccttgtgacctgctttggccaatagaatgtggcagaaatgttattttgctagtttgagcctaggcttcacagcttccactctttcccctctggaatgtgatgccatgtgaacaagcccagggttgcttcatcttaaagatgagaaaccacatggaaagagacacccagacatgagtgagtggttcgcactccacagagtggagatgagtcatacatctcttggttttcaaacaagtctgcacatttttttggctgggcacagtggctcacacctgtaatcccagcactttgggaggccgaggcgggtggatcacgaggtcaggagatcgagaccatcctagctaacacagtgaaaccccatctctactaaaaatacaaaaaattagctgggcgtggtggtgggcacctgtagtcccagctactggggaggctgaggcaggagaatggcatgaacctgggaggcagaggttgcagtgagctgagactgcgccactgcattccagcctgggaaacagagcgagattccatctcaaaaaaaaaaaaaaaaaattagctgggtgtggtggcacatgtctgtaatcccagctactcaggaggccgaggcaggagaatcacttgaatccaggaggcggaggttgcagtgagccgagatcacaccactgccttccagcctaggtgacagagcaagaccccatctcaaaaaaaaaaaaaagtctgcacactttttgatataccttacataacatggtagagtttaattatcttggtcttagtcacttgctttcagtgaatataatgcagtaaaagtgacgccacatgacttctgagggtaggttagaaaaagcaatacattgtccaccaggctctctcttgtgacacacgccttgggggccctgagctgacacataagaaatctgcctattcagaagctgccatgctagagagaacacatggagaagctgcatggaaatagaacaagatgctcaaggagccccagctgtttgagtcagcccaacaccaaccagcaggcacgtgagtgagtgagtgagagcctccagatgacgccaatctttgggtgactctaggctgacrccaggaggaacagagatgagctgttcctgccaagctctgcccaaattatagatttatgagaataaatgttattttatgtacttattcatttttaattttatttatttatttgagacagagttttgctgttcttgcccagtctgaagtgcaatggtgtgatctcagctcactgcaacctccgcctcctgggttcaagcaattcttgtgcctcagcctcccgagtagctgggattacaggcatgcaccaccacgcccggctaattttgtaattttagtagagaaggggtttctccatattggtcaggctggtcttgaactcccaacctcaggtgatctgcccaccttggcctcccaaagtgctgtgattacaggcatgagccactgcgcccagcaataaatgttattttaaaccacagtgttggggtgatttgttaggtagcaacagataacagatacactattgcattttatttatttttttactcatattttgatgtaggacagcaaagtttcaactttgtaatgggaatattcataaattactatatagtcacatagtagacagtaattccaataaatattgcattttcttaatctggtctgtcataacttggtgaattctagttaagggtacacctaaggctcagcagcctgagtcagtgaagaagaatatactgagaacaagaagctaaaattaagaggggcgagggctggagatacctgcctcagctgcagaggcagctgaagagttcaacacatgatgtttaaagttagaggaactcaagtgaaggggaacaagctaacaggtttaagagggcagtacacattttcaggtaggtgagcagagaccacatggtggtcacccattcctgggagctcagcagggctagaagtatggggaaaactgttctccaacccggaggaaggacttttcttcctgtcttatgggacctagataaagagacaaaaataatatacatgaaaccttcagagggataatgaactactcagttacttggactatatgttcaaagaacagaaagcttcagtgttttcaacattaaaatgacctccacacaaaagtatgcatattaattcacctatcaccagctgacctgtccttaggtacaaataattagattgaagatgggtcacagatgcattctatggcttggaaatgatacataaaatttcctagatatgaatgaaaaggatttgtgagaataaaccactactcttcagcaatagaaaggtttagactctgcaggcatttgaatgtgacagttaaatttctcagccagccccaaatcatctcttccttcacagcagtggtttttggaaatccattgtatactctcttttcttcatgaactattcactcgagcatcagcaccatatttatgtataagttaaatgaaacctctcaccatgagagaaccctgtgttctaatcagcaagcatgaaaagtaataatggaattgaagttatagatgctgagtatttgttagaggttgaaaggtaatatatcatgtgtccgtgactatctgaaatcatcccatattcattctgtgggaggttactatagattttctacacatttgccaacaagaataaaaagaaagagagcaatgttagagactgtgttcaaaataactatctgttgctattggtaactaagacttgcagtaaattgaaatgtaggattctatgtctctttttgattttcagatggttgaaacttttagaaaagggacttagtttatttttggtttatatagttcaaatacttctcagaaggtcagtaggccttgggaaggtttatatgccatatttagaggactaaagctatgttttaaataagaatgtttgggacttatcaaaaaaattaaacttaaaaaatgaattgggccaggcatggtggctcactcctgtaatcccaacactttgggaggccaaggtggccagatcacttgaggccaggagttcaagattaccaacatggtgaaaccctgtctctactaaaaatacaaaaattagccaggcatggtggtgggtgcctgctcccagctactcaggaggctgaggtacacgaattgcttgagcccaggaggcggatgttgcagtgagccgagatcgcgccactgcattccagcctgggtgacagagtgagactttacctcaaaaaaaaaaaaaaaaaaaaaaagaattggaagataagtaggatagcagttggtgacccagcccctggcatgtccctactcatggccatcatcacagatcttctcacttcatggcagctattactcatactccatggacctttccagtgtcctcttacaattggtttggctttttctctcaatcttcaccctgtgctcactctttggacttgatgaaggcatttggctaacccagtatacacactgggactttcgcagttacaaataagagagtattcaacccaaactggcctaaaccaaaaaggtaatgtgttggctcatgtgattggaaatttcagaagttcaggcacatcatgatgcaggagttcaaatgatatttccaggacccattttctctctgtcccatgactcaactgctgtattgattccattctcagatgggctctttccctgtggcctcagaatggctgccacctgctctggaaacaacttatttctaggtttaaatctggtagaaaacagtgggtgtctttgattcagaattcttaagaactgtccaggccagtcatggtggctcacgcctgtaatcccagcactttgggaggcagaggcaggtggatcacctgaggtcaggagtttgagaccagcctgaccaacatggtgaaaccccatctctgctaaaaatacaaaaaattagccaggcgtggtggtgcatgcttgtaatcccagctgcttgggatgctggggcaggagaattgcttgaacctgggaggcagaggttgcagtgagccaagattgtgccactgcactccagcttgggtagcagagtgagactccgtctcaaaaatatatatataaataaaaagaaaagaaaaagaaatgtccagaaattcacacagataagaccagtctagatcccactcttgtgccaagaaaacatggtatgccagttgactcaggcctcaatccaatttccacccccagacctagagctccatctagaccacaaggaatgaaatgcataagggatgaatctcaaaatgaaaaagggggctattgacaggaaaggaaggattggatgccagggatgcacacaaaaaatacccattacatctggttttgacccttagctctccctgggctcagattgcactcaatactccagttatattgaactctattcctctaacttgccgtgttctctttcctgtttgtgctatcccgcatactgagatacatgcaatggagcctgagcctattgcttgcccatcatgaaagggtgaaaatgattttactctaagacatagagtaaggcttccataattgaggttattggactctgcccagtgaagcaccctagcaaccccagagacctatagaaatgagtattattgcttccaaagtgtgctgattgtgtatagggaagcacaactacttttcaaaatctatcctgatgtagaatgaaytataatagtgaaggagaccagaatatgccaccccaaaataggcctttttggcataaggattattctgagctgaaggcaattgaggaacatcatacccagaaaaagctctgaagcagarcataaatttccctttcttaaaggaagcttacattttataaaagaaatttacatttgcaaaagtgtctccctctcccaaaccaggaaggaggaggatggctgctgcaactcctatcaatggagaaggcaccacctgaaatctgcataacaaaccttgataaacaactcttgtttccacacagcccttggtcaccttgcataacttaccccctcagcaagccccaaacctctttttctttgtctagcctaagaaggcatgtaaacactaagttctggctgcctccttgagccacattttactttacccagaaccatgcatatgtgtgtaactaaaactgtttttttcactcattactctgtcactaaagaggctagaggaaaagttttcccttcccgacaaaagaatgtctgtagcagatctgtagatctgtagtgcccagaagcacttaacatggtggccaatacaatttgggagtgctggctgggcacggtgtctcatgcctgtatcccagcactttgggtggctgaggcgggtggattgcctgaggtgaggagttcgagaccagccagaccaacatggagaaatcccgtctctactaaaaataaaaaaattagccagtcttggtggcatgtgcctgtaatcccagctaatcgggaggctgagataggagaatcgcttgaacctgggaggaggaggttgcagtgagccaagattgtgccactgcactccagcctgggcaacagagtgagactctgtctaaaaaaaaaaaaaaraaagaaaatctatatatatctatatatatggatatacacacacatatatatgcgtgtgtgtgctttaatctctgttgtttcaagaatatttaaggatttatcctcaagtaatcaatccctttgagactaccaggcatctgatgtggttgttcaacccagagaaaagaaagctgacttcgagtatatgcaggactgagaactaagtaataaagtgaaaaaactagagttattttgtgattttttttttcagcatacaaatagagctaaaaggagaagttcaaacagagcacatttcattccatataagtttattaagagtaactaagtgccagagttgagtgtataacattgtaatgacatcaataagataggactctcaagtagaaaatagtctaacaagaatcagacaaatgaacaaaacacacattatctccttatcagagagtgctaaaaaataaaaattaaaaaatacacacattaacacgcaaactaacaaatgtcgccaaggtggcagtaaccctgcttgagagtcactacgccctttccacttctcttccaacattcccacctggaaaagaggtgagcaggtgcaggctctgcaacactctagtctctgcttggcgtattccagctgtggaatcctcctcccctatttttgccttccctgtaaatcctgctgtttccaggccatcatggcactttgctgctgctttccctactgttgtgaaaggcctgtgaactggaagaaggctcactgaataatttaaaggcagcttctcacttccagaagcaatgctctagttacctaagatagcatcaggccacccagcattccgtctgtgcctgaggcaggtatacactggtgaggcattgtagctaaaacagccagtgagtcagcaatggcaacaaccacccaaagaatctcattaattgtggacttcactcagagatgggggatgatgctgcatgtggaagagaagctggttagattaattggtcagcagcaggacagcaggcaaaagtgtgctatgtcaacacattcataaagagatacatgtttgtgtttgtttttcaaccaaggacgcaagttttatctacttcctctttactgccacaagcctgtcaggctctgtcgcccaggctggagtgcagtggcatgatctcagctcactgcaatctccaactccctggttcaagcgattttcctgcctcagcttccagagtagctgggactacaggcgcccgccatcacgcctggctaatttttgtatatttagtagagatggagtttcaccatgttggccaggatggtctcgatctcctgacctcatgatccacccacctcagcctcccaaagtgctgggattacaggcgtgagccaccgggcccagccaggcatttgaataaacaccttcgttagggaattcagaggaacacaaatcaagaatacatttgagtcctaaacataaacagaagaacaccttctgtgagggaaacaaaatgcaggaagatccagaactccccagcaagctttgttaattcaagtccccaacaacatttgtttctaaacattccttaaattccgcatgtactcataagatttctaggtgtgactactgaaatgtgctgatttagttagggctaaatattgaacagttgctaacgttggaggaagaatggaaacaaatccaagaaacaagctcctctttatatccaccctgtgatggttgctcttgttagtttaattaagctcctggattaatgcaggtaagcccttcctgattcattccttatacatatagggaacccagcatgagcctaagctgggttcactctaggactcaggcatgtcaaggcttgttgcaaaaactcatgggtcagcaacagagacttacttatgagaaaggtagaagaacctcccggagaagaacctttcttaggaaagagagcttctaaggcaaacaagtttgatacaaggacagtggtccagagtaggaggggtaaaagggcaaaagaagtgagatgggagcccccttggaggttgaagaagcaccaaactccttttgtttttgagactcctgaaatattacattaagaaataccaaaactgggttatataaagaggcatttcgcaaatttacatttaacatattaatgtctttaacattaacacaaaacacattgcaaataatggtattattcacaagatcatgaatggatttagaagtattagtaattgataatttagtatagtgatgtggtccaatatagggacacaagaaaagggctgtgtggtgagtgctgtcttctttcacttcaggtggcatctctctgagatgggatgaataacctcatttggagtcatctctgtcattggcctgtgtctgtccctcggagtatcctcctgctcagccttcactgacccagcctgaaatctatgcctaggggctgcaggaaaatagcaagtagaaaccacaagagctcttaagctctgagagatgctgagcatgcaaaccttctggtgccaacaacttcttcagcaactttgttgactttggcaaccacaggagtcagctcagacattatcgccttgaccaggcatcagtagccttggcacaggtgttgctgggcaatcacagcagtggaagtgcctttggccaacaccagcagcggcttcatcttccaggcatattggcaacaggamcgtggctttcagtattggttataagaatgatggctgatgaaaaccaaggctggcaggaaaactgcaatagccatggggtaaccaggaggatcttgttccatcaattaattcttccctgccctctctcttgggggctagccttcccccagatagtacactttctgtttgtctgtggctgatctcatggggacagaccatgtaaggaatcactgccttgattgagtgggtgagcctaaatagttctggggggttagtattcagaagaccccttggccatagatataaggctcattttcccatataagctttatcagtaattttttaaatgttacaactttgactctatatgctgttcttttggcttatttctagattgattcataactcaggaatgagaagtgctgttttattaagactctcaaatactaaaggaatcatcgttatcatcataatcatcatcaacatcatcaatcctcattactgcattcccaggccccggtatattatttggctttagcagacatctaaatatatatgtagccaggcgtggtggctcatgcttttaatcccagcactttgggaggccaaggcaggtcgatcacctgaggcctagagtttgagaccagcctggccaacatggtaaaaccctgtctctattttaaaaaatacaaaaaattagccaggcatggtgacagatgcctgtaatcccagctactcgggatgctgaggcaggagaatcacttgagggtgaggttgggaggtggaggttgtggcaagccaagattgtgccactgcactcagcgaaattccatctcaaaaaaataaatagtccaggcgcagtggctcacacctgtaatcccagcactttgggaggccgaggcaggtggaatacttgaggtaaagagttcgagaccagcctggccaaacaaaaccccatctctactaaaaatacaaaaattagccagacgtggtggtgtgcacctgtaagcccaactactcaggaggctgaggcaggagaatcacttgaacacaggaggtggaggttgcagtgagccgagaccatgccattgcactccaccctgggtaacaagagtgaaactctgcctcaaaagaaaagtgtgtgtgtgtgtgtgtgtgtgtgtgaaataatgaatatatgagaaaatatacaatactcactccagtacagtataaaaaatatctggttagaatttgagggatgtgtaataagaaaaaggcatatccagagaagaactgtttgattattgttacaatgactcagtttttacctgaaggctggtatatcccaggaaacatagcttattgattgattgattcatactttcacaaaacatattttgagcattcaacatgcactagacatatagaactagaatgcctacccttaagcagttaataatctagttgggtaagcagatctgagtgtgagtaactgaaattcagtatgatgaaagatttattgatgatgtgatgtaagccagttagtatcatagcatagaggaagtaacaattttgcttgtcaagagagttaagaaagttccagaaagctaaagacaaaaaatttcaactaaaagtctattgatttacagtayggaaaaaaaagaaaggcttgggacattgagcaaatcaccagttaactggaagtttttctggaagccagcaaatggaatggttcaaatcaaccaatgatccattcattctataagtattaatttagggcctactttgtgctaagaactgcccaaggcctggggttgatgcaagtattacaaaaaaggaccaagacacctgaagctagatgtgagagtggaacatagacctttcccagctgtcatctcaggactagctttaactccgaggctctacacttggaagatgtttcctttctacagggattccacagggagggggaaaaacaaggaatttgggcttcaaaccaaacttgaacctgatgatccctgacactttaatgaagataatcaaatccagaaaaatctcaaatcaaagttgtttttctttaaaaagacagggtctacctcggtcacccaggctggagtgcagcatggcacaatcatagcttactgcagtctcgaactcctgagttcaagcaatcctcccaccttaccctcccaagtagctaggactacggagcatgtcactatgcttggctaatgttttaattttttgtagagaagggatctatgttgcccatgctggtctcaaactttcggcctcaagcaatactcccacctcagcctagatgaaacttttgagcatattctgtattatcagcagtagattataaaattacctttggacaaggattcatttgccctggaatcctcaattttcatagaaataacacctcaatttacaaggtacacactggcacagatatttatgccacatgatactttctccctggctatagtaaataagataaagagtagccatgtaagatgaaccaatttctctatagaattaaaaatggggctaagagacatttgcaaattaatgatggctgcctgaattgaagcaatataaacttggatactgtgcagtcttctttccaccttgtgcacrgacaagcagagggcaatttgtgagagaggaagctgatgcacagtgagaaagaacatgaatgaaactggctgctaatggcttaagtccctgtgaaacagcctcagctcctgctcttgggtcctgttgccctctaataaatcctccatacatctgctcttctgcttaagttatttagcagagtcttcttatttgtcatcaaaagagccttagacttaaaaaaaaaaaatgaacagaggccctcttgtgggatgtacggtttgtaactctccagctgcaaaaggttcagttggtttgcatggtccgaaacttctatttcattgtggagagggtggctaaagatgaacttacacacatcatcctacaaattattgcttgttcttggaaatgcaattgctcaaggaggttggctgctgagacttcaagatggtggcaaggatatgcaggcatgggtgttacttcaaacagataataaaactgaaaataaactggactgagtttagcaacgcttgccctagactggatggattatgcctcttatgtggtgttattctaactcagttgagaaaacaaccgatgtcctgttattacgcgctaaagggactgtgcttttgagtatagaggactttccatgggttgaaggttgcactwtttcctaaaggaaatagaaatttccagaacctatcatattgaatggacagatccagatcagaaagaaaagacacagaaggcagggaactttttaccttttgggggatatggggacatgaggcctggggctcagcagaaggggggacatactgaaggtcttcctcctatggtaggaagaagaaagctgacctctacaactgtgaggcaggccagaaactatgcaggcctcagtagtctaccctgagaacagtcagatctaatatcagttttacatttctctagattgtaatttcctcttgcagaattgaagctttcagtaaagttttattacaatctgatcttggcttagcttcaagtaaaagaaggtgttatatggaatggtaaagggggcgcaggtttcctcatcctgaggtcagctttatggtggcagcaccgattgaagggaggtagaatgttctggaactgcatcaagtgacctgcagagaagtgaatgatggtccatggtagagtggagtttgccagtctggaatcaggcaaagcagagtcatagatgtggcacgactgacttgggaaccatcatgagacaactttcccccacccacatcttgctgagcatgcctgagggaaaggaaaaattatagaagagattggctagatgctcaacaatatccttttcctccgctgagcacacagatgactacatcttccattcccttgcattggccaagggaacatgactggaagggatgtagacccttcaatataggggtgtagacactttaatgtctggaccctaaaatctgcatgcatcctctgcttaatctctctttgtttgctggtcagctcaattcagatgatatgcagaggactccaaaaaggctgtagaagacagcaagctccattgatagaagaagcctgaatccctgagtcatcacttagaggggagctgccagaactgttttgagttgtgatgggagcaaagaataaacatttattgtgttaaaccactgagattttgaggttgtttgttactgcaactaacattaatttctctaatacggcaacataaaaagattctatcygaagtcctatcattacacagatgagggcctttgaatggtcaaagatttgggttacatgaatcagacatacatccttcccccaaagagtttgcggtccagtaagaagcttaaagaaaaagtgacaatagaaggataggcaggaacctcataaacgactttgtttttcctgttgtagactttagtgatgaggcacagagaacccagaaaaggtttagacaaacattctcattatattattcccttgacagaactgtcaagaatggagagcttgttttactaaggtggtaaagtcactgaaattctaccctcgaattaagagaaaccttcattattttttttcatctctgatcaggtcataggttttcgtttgtaacctttatttctgcattaccaagactgtattttactttcctgaaactatgggaaaacaaaagcaattaaagagacactatactaggtcagttattactaaaccaagatcttgttaacacaatgctaacataagtccacaagcagctacaaatcaaaatgtaactaaaacttaagaaatagttcacctggaacagatggactttattttttttagtcccctttgcccatttccttgggatctggataaggcacccagtcagaggtttgcaatggcaattatttcacagcctgtcaagtaaaattgggtagaaggggatgatattcagccacgtgaagctggcctgtgacattttccccttctttaatttttttttaattttttttaattaaaaagtaacttacaatacatgctataacatggatgaagtttggaggcattacgaaagtgaaagaacccagacacaaaaggccacatattgtgtaattccatttatatgaaatgtccacaataggcaaatccgtagaaacagaaagcagattagtggttgccagggcctggagggagagagggggctggggagtgactgctgcttaatgggtacagggtttctggaactagatagtgatgatgtttgcacaacattgtaaatgtactaaatgccacttatttatacaatttaaaatggttaaaatggtgacttatatgatatgtgaattttaccttaaaaaataatcccgattaaaaaaaaaactggattttttttaaatggctttccttggcacacacattcctgctctgtctcctactcattcttattcaagctgtagtataataatgagagtattaacaatactagaaattaaatgcaactcactgccacccgactggcaaaaacacaaaactcggcattaggacaattgactctgccaaatcaatagaaaatctgaaagtggaaatcatgtgctctttagtgaagtctcagggaagactatgcttcttccgcttgaagcagatatagaattacaagttcctagatgagaaattaataaacaaagagttaaaactgctatctgggtcccttctccttccctcttcccagtgtgtgttgatgttatttacaggccttgctggtttttaaaaaaactcttacctcccagaactggttttcatggcaaaccagatttagatggtgaagaataatgactgaagggcagaaaatgggctggggctgggtggtgattgtcctgccaatccatgaagagtcaccctgtccgtatgactaacgctgtgccaagcaggtgtgtagaaagacatgaggcttgaagaaaatactccgaaaagcacttgctttaaattcctaccttctccccttcccagccatgctttctcctcaaggagagggtttagcatctctgcctgagctgggaaataaaggacatggcaggtgagaggtggtgtcacttcataaagaggctcaagttcttaaccagaggcccccgtgtgttctgttaggtgctttccaggagtctcagaatgtaaggctatggagatgtcggcagacttcccatggcctggcaccacagagagcaaacatcattcctgcttctggctactaagtcctacattcgagctctgttctgcagaagatgtgaagagaaccaagccaggtggctgccagccccaaaggcagaggtgtgctggagctggctttgctcacaatagccagttgttaaattgtcaggaattttgcaagccagttcttaaccaaattattatttaggaaaatacattataaatattagtaggactgagagatgtctcagtttaatgattgtaatttgtaacagagtgataaatagtaaataaactgtagactacattacagatgtaatgacaatgactttattgggaaaagatttagaagattgaagagtacatctttatttgtcatatcacaatgggattgtagccataggttggctgtggatatatgaaagcagcaaaaagtaacaaaagcattttgtgagtcaatcggctacttggaatttataatgaattatgttatgtattttgttagtaataacttgtatgccacacaccctttaaatcagtaaaatccataacaaacttgtaaacttactttttttttcagcaaaccggttgttaaacatcaccacaacaccactgcctgaagagctacaacccaggacacctgaattgagctttttgttaatcttcccacctgtgaaatgaaggaaagaaggaagaaaagagagagggagggagagagattacttccagacaatcctacttcttgcattttaagtctaaaatagtgaagaaaatgatagtgatggaaaatgcagggctcactctgcacacgtagaacaggtggtctcctatctggtacgacttgaaaggtactccgaagccagccggcccagacatatctacccctctggcttgctcaagcctgctttttgaaattcacagaatttgaggatgcttcctttggatgagctttgtctcccatgcctttctcttgcctccaatactcctcattatcaccttagctcatatttgagtataaataactagatgtgaccttgaaaagcactgaacttcttcccaggaaaagaagatgtaataaaaagctctgatgtggggaggaagctgaaaacaacaacagcaaaccctgacgtgccctgacagtgcaggccataaaatggggatctcagacaccatggggcataggcactgagtgaactgttgggagcataagggctttagaaaagggaaactggaaagatgcaagaggaaagggacctggtgcagaccctggtattgagcttgccccttataccccttatgaaaaataaggaggttagaatgagctctaatgaaaactatggagtctgggtaataatgacgtgtcaatgcaggtttatggactgtaaccagtgcatcactgtgacaatgaacaagcctgtgcgtttgtgggggaccgaaggtgtaccggaacttcctgtgctttctgcttaattttgtgcaaacctaaaactgctcttaaaaaaaaaaaaaaaaagcccacttttcagaaaagggtggggggagctcaggtcctaaatgtgagcctcatcacagttcttgtcttcagcagcccacccaaagccctccttcactgcctgtcaccattttcataccctctagagtcacttatcacaaaagtaacaatcacaatccttggaaaggtgtcactataccttaataaataagcaggtatacatgtgtggatttgtacatcccaagaggtgggactgatgagagacagcagcaccccattcccccacaatcaatgaacaaacctggtaaatactctctccatcccctgtgcccttcagctcaaatattgtgactctctttttttcaaatatatctcaatctcttttcagatgtgtattttaccttgtttactgcgacgaccctgctttacaaaatacatattttgaatctcttttcagaggtttattaaccatgcttcctattactcctcctcatctccgaatgtctgcttgaactcctcttcaaatactgtcatcaaatctttgaagtttgttcacttgtgatgtaaggggctccctcccttggatgttcctggaaaggctgaatgatcaggagaatattgggttgtacttatgtataaaacagatcctaggccgggcgtggtggctcacacctgtaattccagcactttaggagaccagggcgggcagatcacctgaggacaggagttcaagaccagcctggccaacatggtgaaaccctgtctctactaaaaatacgaaaattagccgggagtggtggcacatgcctgtaattccagctactctggaggctgaggtaggagaattgcttgaacccaggaggcagaggttgcagtgagccaagatcatgccacttgtactccagcctgggcgacagagcgagactccatctcaaaaaaatagaaaaataaaaataataaaaaataaaaaataaaacagatcctaaagctgatgtgagagtagtctgactggtcttcactcccttcctccctccctcatgcatatattttagtaaatggcaaatgacatatatttttaaggaatgactcattgactgcacacagagagagttagctttcagcagcaactctaagtagcaggatcagcagggccagctggaagtcagttcagggatgtggctcatactttccctgggctgggcctgacctccaccttgcttgccgcaatgtcattctaatgaatcttaaacctgcttcattcaaaaagatttctgggatggctcccaggcaacccacatcgcccctctccatccagagcccaggcaacagctgttccctcacctgtcagacttggacctactgaaactgaaaatacaacccagtggtctaagaacattatatttttggtgtattttttctcgtttgaaagttctcatgaggacaaattgaaccttacttccatattttgtgaacaacttttactgaacagtttaccacaatgggactattctgggaatccagaatatgtgaccactgtgcctgattcttctcacaggccattggtctgcaagcattgacatccacagatatttccaatccatgattagactgcagggatcaaaaccagagggcagttatcactttgtgataactttccaaggccgccatgtctttttcaagatgtcaccttcgagaggttactgcacgctccacgttttagtctaagtagggctcttgctccttaatgccctcaactctaagaaagacccactggatggacctgtctttcaggcattaactcttaagtggatgttttctatcacccacagtgtaaataatctggcgtagaaagcataccagggacttgggttacatttttgacacatattgaagctgcctgtattgttataggagagcaagggagacgatgactgttgaactattcttcatttaaatccttcgaataattgaactattcttcatttaaaaatagaaaccaaaaccatgataaaattatgatttccagtggattttctgctgtttgcacatggccatgcagtttaaggtaaatgtatgactggtgtctctgcaagcctttctgggaatatcatccctataattgccaaatagaggaattacatgactcagatgactgtttccctggctgactggctctccagctcccctggatctgaaaaaaggtgagggaagaagaggccagggaaggatggcctgctgtgtggggctggactgggtgcttggtgtgttgaagccatttctcagcacaagctccttactcagcctgctggaaatgctgattgaacatctgtcaggcagcgtccacaagtatcacaaaatgtaaggagcrtctccccatagctgaactcaccctcaccaagaaagggctgtgctgagagagtaacccctgctgagtcgtggcttctgggctgtgagaacccaacagcagaagctaaaccacaagagaggaaatacaaagtctggaggcaccttagtggtcccattagtgcccatcatgtgttctctttcctgagtcctgccctctccactaaagcctccagactgctataaaataaaaataaaataaagagtagcagctgcctgtttgcctctgtggcttttatatctgctcactcagaaagggctgcactcccttgaagctgcaattagcctggctcaccaaggggctgaaggccactccagaccaccagccatcattcctgctggggcacctgccaaatggagaaattcaccgctaaagaagaacagggaggaatatcagctcattcctgggagagtctggacacaaagcttcttgtctttgaccttgtttctctaaccaaaactcaagacatgtggtctgaaaaaggatttttgtatagctcccaagggcaggtgtccattgaggggaacaggatttagaaatataaatattagaatttctgggccatttcaagattatgcataagaggatagcaaagaagaacagttgttttggagtcaaatagatgtgtttagaaattacatctccgctacctaaaaactgcagtcttggacaattattattattatttttggagacagagtcttgctctgtcaaccaggctggagtgcagtggtgcaatcttggctcactgcaagctctacctcccaggttcaagtaattctcctgcctcctgggattacaggcatgcaccacactacgcccagctaatttctggattttttagtagagacagggtttgaacatgttggccaggctggtctcgaactcctgacctcaagtggtctgcctgcctcggcctcccaaagtgctgggattacgggtgtgagccaccatgctggcctaaattattcttttgtgactattttctcacctgcaaaagggaacaataataatacttttctcatagggttatactgaatattgagataatgtrtgtgtaaaggagaaaaataacaaccacactataaactaccacaattgctttctaaagcagagggatctatgacaggagagtcctcttgttttcctgagattcttgcrgggtctgctcagctttgcttagtaaagaaacaagatgtatacacatttaaaaaaaagaaaaaagaaaagtaagaaagaagaatttggactttccaggaatagtccaggaggaagctcctgaggaatgggacraaaatagcaaaaaagagaagatccagtgggaagctgtgaggccagggaggagtttgtaagtttagaggatttaagacctgggttmggatcctgcctctgctgcttactaaccatggatctttggrcaaattatttagctttgttttgtttcagtttcctcatatggaaaattgggataataccactcccctgtcagagctgtagtgaagattaagtgaaataatcactgtgaagtgcccaggaacagtatctattgttgctattgccacgaataacattgagaatgtacagtctgacctctgtaacagggaacaccttggcaaaggcacattccctgcatattcaactaagaatgaacatattgttggcacaaattcgccagagtccagtgtcagttcagatacggttgagagaaccaaagggacatcccgaggttctggtggaagctaccacagcctaagccccttgccaactctccagtctttctacccctgccttctccctgtaagacttttctggtcaataaaagcagcattgctttctgggattcagacgacacttgtgaaagacttatatttatgtaaataaaataaactaatgttcmtgaaatagttttagaaaccagatcaagtctgttacscaaagtaaggcattagaattattataaggaaaaagaggcttaatgaacacaaggctggacatccctgtcttgtgtcaagtacagttttcttcagctacatcatctaggcattaagaggttttaaggcagggcacggtggctcacacctgtaatcccagcactttgggaggctgaggcaggtggatcacaaggtcaggaatttgagaccatgttgaccaacatggtgaaaccccatctctactaaaaatacaaaaattagccgggtgtggtggcgtgtgcctgtaatgccagctactcgagaggctgaggcaggagaattgcttgaacccaggaggcagaggttgcagtgagccgagatcacgccactgcactccagcctgggtgacagaccaagactccatctcaaaaaaaaaaaaaaaaaaaaaaaagaggttttgaaaaattcctctctagagctacacctagtttctccagagtaactgaaggagtgctaattttgcacgtggcatcgttatatggtttctgtcaaggtagagcagacctactgatgtgtcatagaggaagatcagagagctgtggctacctcctgcccccctaccataggtacctccatcccagtgactgtgagtacctgctagacccagggctaagcactgggcataagagagaggaagacaggcagatctgtgctgcaaaggcaccactgttgaaaatatctgagacaaacaaaaaattaacaatattcatttatttccttctcagtgagaagtgatacaaagctaatcaacagaggcatgcaaatgaagacttggccaagtctgagaatgtgggcgaagactttcctgaaagtaattaatacttacactgcagcaagagattagaatgcacagaagagggatacagagagcagtccttccaggaagagggaacagcacgtgcaaatgctcagaggcagaaaggagtctggtgttgaggatatgaaagaagatcagtgcatcttgagtctggtaagcaaatgaggatggtgggggaactgagagtgcccctaggaatgaatctccgagttgtttaccttggggaatggcggagataaatcctacttttcacaactaagggaataaccatccataataaataatagagaggggtagcagaaaagtgaggtgtgtgaacccacacttgtcgttaagtgtgtgaatgctttattcagctaactagaaccctgagacattgggtccaagatcaaagacagactgagtgttggagctggctagtcttcctctatgtcatggccagcttgcaaaaacctgggcaagagagaggctatttgaaactgtgggtgattttgtgcaaatctattcmcactagtagatgatcatcacaagcagagaagagagcattagacgttagacaccaaccaaacgtgttgtcccaagtattccaggcaccagcacacctaagaacagaacacaagcctactccgcaggtaactcctctgcttccagggacgtttccacatggtgacttacttgagtgarcaaatctgcgygtcaagacctgcttattttgccctgaccacttggaggcatgagaacataagggtgtcccaagctggccacaggcagcgatgcaacctgcctccaatcctagcaccaaaggtccgtgcccatgacagcaccaggacagagtagggtcctcctgctggcctgtcctaaggcttttaacccatgcaccctgggatggtacgttctaccccagcactacacagatttatgcatagtccctccatgtgggacacccctacaagtgtgccaagtggaaatcatctcattccagcaaggagaatcaagagaaaccatcgcccccacctcctttgggttcacaagggaaatattttttctttgtaacacatctgctaagaaacaccagggaatttccaactctgtttgccttcctcctcttcctcctccatcaccaccaccacctctctctcatcctcctcctccttcatctttctctttccctcctcttcctcctccttccttatgtctctctccttctcttcctcctcctttccttctcctccctctcctcgtttttttccattttcctccccttcctcctacttatctttttttcttaatgcttctctatacattccaatttttctataatgaagacttcatgtttgaataaacaggaaaaagcaaaggggaaaagaaaacaggaaggggaaactcaatccccaagtcaccaaagactgactactgcgtggcaagaaccctggggtctggccctgaacgtttcactaataatccctataaccatcagctccataggagagaaaatgatttggatcatttctaaagtctgttccaggtctaaatggagctggaatatgtgaataagtgtatttctcaaggcaaaagaatacttcagagacttcattgtgttctccaggaacttcactataggccaatgaagcaaagaaacyagctttgaacaaggccactggactcatccagggacctatcatttagccatgctaaaaggatttagctctcagaggtcaaggtagtcccaccgtggggacagtgaaaacacacacacacacacacaaatatacacacgcatacacacacaaacacacacacacacaagtaccacaggaagattgctgagctagcaggatttctttcatcactgatttgcttcaagttttgtctaaattagagtctcaaagtaatgaacttttgttcatcytcagctttaggaatatgtaggattgtggtgttagtaaacagtgcctgttgagtagaaccattactaatcaattatttctttatttctgaaaattcattaatgccccaccctgaaaaatcttctactcctttcatacctgggggagctctgataagtggatgccatcagtcttcagccccataactttaaagaggttctccacgttctgaggggacaggtggagttttttttcacccacttgacgtctttgtatatatcactcctacccttcaggaagccagagcccggaggcctgttggtagaatgaaaactagaattgacttagttgatgctgagtttctatgggagctttatcatgtgaatacagtaatgaggttccctccccatctctcccttcaatcgaacatggtgccgggtgcggtggctcatgcctgtaatcccagcactttgggaggcccaggcaggtggatcacttgaggtcaggagttagagaccagtctgaccaacatggcaaagcctcatctctaataaaagtgcaaaaattagccaggcatggtggcacacccctagtcccagctatttaagaggctgaggcacaagaattgcttgaacccaggaggccgaggttgcagtgagttgagatcatgccactgagccccagccttggtgatggagtaaaactcatctcaaaaaaaaaaaaaaagatcgtggttgcacctcaccatcaccaccactcactatctgcacatccccagtgctcatggggatttgctttaacttgggaatagtgatttattgatggcaccagagggctggaaccctgaatcacaaaaatcaatgcagaaaactgactgtcttagtctgttttgttttgctataaaggaatactggaggttgggtaatttataaagaaaaagaaggtttatttgttttatgattctggatggctggaaagttcaagattgggcatctgcatctgrtaaaaccttcaggctgcttccactcgtggtggatggcgaagaggagctggtgtgtgcagaggctgcacgctaagagaggagggcagggcagggagaagcgaggattgttttaacaaccagctcacatgggaactaacrtagtgagaactcaccactccagagtggaagggcgttgatatattcatgaacgatccactcctgtgacccaaatacttcccactaggccccaccacccaacatcgctacactggkgattaaatttcaacatgtgatttggtggggacaaacaaattatatccaaaccatagcattccactcctgccccccctagcaaactcatgttcttctcacattgcraaatacaatcatcctttcccaatagtcccaaaagtcttaactcattccagcatcwtctcaaaagtctaaagtccaaagtctcattagagactcaaggtaagttcctttcagctatgagcctgtaagatgaaaaacaagttatttacctctaagayacaatggtggtacaggcattgggtaaaccctgacaatttgcaattaagtaagaaagccatttgcatatttggaacttatggtttaattatgtcatttaatctccacaacggaacacttgttattagcattcccatttcatagatcgagaacctgaggctccataagttgtatcagctatacatgaatattaatccataccttaagagcagacctagaataaccaggaataatcaatcaaataaagatggagaggctgaaaagagaaaacaagactatcatgaaagtatcagcagatttcacaattccctgaaatccctagagcttcactgtataataggatcaccactatccacagggggctatttaaatttaaatgctaataataacttcagtgaccwcacatagtaactacagtactggacaggacagatttaaatagcatcttcatcatcacagaaaattctattgaatggcactgctctagaagacatcctcatgagtgaaggggtctattcttagaagatggtaatttttcaagtgctattgtccgagctgtatgtatgtgaagttcctagagtgcagaagggawctgctttctcytactaaagggacaagatgaagcagacagcctttgttcctagtttttcaagaacctccccacctgctcaggagacagagttgcttccatggccaaaagataggattcttggggtcacacaggcacacagtctttctctgagctctgtttcctactccatgtggcgtgataaataagtggattcaggccttccccaggaggctctgtcagatcttacgttgacatcctttcatcatgcagcaaaccacaggtaggtaacatcctaagctttagatttgacccatagtggggaacggggatggaaacacagggtagaaaatctcatttatgccttgagcctaaaccagaggtccacctatccctgccaaagctgcattgagtgttaatgacattgacttgggccttaataaaattgcaatttggttattatttgatattcctctgtgtaccaccccttggggaacctgaaaggtagaaattaacaagcagggaagtatgagggtacttcttggttgctaaacattaattatttctattaaaacttcatctgctatagtctgaatgtgtccgctccaaaattcagatgttgaaacttagtgcaatgtgatagtatgaagaggtggagttttctagagatgataaggtcatgagagctggtcccctcatgaatggaattaaggcctttattaaagaatcttcttgcctcactcagctggcttgctctttagccttccaccatgtgaggacacagcgttccttccctctggatgatgcagaactcaccagaaaatgcaacctgctgtcaccttaatcttagactttctagcactcagaactgtgagaaaataaatttcttttctttataaattatccagtctcaggtattttgtaatagcagcacaaaacagactaaatcaccatttcacaatcactaatatttactcaattttctttctctgtgacatgctattctctcctttctgaaagtctttattttcaatgacaatactctctgagttttctttctacctctgtggctcttcataaaaagtgcctcctctcaccaggtgtcgtcgtttaagtgacatcatctttaaacccttgtgtctttaaatccctgacacaccgctgtgatgcccagggaagacagggtgacctggaagcccaactacttccttaagatcatccaacttttggatgattatccgaaatgtttcatcatgggagcagacaatatgggctctaagcagatgcagcagatcygcatatccctctgcaggaaggccatggtgctgctaggcaagaacaccacgatggtcaaggccatctgaaggcacctggaaaacaacccagctctagagaaactgttgcctcatattcaggggaatgtgggctttgtgttcatcaaggaggacctcactgagatcagggacctgctgctggccaacaaggtgccagctgtggctcatgctggttccattgcccctgtgaagtcactgtgccagtccagaacactggtctagggcccaagaagacctcgtttctccaggttttaggcatcaccactaaaatctccaggggcgccactgaaatcctgagtgatgtgcagctgatcaagactggagacaaagtgggagccagcgaagccacactgctgaacatctctcccttctttgggctggtcattcagcaggtgttcgacaatggcagcatctacaaccctgaagggcttgacatcacagaggaaactgcattctcactttctggagagtgtctgcgatgtttccagggtctgtttgcagattggctacccaactgttgcatcagtaccccattctatcatcaatgggtacaaacgagtcctggctttgtctgtggagattgattacaccttcccacttgctgaaaaggtcaaggccttcttggttaatccatctgcctttgtggctgctgcccctgtggacactgctgccatgactgctcctgctgctgctgctaccccaactaaggttgaagccaaggaagagtcggaggaattggacaaggatatgggatttggtccctgactaatcaccaaaaagcaaccaactcagccagctttatttgcagaacaaggaaataaagacttctttaaaaagaaaaaaaaagtgccttcctctgggcatgctggcttgtgcctgtagtcttagctactccagaggctgatgtgggagaattgcttcagcccaggaattcaaggcttcagtgagctatgattgcaccgctgcactccagcctgtgcaatagggcaagacctcatctctaaaaaaaaaaaaaaaaaaaaaaattcagtacctttagcttatgtgtcttttgcgaccctttaaatgttgatattccccaagatttcatattcaactcctttcccattctgaattctccttgaaccatagtacctacatttatgattttacctacttaccatatattaatactttcattttctatttacatctcacacccccacacagagatactcaatgacctactacatatcacctcttggatgtcccacagataatccaaatttatcttatctcaaaccaaacttatcattttctcttcccattggctaaaccttttattttctccagtgtcagccaagacgagtcattgccagcaccactcatctgtgctgatcgattttaaccagaattatgtttgtgttatcctaggcttcttgtaaaagcctgagtcacagcactccacaaaaacaattaataatacatcaaagatatttaaaagataatattccatgctggtgaggatacactgtaaggagcactatcacatactcttacgatggagttgtacatttatacatttctagagagcaatttgatgatatgtattgttatcaatatcagaacattcctttggaacactcttgggtctstgaaataatgtagtgggacagaggccagactggcagagagaattttaagaaatcatactgctctggcctgcaccaaagtgagcagtaagcaacatgtcagggtgaaagtcttattacaaaaccaggggtgatgaagaagcagaagaagaacattttgaactggacawcgctaaagaggttggcacagatccacagcacttcagcattaccaagggcttgaaacccatgagaatcatgtgaagcaagtggagtctataaatattcaggaagaaatagtttgatttttttggttgatgcctccagagctatgtttgaatctcagagtgaagatgagttgactccttttgacatgagcatccaggagttggataatccaggggcaaaacgaattctagagcttgaccggtttaaggagcagcagggacaaaaacgtttccaagacctgatgggcatggatctgactactcactcagtgaagtgctgtgagtctgtgccaacaacctctttagcaatgtactgtacaagaggagtcatgttgttcaccaatgaggataacccccatggcaatgacatgccaaagccagctgggccaggaccaaagccaataatcactgagatacaggcatcttccttgacttgatgcacctgaagaaaactgagggctttgatatacctttcttctacagagatatcaccagcatagcagaggatgaggaccccagggctcactgaggaatccagaaagctagaagacctgttgaggcaggtttgagccaaggagatcagttagtgaacactcagcaggttaaagctgaagctcaataaagatatagtgctctctgtgggcatttataatccgatccagaaggctctcaagcctcctccaataaagccctatcgagaaatagatgaatcagtgaaaaccaagacctggatatttaatgtaaatacaggcagttggcttctgtctagagataccaagaggtctcagatctatggaaggcgtcagattatactggagaaagaggaaacagaagagctaaaatagtttgatgaaccaggtttgattctcatgggtttaagcccttggtaaagctgaagaagcaccgttacctgaggccctccttgtttgtgtactctgaagagtcactgatgaattagagctcaaccctgttcagtgctctactcatcaagtgtctggagaaggaggtcacagcattgtgcagatacacaccctgcaggaacatccccccttattttgtggctttggtgccacaggaagaggagttggatgatcagaaaattcaggtgcctcctgcaggcttccagctggtctttttatgttatgctgataataaagggaaggtgccctttgctaaaaaagtcatggcaaccccagagcagggggacaaggtgaaggctattgttcagaagctccgattcaaatacagaagtgacagctttgagaactctgtgctgcaacagtgttccaggaacctggaggccttggccttggatttgatggagcctgaacaagcagtggacctgacattgcctgaggttgaagcaatgaataaaagactgggctccccactggtggataagtttaaggaacttctctacccaccagattacaatcctgaagggaaagttagcaacataaaacacaataatgaaggtttcagaagcaaaaggcccaaggtggagtattcagaagaggagctgaagacccacataagcaacagcatgctgggcaagtttgccgtgcccatgctgaaagagacctgctggggtatgggctgaagagcaggctgaagaagcaggagccactggaagccttcaccaatcacttccagaactgaccagaggccatgtgtccagctgcccttccacactgtaaccaggctacctggccttgttctcagccagtgaaaacaggtgtctcctgatctaggaagagtctgcctgacagaagcagagggactttatcttcaggaggctttctgttgccatggcaatggtgtagccctcccactttgctgttctttactctactgcctgaatgaggagccctaactttgtactgtaagaaaaaagagagactatactgccctcctgatgccaagtgtcactccagccggcatcacaagggagtaaacaatgtgatgcctttgtttttttttgttttttttttttgtttttttttgttttttgagagacagagagagtcctaggctggagtgtagtggcacaatcatggctcagatcttcccccggttcaggtgaacctcccctgtcagcctcccaggtagctgggtctccaggcatgagccaccatgccttgctactttttgtatttttttttaagagatagggtttcgccatgttgcccaggctggtgtcaaactcctgggctcaagcaacctgcctgcctcagcctcccaaactgctgcaaagttctgggattacaggcatgagccatcaaacatggcatgatgtcttaagatcagtttatcagaatgatttttcaccaaagtttatactgaactcatcttcaaatcacatcatccatgttatcctctcaagtcatttttcttccatgattataacaactcacaactcattatgtcaggaatcaaggctgatgatagaagtytggctgcaaatgcagacatctctcccaatttgaaggggtttatgctcatgagtctcatctagtgctagtttctttctcttgcaccttcttagaatgctagaaataaggccccagtcagccagcctcaagacaytctggtatttccgttgcaatgagatttatatagatcctaagtagctaatatgaaaacagcaaagaattctaactctgtcaaactatactgcaatcataaaaggagactttctactcawttgaaggggcactttctgatggcaccctggtggcattttgcattaaataaaatttattttgcagtaaataaaatgtaatgcaaaatgccatcaggcaccaccagaaagtgccccttcaaatgaatggaaagctctattcagagaaatcaaagaagcaaagaatacagaccacctggcgaacgaattggagatataatgtggtactttagcctctagggcctggtgcccacaatggtggtgactgaagtggtgcacccgaaatctgtttagggatctccattctctcttatgtcttctcaacatatatcaggaatctccagaaatttattctcgattcctcctgaataaatttatcctaagtcaataagtagagacatgagaaaagatttgtggtctaggatgttcaatgcaatataatttataaaaaattaaaaatattagaaacaatctaaatgtccagaagatattataaattaaaatactatgaatattattctgccattaaaaattatacattggaataatatgtcatgaaagagtgctcataatacaatattcaataaaaaataggatataaaagtgtttataaatatcatccaattaaatatctaaatatatgtgtgcattgaaaaaaagagttgaggaaataatggtgagattagaggagattttcctgcaatatgtagttattatctttagaataaaaaaaagaagagacattaggttgtctctgactaattaattactacctggtgatatatagtttttatttacatgttctcttcctccagttagatttgaatatcctggaaagtaaagatctttgctattctttggtgtttctgtcataacacagagctttttgcacacaaaggcaatcaatcagtaagtctgaggagaaatagctaataccatcagttcaatgatcacttctaggaaggccatatggtcaatctgtcaacaaaatgagtggtggctaacttcattcttctacagcaatgaaaataccaaaattccaagtgtaaaggaatagcaataaaattagggtcacacacatctgagttccaattccaacttcaccacttaatggctaagtgattttaaccaagttacctacttctgtgagcccgtttgagcacaaataataataccactcctcacagtggttataaaaattaaaggcggcggccgggcacagtggctcacacctataatcccagcactttgggaggccaaggcaggcagatcacgaggtcaggagatcgagaccatcctggctaacacggtgaaaccccgtgtctaccaaaaatacaaaaaattagctgggcgtggtggcaggcacctgtagtcccagcttcacaggaggctgtggcaggagaatggcgtgaacccaggaggcggagcttgcagtgagcaaagatggtgccactgcactctagtctgggtgacagagcgagacaacgtctcaagaaagaaagaaagaaagaaagaaagaaaagaaagaaagaaagaaagaaagaaagaaagaaagaaagaaagaaagaaagaaagaaagaaagaaagaaagaagaaaattaaagaaggtacaatgcctggcaaattgttggtattttcccttttgaagcatggctcattttactgagaaaattactttgtaaataattaaaattgtcatcagctcccacattttgttaaatatcttcttttgaagaactcaaaggatttaaaattaaattttaaatgatatctgttttggacagaatctacctacatctggaaaactggaggccaaattttttctttttgctgaaattagattttttggtattttcttggaaatctcttgctgttatatcaaatctgattaaggagggacatccaacttcccagcgactagagttaacattggatacaaaagacacatagagatcagagagatgagtaaaatgtttcagctcatttattttcaatagcttctctaggcaggagaaaaggagaatggaaggaacttgtaaagaatgacaagttttatgaggcaaaaagatatcactttcatgatgtaatagtaggaaggaagattacctttgataaaatagttatcttagaactgtagttagaaatggagtgaaatggagtgacatttcttttgtgttctttccttayagtatgaggatattataatgaatttaataaggtcatatgaaaatttatttttttattattatactttaagttctgagatacatgtgcagaacatgcaggtttgttacatagatacacatgtgccatggtggtttgctgcacccatcaacccttcatctacattaggtatttcttctaayactatccctcccctagcccccccaaactccgacaggccccagtgtattatgttcccctccctgtgtccatgtgttctcattgttcaattctcacttatgagtcagaacatgcagtgtttggttttctgttcctgtgttagtttgctgagcatgatggtttccagctttatccacgtccctgcaaagaacaggaactcatccttttttatggctgcattgtattccgtagtgtatatgtgccacattttctttatccagtctatcattgatgggcatttgggttggttccaagtctttgctattgtgaacagtgctgcaataaacatacgtgtgcatgtgtctttataatagaaagatttataatcatttgggcatatacctagtaatgggatggctgggtcaaatggtagttctagttctagatccttgaggaatcaccacactgtcttccacaatggttgaactagtttacagtcccaccaacagtgtaaaagcgttcctatttctccacatcctctccagcatctgttgtctcctaagtttttaatgatcgccattctaactggcatgagatggtatctcattgtggttttgatttgcatttttctaatgaccagtgatgatgagctttttttcataagtttgttggcctcataaatgtctttcttttaagaactgtctgttcatatccttcacccgctttttgatggggctgtttgtttttttcttgtaaatttgattaagttccttgtagattctggatattagccctttgtcagatggatasattgcaaaaattttctcccattctgtaggttgcttgttcactctgatgatagtttcttttgctttgtggaagctctttagtttaattagatcccatttatcaattttggcttttgttgccattgcttttggtgttttagttgtaaaatctttgcccatgcctatgtcctgaatggtattgcctaggttttcttctagggattttatggtttggggttttacatttaagactttaatccatcttgagttaatttttgcrtaaggtgcaaggaagggggtctagtttctgtttgcatacggctagccagttttcccagcaccatttattaaatagagaatactttcctcatttcttgtttttgtcaggtttgtcaaagatcagatggttgtagatgtgtgacattatttctgaggcctctgttctgttccattggtctatatatgtgttttggtacaagtaccatgatgttttggttactgtagccttgtagtatagtttgaggtcagatagcgtgatgcctccagctctgttctttttgtttaggattgtcttggctacatgcgctcttttttggttccatatgaaatctaaaatagttttttctaattctgtgaagaaagtcaatagtaacttgatggggatagcattgaatctataaattaccttgggyggtgtggccattttcacgatattgattcttcctatccataagcaaggaatgttttacatttgtttgtgtcctcttttatttctttgagcagtggtttgcagttctccttgaagaaagaagaggtctttcacatcccttgtaagttgtattcctaggtattttattctctttgtagcaattgtgaatgggagttcactcataatttggctctctgttagtctattattggtgtataggaatgcttatgatttttgcacattgattttgtaccctgagactttgctgaagttgcttatcagcttaaggagattttgggctgagacgatggggttttctaaatatacaatcatgtcatctgctaacagagataatttgacttcctctcttccgatttgaataccctttgcactcagagaaacatatgaaattaaaggatttattatactcacaggccctagaatgggacatggaccacaccatggaaggggcctcatggtaagagtaccaaagaagtgggctcaaccaagcaggagtggagccaagagaaaagacccctgggcaagtggatttactaggagtccaggtgaagtacacaagcaaaaaacatgagggggtttcatcggtgcatttgaatgtctctaggtcacagtcaagttatggtaaaaaggtgaacttgtagtagggaccagcttcatcaaactggtgcacttggtttcttatgcaaaatgctcacagcctgtttgtggacatgttgagataccagaaatatatgaagctttaaaaatttacaatacacccttcctctgaaaggaagttcaaagatggtggcaataataagcttgggctgtttgtgtattaagcaatccagtcatttcagcaggggaaaaaaacagtgataatgattggctgaattttagtgtgaaccccatctctactaaaaatacaaggctatttaatgctatgtctgggtacggttccataaaaaaatggtctcattccccaccgtgctttgggaaatactgcttctgttagttataatatcatccatattgcagaattcttgatccttgtcctacaaaatctttggtatgtggtttttgttctcctggtctcaagatggtttctctatgtccttcagataccacatcctcattccaagcaggaggaaggagtgaggacaacagagcgagtgtgccagccagtctttgattttttcaatgaaaaataatagttttcctagtattttcacccaatagaatgcagcttgcatctcaccggacagaattatgtttcttgctgattcataagtgcaaaaggagcctggaaatcatcatcatgaaacattttttctctgcaagttcatcggatactctatcaaatccattttcatccytagagacatctctcctagtatgctctgtcatcctactccaatctgagctggatacactgtaggcttgatgcttagtcagaaacttgggacacttatatttccaccatcttacaaattctcctccttattcgggtgttatatcctctgtttctttgctgcttagtttttggtttactcccttgtttggtggtgcccatccttcagtagctttttgaaaggggaagtaaatttttgagacattgcatgtctgaaaatgtcttctatctagtatcagactcgactgatagcttggctgagtagaattttagattgaaaataatgtttctggccaggtgcagtggctcatgcctgtaatcccagcactttgggaggctgaggtgggcggatcccctgaggtcaggagtttgagaccagcctggccaacatggcaaaaccctgtctctactaaaaatacaaaaattagccaggcgcagtggtgggtgcctgtaatcccagctacttgggaggctgaggcaagagaatcacttgaacccaggaggcagaggttacagtgagccgagatcgcgcyactgcaccccagcttgggcaacagagcgagactccgtctcaaaaaaaaaaaaagaaaaagaaagaaaagaaaagaaaaraatttttctttggcttttgaaggcattgctttcctacgattccagtgattgagaagtctggtcccattgttattccagaagttatgtatatattctatttttctctctgaagatttacagtgtgttctatcactggtgttgtaaaagttggcttgattccttatttattaggcacttgtgggcctttgtaatctggagatttatgtccttcaaatctaggaaaagttctcttattacttctttgatcatatactttcatttcctctgttctctttatctagaatgacaattaaatattgcacctgttggatgctccttttagtttattgtttttgttttctctaattaaccgtctctcttcttatttattctactttctcatgattagtgtttgcatgatatatcttttctatcatttcacttttaacctacatgtttcttttgatttcatgtacatctcttgcaaacaaatacaatgtgatcttgctttttatccaatctgacaatctttgcctcttgatgggtttagttcatttacatttattgtaattattgatatggttggatttaagtcttgctgtttgtttcttattcatcctatgtgttctttgatctttttacacctcctttcctgatatcttttgaattagttaatactttaatacaatattaaagcatacagcattttaatacactatattaatacaatatatttaataaaatatttaattgtatctattgcctttttagttatacttcttgtttgttttttgttctaccttgarttaacattttacagttcacatgtaatgtaaaaagctaacaacacaaggctgtcacttaaccctacttccgtgttccttgtgttgattttgtcaaaaattttagttctacatatgttataaaactcacaatayattattattatattcactttgaacagtctattgtcttttagaatatcaaggaacaagaaaaagtattattattattattattattattattattattattttgagacagaatctctctctgttgcccaggctggagtgcagtggtgcaatctcagctcactgcaacctctgcctcctgggttcaaacaattttccccctcaatgttagagtagctgggactacaggtgtgtaccaccatgcctggctaattttatatttttgttaatagagatagggtttcaccatgttggctggtctcaaactcctgacctcaaatgttccgcccacctcggcctcccaaagtgctgggattacaggcatgagccacagctcctggcctcaaggaacaagaaaaaagtattttttaataattactcacatatttactatttacagtgttcttcatttaggtttgagtttatgtcattttccttcatcctgaagaacttactgtaacatttcttgtagtacaagtttggtggtatcatattctgtcagcttttttttttttttaaatatcttctttttcttatttcttttctttttctttttctttgtttttttttttttttttttttttttttttttttttgagacaggtctttctttgttacccaggctggtctagaactactgggctgaagcaatcctcctgcctcagcctcccaaagtgctgggattacaggtctgagccaccactctcagccttaaaatatctttattaccttcatttctaaagcatattttctttctaggctaatagtttattttttctctcagtacttttctcccatcagtacaattgatgtcattcagttgtcttctgtcttgcattagttctgatgagaagttcagcagccatatttattattgttgtcctgtatttaatacatcttttcttcctctccaattgctttcaagattatctttgatttagcaattttattatgatgggcatggtatggttttctttgtgtttatcctgattgaggtaagttgagcctgttggatctctaggttgacattttccatcaaatttcaattttttttagtcaaaatgtcttcaaacacatttttctgtctctcctttgccttggactctaattacaaatatgttagaccactcaatattttcccaaaggtcactgaagttggttcttttttttctgcagtcatttttttttctctgtgcttctgttttgctagctcctattgatgtgttttaaagtttattgatttttttcccttctgcagtggtcaaattaatgttaacctcagtcaataaattttttatttcatgtttttttttagaacttccacttgcttcttttaaatagtttccatttctgtatttacatttcccatctgatcattcattttttatatattttctgttatacccttgaacatatttgtaagttattttacagtctttgctaactccaacacctgtgccatatctgggtttgcttctactgaatgtcatttctccctattatggttcctgttttctaatctctttacatattaataatttcttttattgcaagttggacattatagataacacaacggattttactgtcttcttttaagactgttaagtattgctcttgcagatagttaactggtgatttagtttaatcctgctgaagcttagtttcactatgtattaggccaggtgaagagttacctttactcgaggactaatttagcccttcccttaaagtgtaacctttctgtgatctcatctaaatattcagagtatatagaatggtctcttcactctgattggttagaatttaaatgcttccccagcactgtgtatcctccaggatctccagtcgatttcatggagtcttcctatctacatgtgcagcttagtatttgaccaaagattgaagaggactcccttgcagaattctaggtctccctctccgtgcagctttctccctcccagtaccttgtcatacatatttcagctatttcatccctgaattccaatttctgttttcatcactctctggctccctttccttatggcatattttggaaatgattcccaagcagacatccagggtgaatgtggaggttactgtgcattttccccttttctcaagaagcttaatgtcgcagtgtttgatgtttagtaacagaaaaatcgcttcatatattttgtgcagttttatagtcactagctgtaggaaagtaaatccataccagttacttcattataattggaactaaaagtctgattaactgaatttttcacttttgactttatattttcaatgcatatataataaaatttaattcaacacttttaaagggacaatttttgtagtgttatcaattctaaaactcctcacccccagtatttagtgatcaggataggaaaaagtgagaggttttaactgagggtaggtgatataaacacttacagcatattgagttctcactataaagtgaggcatgggtcaaaaagtatacttgtcattggaataatccaaggcaggcttaaattccttccttcactggctacccagaggcttttaacattagcttcaaataaagtggttcccaacttaggaacggagagaagattgtgccagaatatatacatagtggtattttctattgtaattctgacacttagcttagtgaaacaatttgctggacccagaaagcaccaacagacaatgaaaaccaatgttccaaagaaaagtttatttatttatactctaatacatgctgtggacagaaacagcagctgggcttcttttctaatagctgcagagcctgagtctgcacttctgtggttctgaaggttgttagtatactcctcacactcttacggattcargtcttgcctttctcaggtgttgagaatctagcacttgatagtctctcagcacgggaatgctgggcctaaactaactagtattcaggtcccaggtgcttcctataagtggtgtgtccattagcaagttaccctgtctaagcgttggttcctcaccagtcacatggtagaaagcaccactctttcagatatttgcttctgccctgccaagctgttggcactaaagatccatcactatctagaggcagtgcttgcaccagtgacaggggtctgctaaaaacctccttctcttagaagagggagctaggcactgatctcctgcacatgcacctgcctcatgcctgaactgagtagtaaaccactatgttccacgtaggcaattgaccatagacaacttcacctaccagattgctcttgtcctggcagtgccttgctctctcttgcccccagggttatatagaagctgtttcctctgacagaaatattcttccctctcaaatcctcactccaactcccatccccaactcatccttcttggtttactcccattctgtcttcagatctcaacccaaacatctcttttccagggaaaccttctttgatctagatagactaggtttaagtctctcagcagttgagtcccgtaagaacctgtgctgtagttggtcaatcgcaaatcactgcagcctcaaccccccgggctcaagtgatcctcccacctcagcctcctgaatagctgggactacaggcactcaccaccatgcccagctaatttttaaattttgtgtagagatgggctctcgctgtgttgcccaggctggtatcaaactcctgggctcaagtgatctgcccacttcagcctcccaaagtgctagrattacaggtgagagccaccatgcctggcctgcttctctcaatatagcaggcatcgcaagtgcaaatatttaatatctgttttctctgctagattttaaactccaggggagcaggagtcatgccagagatctccaggacctaaccctgaaacatagtagatgctcaataggccactgttggtttgagttgttaactttagtggtgatgcacacatgcatatatatttggagtatgttgagtgtttgaagacacagtatgcagaaatgggaaggcaaggtgagggtttaagaaagggttcagcagaaaggtctttttacagcttatctttttatatgaaaagcttcacacrtcgaaggagtcagatggcagagtagtgactgaaggattcagagttgaacagctgagtactctgcccatgaagttccttaaggaacctttgctgaatatgagacagaacaaaaacactcagtgtcacagaacaacctctactcatctgtggttggtaaaaatggatggaaactgaaagtatttgaatcctggccattgtcctgtttggccaggactccagagaagccattttacatgctcagcacctgcctttcttctttggtgaaaatcaagaggcagacagtatgtttatggtagtgacagctgtcttcttttttatactgagagggtaaaattatatagcttatctttaagtgtgagaaagccaaatacaagaacaaacttcttgattctaaagaagagattctcaacacgggtgagaggattgaaaaggagaggaggaagtgaccttgattgtaaaaaatgtgtacattttatcacaatgtttcagaaaattgattgataggcaggttgctttatttttccttttatgtaatgtatatgtaatattacctaaaggtgtgtgtgtgtgtctgtttaggcaatattacctaaagacatttatgtatgtatgtgtatgtgtgtgtatgcatgcatgcatgcacactaacgagagaaaaataaagcaaatatggaaaaatgttaattggtgagtctaggtgaaggatatatattrgtatttcctttcattttcttgcagttttttgacaaatttgaaattttacaattaaaaatatcatcataattaataaaggaaaatctttgaatttaaaaaacatatttagtccatccaagaggctatagaagctttatttactgacctttacatttttctccccaagattccatctctcgtctcacaagaatgcatttgaatttctgctggaggccaaaccctcccctgtggccaccccttccagacatggggctaggccggctgagtctttagagccagtccactgccctaaagatagtgacattgaagccacttaccaaaggaggttatgcatcatcattctcctagaggtttttatatgctttgaagttttagatagactcttccttagaggcagaagtttgaaccagataaagcctcccaagttcctttcaattacaaatttgtctgagtgctgaaaagtgaaggtttagagtctctggagtaagtattacagttctctttctctccccttgtgatttgactgctcagatttttgaagctggcacgtagctttggttttcctctgctttgttttcttttctgtctcctgaaagagctgtgctccagtgtctgcccggtaaagttgctagtggcagcattcctggaagctccttgctccagatgatgtcagacctcatgtgacccaaccatcgcacgcccggaaacattacatcattctaagatgtgattccttttaacacagagcttgctgttattgtgctgctgctgttgctgctgttgttgctgctgctatgagcagtaagccataacctcaagcagaggccgctttgtacagaacagcaatagactcacctgaggatcatgctgtaccccaaaaaatgcaatgacttctggggcaggccacgtgccacattaaacatgaataaaacatttcataattaaaaatcagaaataaaataaagatgatgattttttttcctggcaagacatggtaacacgtagttcaaattttattgagttagatatttgggcatgtcaggttcgcattatgtgggcaaatgtacctgtgaatggtgcctgctgattggctgaaggaaactgaccctgagtgtgtaattctcataggtatatgaatgggacatgaaacccatagagggccattaaaagaagacaaggcaggctgggcacagtggctcacgcctgtaatcccagcactttgggaggctgaggtgggcagattacttgaggccaggagttcaagaccagcctggccaacatggtgaaaccctgtctccactaaaaatacaaaaaaattagctgggtgtggtggtgcacacaggtaatcccagctactcagaaagctgaggcatgagaatctcttgaacctgagaggcaraggtggcagtgagctgaaattgtgccactgcactccacctgggcgacagagcaagactgtcaggaaaaaaaaaaaaaaaaaaaaaaagacaaggcatttatggctgagcatggtggctcacacctataagcccagcactttgggaagccaaggcaggaggatcgcttgaggccaggagttcaagacgatcctgggcaacatagcaagacctcatytctactaaaaatttaaaaattagctggacatggtggcgtgtgcctgtagtcccagctactcgggaggctgaggtgggaggattgcttgaggctgggagattgaggcggcagtgagccttgattgcaccactgcattccagcttgagtgacagcacaagaccctgtcaaaaaaaaaaaagaaaaagatatttgtaattcatatcacttcaaaataattatacaagcaaaatcttagcggtgaagggagtagaggaatattcaatacccatcggtaaggacccttataaaaacaacaatttaaaaaacaaccatttcttgagctcttaccatgtgcccagacactgcgtcaagcaacctcgtggccttgctaacagcatgactaagtagagtgccctttgctttagagtggtcttaaccttgtgtcctaggggtgtcccatcagggtccagttgaccattgctccccacgcagtaacactgagctctactggatcacccccttgctattcggagcaaytcaaatgcatctgcacttgcatcagtgcttcctggagacaagctcaggcccaggagagagggcatcagacagtcagtggatcttagcagtcctgcaggcacccagccatcgtggtagccctgaggaaagcagatgactattaatctcattcaggttcaccgggactgtcgtcaatcaaaatgacttttgtttttatctcctctgagcaayaagcctttggtgtctgccatctacacagcctcctgcagtgctcacctcctgtagcacttcatgttgcatccccacctctcatctatatgctcttccccgaaacttcctccctttccatccccagcccacccccatgtgtatttaccttagtcttttaaaactagatcaagagtccaggaagtatttgtttcctttttcactcaactgttgtgttcacccttgcagctttcccaactagctgagcccctctggatcctgcctgtctgccaccctggtctcctagcaaccctccgytctgcagtctgggaggtggatgtgtcaaagggagtctgggcggcagaggtgagaatgcaaagaaatctctccccttctaggccctgaagtacagaatcgctgcttcacagtaatgaatatttcagaagaagagattcgctttccctggcatagctgaaataggcctaagggtaacaaataatttgctaaggagggcaggggttcctttgtgccagaagcagagatttgtatttgaaagatacttaatgatactgcacatggcttgccctaaggactaatgaaaaaacagtgagttaaattgtgatatatttttgatataagaacagagaggtcaatgccattcataggggatgcatttgagctgttctttgataataatgtaattttagakccagaaggtatcttaggatcatgttgtccaagtatcactttttttgtaacctgataaactaaggcccagagaagtcaaatgtctcagctgggggtcttccaataagagaagaatggggttgggactggacccctctctcccgaggctcagtctggtgctctttctgtcaccccatgctgccttccagagtcagtgtagacatgccacactagctcacatcactcaaaggtacaggttgcaaaacagctggatatttgaggaataagtcttgtgttgtagacagcaaagaactaactaagccacctgacctgtgctcttggcctcagtagcaacttgtccttcctggttgagctgaccaagacagacaatagtgaggaaatacaaaaagctgatcactagtcacccatgaggtttatactgaaagactgacttcaggcttatccatccttagtttagggtcagaggaaaggcgatattaccctacacccacagtgactacagacaaactgttaacctaaaacagggggtattttttggtatgtttggcctctagaatttctcatcaaaattcttcattgtgaatgataaaaatctaattccaactatctttaaacaaaagaaaggaattgataggcccatgtagccaggcataataaagtagggtaacttgaagaacctgaaaaaagatgttggctccagggctgaagaattgggatcatgattcaattctacatccagcttttctctctgagtctctgcttaactctctgatctgctcctatagcaggtcttctttgtttggttacaaagatagtcacagtcttctaacttcatatccttatggtaccatgaccccgagaaaacaccactgcttctcttgtttttaaactcagaaatctcagggaaggactttaataaagtcagcttgagtttttaccttcccctgaaccattactaagtgggaaggaatggagagctgtgattagccagacctgaaactggcccctgcctctgcaaagggagtgaggaggagggaaggcagttaccagaataaagggtgatgagaaagcttgcttggatgacaaaaagacaatagctagcaacgtccattacatcttgttttccacaagtggtggaattgagcataatttccattacckcttgctattcctccctttagcccacacacatatgtgtggctatggaccattcataaatcaatgtggataattgcattggtggtccaaggaattcttggtgagttaatcagacttgtcaaaattgatccatagctggctgggtgtggtggctcatgcctgtaatcccagcactttaggaggtcgaggctggcggatcacttgaggtcaggagttggagaccagcctggccaacatggtgaaaccctgtctttactaaaaatacaaaaattagccgggcatggtggcagatccttgtaatcacagttacttgtgaggctgaggcatgagaatcacctgaacctgggaagcagaggctgcagtgagctgagatcatgccactgcactccagcctgggcaatagagcaagactcagtctcaaaaaaaaaaaaaatttgatccatatccgtagaccagaccctgcaagagtcctccaaggactgcagggcaggaggcaggcagtatgctggaggagaaagcacaagatctggggtctaggcctagttttgtcactgaccaagtctgtagccttagggacttgtttagaaaatgggagaaggtggcccaggaagtcattaagatccatctaaccctaatatcctacaggtgcaattcaggcgcagcagcagagcaggtcactgccccctctagtggttcatttaaagcagggaaggagctcaggtagtctcaatttctcatcaaaaggaggaataacttctccacagagcctgacaggcacattcccaaggaacgaagttaaaaggcaaagttctgagggcagaaggactccactgccttatcagtccaagccctggagaagtgctaaaaataggaaactgctctccaaaatggaaatgtgtagccaccctgacatctagtccccaagacatcatgggttcaaccagtaggtggtaggaattggaaagtgacagtagggaaaaaaaaaaaacaacaacaaaacaaaacaaaaaaacaccagtttggaaaggatgtaaatcactgtgtacagtagaggatgagaaaaagagggagactagcctcaaaaatgctattgatcaaaactcatttattctggaaatgtttactgagcatctattgtgtcctaggcattgattataaataatagcactgagaataagaggatgttacagacttcctgggggtcttattccagtacagaacacaaacattacataaataaaagtatagtaagtgctataaagtggaaacctaaacctaaggtgttctctgaactcataatagggggcccagaccttagctccggtatcagagaaggtatccctgaggaactgatctctaagctgaattatgtgagtactagggggtaccaggtcagttgtgtggggtagacagtaaagacaacaaactgtatgcacattgtttgtgagaaataatttaaattttttgaaaacattatttaggcttggcgcagtggctcacacctgtaatccccccactttgggaggccgaggtgggcagatcacttgaggtcaggagttcgagatcagccaggccaacatggtgacaccctgactctactaaaaatacaaaaattagttaggtttggtggcgggtgcctgtagtcccagatgctcaggaggctgaggcagggagaactgcttaaacccaggaggcggaggttgcagtgagccgagatagtgccactgcactccagcctaggcaacagagtgagactccgtctcaaaaaaaaataaaaaaaaaaataaataaataataaatgattattacatgctatgctctggggatgcaaagatgaataaaatgcaaagttcttgccctcacagatagcaatctatgaatcacagaggagagggtttggagccaataatagctgtattcccagaagtctgtggttgcaaattgaggatggttatgattttactagaaatgttggaggatataaaaggtgaaccttttcttaataaacaccacacttcagggacttagacctttctggacatgcattttgacagagtgcacgcctgcaacagctgaggaagggaggcagcctgtgttctcaagtgccgcgtcccagcatcygcatgtcatacttgatacatgatgcataaattaatcacattgcttccctcagactcttcagcctcatccactgaattcattcagaatgtggaatggatattgagacaaggggcagggagaaagcgatggccaagtaatgcctggcacagagtaggtattaaaaagcgtttgccaaaggcatggttgaatgaatgagtacactaatagctcaaactggtgttgaacaactagatgatgagaaagtataattgtccctcagagatccaaatgagattctgaaaggattttaagaatcaaaagaagtcttttatttgaggcaaaactaacttcatgctttttgttggccattctcactgctcagcatctgaggcttgaaaccttcctgtctgtaagcaataactcagacactggtaagtgcgttcttctgttattgtaaagatgaagaaatccagccccagctcagcaatgcctgggctgaggaccacttagcaaggtgctgagatagaataaacattaaaattcctcttcccttcacacttagactttatttcatggagtcagcacgtatatcaaagactcagaagagaatatgttggaaattaaatcattcaaaacatacgggaggtctcatcatttaaaggatggccattgatgatccctttttcacaattaacttcttctaactgatgctctgtgtgaactttcaccctgagtttctgaaaatgtggctgagctttaaggctgaaatttgtggtgaaaaacaaacttcagtttattatctaaaaaagacttaagaaattttcacctcatatcagtaaggactttttgttataaataatcaaaaacaactccaactgatttaaagagaatggaattcattaaaatgatatgtgtgtcatagaatcacaagttaaggttgaaaaaccagaccagggcaatkaatcaggagtgaagcctcaaatcacaccctagaaccggccccctgcagcctgcacaccttcacgctgcagcttgcaccactgacaatgcattgattaagattaacttcagcagcaagtaacagagaccccaaattaccgaccttaaataagacagatgtatacttctccttctcatatgaaagtctagaggtccaggactgatcggtaaattctgttgcttgaaggccccagagatgcaggcaccttctattttcttgctcccctatrctgggcctccactactgtagttttctcattgtttatggtactaatccagcttcagccatcctgatacacattcaagccaaaagaaaagaggaacggatgaaactccagctgtcctttaaggaagatctcagaagaggtcaagcaacacttctagttacagctcattagccagaattagccaaacctggcccccaaggacacgggataatatagtctttatcctgaatggcatgtgcccagttaagaagaggtttcattactgtggatgaaggaaagaatagacaagcagcaacctctgccacacatagcaagcatagacacaaagcactaccattacctcagctgtccctgctggtgcccaagaactcaggttttctataatscttggcactgcaaggatctccggtataggtgtatgtgattggcagggcaaaggtcatatgcctacagcccagggaaaggcagtttgagaaatgaagtgtctggcctaatcagcatttagagtggggaacagactccacatgccacaatattcataagatatgaaaatgcccaaacatagagggggtggaagtaccgagttgcctaaaagaatgaacaactccttttcttttttgccaccaagcctatttgaattctagatagacccttaaataattataattctagacaatactgattgttctgttcctcatgtgggattccgttgtgaaactatayaaaaaatattacttttggcaatggtttcctaggtatgacaccaaaatcataggcaacgtaagcaaaaatagacaaataatattctcctaaacttaaaaactttgtgcatcaaaggacacaatcaacagtgaaaagagaacctgcagaatgagaaaacatatttgcaaatcatatatccaacaagaggttaatattcagaatctataaagggctcctacaactcaacaaccacaaaaaaatcaacagcctaattaaaaaatgggcaatggacttgagtagtcatttttccagagaagatatacaaattgacagaaaagtacatgaaaagatgctgagcatcactaattattagggaaatgcaaatcaaaattcatacccattaggatagctacyattaaacaaacaaacaaaaaaaaaaaaacagaaaatagcaagggttggcaaggatgtgggaaaagtgggaccctgtagactgttggtgggaatgtgaaatgatgcagccactatggaaaacaatatggtggtttctcaaagaattaaaaatagaattacccagccgggtacagtggctcatgcctataatcccagcactttgggaggccgaggcgggcggatcgcgaggtcaggagatcgagaccatcctggctaacacggtgaaaccctgtctctattaaaaatacaaaaaattagccaggcctggtggcaggtgcctgtagtcccagctactcgggaggctgagacaggagaatggcgtgaacccgggagtcagagcttgcagtgagcggagattgtgccactgcactccagcctgggcaacagagcaagactccatctttaaaaaaaaaaaaatagaattacccaagattcagcaattcyacttctgggcatatacccaaaagaattgaaagcaggtacttgaacagatatttgcacactaatgctcatagcagcattattcacaatagccaaaaggtagaagtaatacaaatgtccctatataatgaaatattattcagccttaaaaaggaaagaagttctgacacatgcaacaacatggatgaacctcaaggacattatgctaagagaaataagccagtcacaaaaaaatgaatactgtatgattccacttacattaggtgcttagaatagtgaaattcatggagacacaaagtagaatggtggttggctgccagaggctgtaggtaaagagaaatggagagttgtaaaatggttaatggttcagctgcaatggaaagcagtttcagttttgcaagatgaaaagagatctggatattggttgcacaataatgtgaatgtacttaacactactgaactgtacatttaaaaattgttaagatggtatattttatgttatgagtattttattataattttaaaaaatactagtactacttagtactattttcctggtgtacacagcagtgggcaagattttcaactcccttggcacatatcttgcacagaatgtgaaaccacttagtacagagacaaatgataaaaactgtggcacacagctgaaatcatagaagtctttgctcttgaatgagaaaaaggggcatttttttctttaattcaatggaatttatcttttatggatatagggaataagatttttccacttaattaattatagttttagtgttctatgaagggttaattcacctttctcttttatagaaaaaaaagttcgggaattcaaatataagcgtatgagtgggccagacccacaattctcagaaacatgcarctgtagggaataaaagcaagtgcaacttaccaatcccattactacctgaaagtacttagcagtaactatcatttgcctcatgttttacagtctacagaaagctgtcaccgactatatgttatttcatttgaacttcttaataaccctaagaagtaattaaacaggtatcatttttcctatttacaggtgaaaactatggatgccggaggataaattacatatccagagttagagaataacagagagggtgaatactaaaaccagaaggcaaaatctatttccttcaatcacattatgtgtctccttagcacttagaagaacaagctgattaatacaaaaagcaggcaaggatgctatgtcttttmaacatatgtactgatttaattttcattcagatttttgtgctttgctctttcattatatttttttccaaagaaaaaaaaaacctcaaagtttattttaaataaaagcaaaatgtaaagctcttaaaaagaaatttgagagagttctggttctagctacaaggaaaactacaaatatctgacaaactttcagctacaagcacgtagaaatgctggataaaatataacacatactcttttaaatcatagctaagggcaccaaaccaaagggaacatcacaggtgatagaaatgaaaraggaaaactgaaaaacagagaagcaagtttatgggctgacagagactatgtcagagcaacaggctgtctcagcctttgtaatgcaggcagctttaatgcccatttggaaaatggcacttatgtcttaagcttgcccaaaacagagtttggaactgagaacctccttcataaaaccattatcctaaaagggctgctccattagtgaaagaatagtttaggaaacaattcaccttccagccccgggagttaatgggagttaataaaagagctcgtctgagtagtcctggctctgtgtgggaaaaagtctccctgaaaatttaactatgggaatctaactcctcaccaccccggcaagcaagccaaacaattaacatataaattggttcaagcttctgatactcttattacatctggccagggcaaaccaaaacctactccagaagagcacaccctcaacccaggctgcacagggttcccacacataaattttcctaaaaattagataacagtccaaaattacaaaacagatgaagaaacaatccaccctgaataagagttagaataagatccccaagaatatttgatattgaaacaatctaatagaaatcataaaataagtatatttaaatgtattaaagatataaaataagaaattgaaacgtaaaaaataaaattatactgtttaaaaacggaagattttttgaaagaaccaaatgaatttctaaaaattaaaaacattgtaatcaaaattttaaattacaataaataggatgaatagtaagttaaatatagctagagagataatttgtgaactaaaaggtaagtcttagaaaattgcccaaactacagctcaaactaaagaaagagattaaaaaaaaaaaaaggacaggagaatgaaaagtgaaaacacagcatatgttaaatagaagttccaaaaggagatagaggcaattttgaaaagcaatgaagaattaatgactaggaattttctaagatgaatgagaagacatgaatacccagtctcaagaagccaagagaattttgaaatgtataatataaataagtttatgcatagaaacatcataaaaaatattttcagaacaccaaaaacaaataggtaaactaaaagcaaccacagagaaaagataaaaacatcttcaaaggaagaaatatttccggcagactactcaacatcaaatacaggagacagaagaaaatgtaataccttttaataataaagtaaagtaactcttaacctaagaaactataacaactttatatactctttaagaggagaatgatacttacacattgtcagaaaacactgaacgacctacattcatgaatccccaaggaaaaatactatctaggaatgcacttttcacacctgtaatctgagcactttgggaagtcgaggcaggcggatcacctgaggtcaggagtttgagactagcctggccaacatggcgaaaccccatctctactaaaaatacaaaaattagccggatgcagtggcgtgcacctgtactcccagctacttgggaggctgagagaggataatcgcttgaatccggagggcggaggttgcactgagccgagatcgtgacactgcactccagcctgggtgacagagggagactctgattcaaaaaaaagaaaagaaaagaagaaaaacagaaaattggccgggcatggtggcacatgcctgtaataccagtactttgggaggctgaggcaggcagatcattgaggtcaggagttcgagaccagccaacttggtgaaaccctgtctctactaaaaatacaaaaaattagctaggtgtggtggcacatgcctatagcctcagatactcgggaggctgaggcaggtgaattgctcgaacctgagaggttgccgtaagccgagatggcactgctccactccagcctgggtgacagagtgagattctgtttcaagataaaaaagaaaagaaaatttaatgcagatggaaggtgagggatctgaaaaacaatggtttctgccatactatttctatatgtttgaagtgttaaataattttttctgatttttaaataatgaattaaatccaaatacacaaatcacttctctttctacccatcttaagtcccagattttgcttttacagtgaattgcagccctgaccagaatcatgttttttttttctctcaggcattttagggatggtcaaatatttaagcaggataagattatgaaaataattttctgacaaataaaataacttttgtgcaaacatgcatattctcctcagaataaaccccttggaggcaacacaatttttccaaagctggtggattgcttgatttatatagctcctctttttaaaagtacttaagagaaatgaaacctgtagggaaaaattatctctgggtctactacttaaggaagttttcctacttttccttgctctgctcagcttcactatacaccatctcttctagctctcttacttgaggcaaatgaccaatgaccctagggctgtggttttaaacaaatgtggcccacatatcaattctgttcaaatcagcaagcattcaccaaaccctcaccatattttgggtgctgaactacaagttggttatgtaagacacagtctctactttcaagacctcgttagttatcagaagaagcaaatacataaacaaataactgccatattgtggccagtattatgaaagagctatgtacaaaatcaaaattaggcagcaattccttctgaggaagaggtagtggggaaaatgagaatcgggggcttcagagagttgacacttgatttgattctaaaggaacagtggggattctgcaggctgacagagtgtgtggatgtgaattctagaccgcggtaatgacatggacaaagatagagcagttggatagtgcacagaacggagaagaccccagtgttctagaacactggaacattttggagaaggcagtgaaaagtgaaggaggatgggagagtcctataaatgagaagtcaatttggaagggcccttttgtgccatgataggttggggactacaatttattgagcctgacacactgctagaagcttttcatagattctctcctttaaggagcgtgttagtttattcttgcattgccataaaggaatacttgacactgggcaatgcataaagaaaagagggttcattggctgacggttctgcaagctgtagggtaagcatagtgctctcatctgcttctggtgagggcctcaagaagcttccaatcatggcggaaggtgaaggaggagcacatgcatcacgtggccagagcgggagcgcacagtgagtgggaggaagtaggtgccgcaatcttaactggatcctgcaggaattcactcactattacggggacagaagcaagccattcatgggggatctgccccatgatccaatacctcccactaggccctacctccagcattgggaattacatttcaacatgagatttggaagggacacacatccaatataagggagtttgagcttcactgtctgtgtactgagggacattcagaaacaaggtagtgacaccattagataaggaaggaaggatgatataagttcatttgtatctgcttgttttatttcaaggcacaaagtggtaatatctgggaaagtgatggaatgccagaaatgtaaaacagtgggggtagaaccacccaaatctgagaactgtctacattaactccaaacttctcattccttgtaggccctccaagggatctaactgcaacttattcccttttttctttggactaaagcagtaaaaatttcctgaaaattttacagactaattaggaaataccacagttggaagtgggctaacctggaaccccyacccggatagcctattcatttatacaccgcagcaccttctttgccaggagatgtggtatgttaaaatacaggagtccctggggaaagagctactaaagaatagtatgaatgttcctcttcgtcctaatcatcctatctccatcacatttgctgtatactcaccatgcaggccttatttaacaaagaccaattcctccatgtggctctagctctaaaacagccccggtattctgtctccattgatacaacagtgagaggagaatattggactatgatggtctctatattttcagctcttaatttctatgattttaataaagtgcataattacttrattatcttttgttaaatgactgttttatctagccaaaggaatttcattcaaattttatatgttgtgtgagaaatgtaacagagcattgcattatatttaacaacatcagtcttctacactgcgttaatatcagtttatttagttagtttacattgagccatacacatgcacacctccttaggggaaaacacttcagaacctttgataaagtaaatgttgttttttaaaaaaaattgattacaatgattgcagagttgttggtaactgtactggagaatgagtactttctatgtataggtactacaatttataactatgaagctttcctataagcaaaccgattacatgaaaatagaataaactcatggttagatggttgctttataaaaataacctcataaggatttacttcaacaatgaggtcctctaaatgcaatcttgacagtggttttgttttttttgttcccaaaagataattaataaactgggatgaaatattcaccgtacatatgtacacacacacacacacacacacacacacacacacacacacaaaagtatgggacttgtatccagaatatataatgagctcttacaactcaacaagaaaataacccaacttaaaaatgggcaaaagccttaagcagacacgtcacaaaagaaggtgcatgaatggctacttagcacatgaaaatatattcaacatcattagggaaaagtaaattaaaatcaccatgagatacccctagagatcataacaataccaagtgtgtgggtgaaaatgtggaacaactggaactcttgcacattattagtgagagtgtaaaatggtacatccatttacctatgaagataaacaaaatctatcttatgatacagtaattccagctctaggtatttacccaagagatataaaaacacatgtttataaaaatgcttgtgagagaaagttcaaaatggctgttttgtaatagcccaaaactggaaacaacccaaagtccttcaacaggtgaatgaataaacaaattgtcacgtaatcaaacaaatggatatttctaagaaataaaaatgaacaaatttctgatatacacaacaatatggatgaatttcacagagattagattgagtgaaagaagtcagacgtaaaagggtatatacctgtactttcttattccatttatatgaagttccacagcagccaaaactactctattgggatggaaatcagcgcatttctggggcagggtctggattagcgtaagccagattgaccgcaaagtagcagaatggaactttttaaggtgatggaaatgttctatatcttagttggggttaaagttacatgggtacatctattaaaattcatcaaactgtgcacttaacatctgcatgttattgtatataaattatacttcagtaaagttgattatagaagagtgatcactgcagactgctgatcatatctgtcatttaagataaaggattttcaagacttccttatgttaggactcctaagcttaaattcctcctataaaacatgttatggtaaaatagaacttctttataggggatgattttgtcctccagaggacatttggcaatgtttagggatatttttggttgtcacaactagttgaagctgctcctggcatctagtgtgtaaaggccagggatactcctgaacatcgtacgctgcacaggataggacagtcccacaaccaagaattatcgggcccaaaatgtcaaaagtgccatgctgtagaacattttctgaaaggctattctactgtgctgcatacataaaaattagtgagattatttaatgttcccgttaaatgtgagcagctatgtgttatcactagtgtgcagtgagtgaccaaagtaacagttttgcggttgacaggaccaatacattcttcatcccacctatgcaaaaatgtcaaatttttgaaaatgcactgtttgctaaaagttgaaataataaaattacaatttgagtttataaagcgcattcaaaaacatttcagggacatatgcacaatatggtgagaggctgtgcacttaatgaaacagcaatgatactcttcatatttgtgttcagaattcatcttgacaacctatttcaaatggaaagaatcctaatcatacaataaaatcagatttagggtatgataaataagtatgtttgcctgtaaatgtcttgcactatgaatgagttcatttattaaaacttcccaaagtgcccttttcatatttattagtgacttttgttaaatattttatctatagattcatggtcagtaatactaaatactttaaattgtaacatataaaacgttcaaagaatttcacttactaagatattaatgtacgttaaccaggactccatttagcactgaaatatttattaatacatttatgaataatttactcccttgttttatccattgcttaacatctcagcacttttggaatttaatttctttggaaaaaaaagctcaaatgggttttgctactgtacagagtttaatgtcatacctcacaagaaatattgttctccaaagggtaagtttttttagggagtgtgatttagctagaatggctgagatccagcaagcctgcatatcgtaatgcagtgtcatacacacagagtatacaatgagtgtttgaggataatgtgatggtggggagggaggaaggaggaacagaatagataaatgaaaatagaatgcaaatggatgccaaaggattaatactacacagctaaattagctaataaaatgtgagataaggttacactttttaaaaaataaaataaaatatgggtggctyatttccatacataaaatttatactgatttcacataatcattaaygataataatttttaaaactgacagttgttatgtataccacaaaattagggtcttttatctgactaaatagcaaatcatttccttatcccaaaggttaagagacatctggtgtgtgagagccctagagttactcaaagcataaactaaataataaaagtttcttgtttttattcctcttctatgtaaatgatcattcattaagcatttggtcatagtagcaaagctgtttgagagatacattattaaaattactggtctcaaaagaaattactggacaatctaaaggttatggcatttgctttttaaattctgcaacaacaaattatgtcttattttgctgcttacaaatgattgtccatgttattgtctgttcaaacacaaagtttattcaggataaattatttctacagtgaattgggttattcaatttgcttagatttttcaccttttaaaaagcagcatttattgcctcctagattttttaccatgtacattattgttcaattgcttaagactttgttagtatgactaaggccatgagctaccataaattatctgcagaccaattgtgttttgaacatagttaattcatggtttacataattcctgagtattggtcacaagtgtcacaattaaattttgtcctttaaatagcaggtagatgtattactaaaatggctgtaattccaataagatataaattatctaactggcgagagagaaccaaatatttagttctgtgttactgtttgctatggtttacatgtttgtcctctgaaactcatgttgaagtgtaattgccagtctaaccgtattaaaaggtgggggcctgtaagaagtaattaggtcatgaaggctctatactcatgaatggattaatgccattattgtgggagtgttagttatcttgagagtaggttgttaataagtgagcccagcccctcatgctttctcttttgcgcatgatcacttgctcttccatctttccacaatgggatgatgcatcccaaagaccctaaccagatgctaaagccatgccctttgattgcccagcctccaraactgtaagatataaacttcttttctgtataaattacctggtgtgtgctattctgttctagtaacagaaactggactaagatagtattgttatcaataaataatttaccttgactctcacaattttggaaatgttttttattttccctaaacttttaaattcagaaacgyctagggagaagagagaggccatgactattaaaaaataagttattagcataaactccacttgtgattttatacaaactgactggcaagtccgaataaagtatagctttagatgctaatccaacaaactaactaattcgcttcgaatacttctgaaaagatcacagaatgcctttttattcttttcttcttagaccatactcaccctacagatgcagttcaggttccatctcattgatgcaggctcccttggcaatccctggtcacagcaatctctccagacttaaccacacttacgtgtaccactctttttggatattaaatcaaatggggcctagtatttaccaatgttgacagataacgtcttgtctatccagtgacactgaaggcaggcaaaatctgcatttcatattatttctaatatatactacccactggagtgctgggccatttgtttttttctttgctcccttccatgaacatttattaaccaatcacctgtttgataagtacaaacacaggagagaggaagaaatttaaataaaccatagtctgtgcccttgagtcatttgatgatttttgtccctccttamttctcgagtctcatgttaacagtctttttttagctccagrcaggcttaacagtatttaattcttaaatacactgtgtcttctcacttctggagttttgagctatttcctctgtatctaagaatgcttggcctccttgcttccattctacgctctatcccatttatttctggctttggtctactcttacctcacatggtacttcctacaggaagccctcactgatctccaaagtgagctgaccttcttatctgttcctctgtactgttcccagcatcgcattttcaaaaatgaagtataagtgcctgtttatctgtctgtcattggagtgtattatctattagtacacatatgtgtctcttttgtactgagtatgagtcatgtgtatgtttagctcctggtacacagtatatattttcaaaatgtgttgaatgaatgaatgtcacaagggtaaacatcacaattcctccccttgaggatatcaccatctagtgggggagacagtaatgcagataaaccataatacaagaagtcaaggtgttaagtttcagaatagacacatacattaaaaagctatgggttggggggtgggacgttcgcctgtagtcctagctactcaggaggctgaggtaggaggatgacttgagtccaggagttcaaggctacaataatgcagtgagccactatcatgccactgcactccagcctgggcaacagagcgagaccttgtctctataaggaaaaaagaaaaagctatgggggtccaaagtggctaattttgcctggtagagtcaggcttttcacaaaggaggtgatattcgaacagcgtttagaaggatttcaaagtttgctcggtggaaaagaggacagcagatcctccgtaattagcyacgttagaatgttccagcatgcctttgtgtaggtctatagtcttgagtggttcaaatcttccaagtgcctttcagtgcaagaaagatagaaaagaatagaatatgaccacaaatgagggatccaagtaactagaacagtggaaaggattgaatttgaaaaaaaagattttaaaatgcaaggattatatataagtcaaattagtggctactagcaggacaattaacactgaccgcatctgctggaaagaaatggcatcaagaagaataaaacacccagtcacctaatgccaggcaatgtaaggaggggaaattggagagcttaagagagggagaccctgagcaaagcactcaagggaaacttcccctgctatggcatctagtagtctgtgaaggtttcaccaagggggaacagaaagtcaaccttcaacacaaatctagagtccagtgtaaatgatcaagtgcatcagggggagctgggctgggaacacatcttgactccggacctacaaacccttgtccctaccctgcagctccttagactgcaagcaagacgtgaaaagtggtatcagtgaagaaaatgaacccaaggaaacatttctcatatttaagcaaactaagaaatgttgcttagtccttacattctacaggaaatgaaatttgagaaaatttaaaatcactcaggccacctctctagactcagccccaaccgtagtgtcacacttcacattttagaaaccgctgcttctgtttctttgtacacacaagttactgctgccccccaagccttttgtcatgatgtttcttctgctagggtatttttttcgtttctcccttacgcccttgtcagccagctaaaatctattcrgctttcaagactcagctcagatattacctcttaaaagtcttttctgaatcccaaggccatggtttttgttcctgctctgttctctggtaattattcctgcttgtgtattggtaacccctaccttcaccagtactgggtcttacttatattgatgttcttagggcctccagccattcatagcacctaatgggtacccagagaatagttcttaaatgagtgaataaattaaagaagaaacaaaagtgttatggggagatttactaggtaatatgattagaattatgcttcaggaagacaaatctggcagcaatgtgtaggatggttgaggtgggaagcccagacscaaaggcaggaagaccgaagaagctatcgaaacagctcaatgaggaggtggaaatgaggatatcaggagaggatcaatccaagagatattttggaagttaaatcaatagaacttggtggctgactagtgaacaagcagaggaaaagaatatttatcctttctgttcatagcttatccaccaaatgtgataaccattaacagaaagaaaagagtctgtaacaaggtactttgaggaagggactgaaggaatagagaaagataacaaggagatagtaacatattcagaaaataaaaagatcaaagaggaagaaagggatcaggaggttgcagcttcactgaagctaaggtttgggaaaactgtgaagaaagtgtagtccagagtaaggaaaccacagggaaggtgctggacggagctattttattcacaaaccacaaggcaatggcttctcatatttgtggtcttagtttatatacaactccaaccagcagtttccccttcacctaaccttccctcgattttccattatgaaattgttgattggaacttatcactcggctgctaaacaacaaggggggcattcttttatttcaaagaatcttttaagagtctatttcagttgtgctaaaaataagaaaacaagaaatacttggtcacctggggcatatttttatgtccaaatgaagtcaaaaatatttaaacaatttaaaatatccaggtaattggtctaatctcatctgaattatgctagagaaaaagacaatcagagaaataaaaatgcttttatttaaacaagatacatagaatagascaaatttccttgatcaaaagtttctcttgttactaaggtcatattatatcaggattaggttcacctacaataacagaaaactcaaaatagcagtgactagaacacacacagatttcttttgtcacctgaaagaagtccagatgtggcagtccaagcttggcgtggcagctccacaaagcagaggagactcaggctcctgtcttcatgctccaccacagtttaggtcaattcattgtctaaaaaggatgctggggctacaaccatggtaaattttaggtaggaaacaggaaaggggaaggagaagccaaaagactttttcttagctgtctctcttgtaagtaaacttctggaaacccctcccaatgattccaacaattcgtgctctatttcattggcctgaacatagtgtatggatacgttgagtcaagaggggttggaaaatgtggtttgtcttcaaatctgggcacataagtgtcccaataatatatgggttctcctgctaaagcaaaaggggaaatggataatgagcaactagtaatctcttccacaaatatcaaatctcattgacatttggtggctcacttaacctgacaagtcctaaacacattaaaattaagaagatggagacttaaaagcactatggcacttatatttgttagctaactgtgttaatatcttctttccttggaggctgagacaggagaatggcgtgaacccgggaggcggagcttgcagtgagctgagataatgccactgcactccagcctgggcaacagagcgagactctgtctcaaaaataaataaataaatacataaatacataaataaagtaggttttggcccaataaagttataaatattgggaaatgctgaaaatataaatattttttcttggattcaaaaaagcaataaaacacaatgcttagtgaagctagttcttcttttcctaactggtcaatgccagcaaaaagaaaagacttctttccatctctattttagttgtaaagaaaaagattaccattgcttctctggctatcagaaaaataatcaacttctgaagaaaggttacaaattttctgcaaaagaaacagagtttggctgctctatacactggacaatcacttgttactacctattcaccaaatggaatcatctcttcttggcttttcctttcttaaattctttattgaattcaatacaataggtttacccctttgtgaaaatgtcttcttcctcactgggcttttgtagcatggtcctaccatgtacagttttcttctttgactatgtcttttttatctcctttactagagcttctttttccatccacctctaaaaaaatagacagttggtcaggcatggtggctcatgcctgtaatgccaacactttgggaggccaaagagggtagattccttgagcttagcagttcaagaccagcctgggcaatatagtgagatgctgtctcttcaaaaaacacaaaaattaaccaggcatggtggcatgtgcctatagtcccagctattcaggaggctgaggcgggaggatcgcttgagcctggaaggcaaaggttgcagtgagccaagattatgccactgcaccccagcccaggtgacagagcaagactctgtaccaaaaaaaaaaaaaaaaaaaaaagatagtcctcccaccttgttttcctcatccaatcctgctctcactgctctcaccccatctagaatccactggcactttcatcccctcccttcaatataatttctgtgtggaagacttccataggtaggttctagctctggcctctccaatcccaatttggaacttcagtttataaaaataacttaaaaaaaaaaaaacctagctcttccacgggmagttcaaatttaacaaatccaacactgaatttatccatttatcttttttttttttttttggagacagagtctcacttgctctgtcacccagactggagagctgtggcacaaacatagctctctgtaacctcaaacctgggctcaagcaggcttcctgactcagcctctcaagtagctaggattatgggcatgcaccaccaggcccagacaatttaattttaattttaattttgtgtggaaatggggtctctctatgttgcccagactgatctcgaactcttggcctcatgcattcctcccacctcttccttccaaagcacagggattacaggcatgaaccactgtgcccagcctcatcctattcttgtttgtcccaaagccattcctccttttacattctctatcttggttgctgacatgacattgccacctttccaattctttggactgaagacttgaacatcaccttgggtcatattttcccttcccacacctatatctaactgtataccaaaattctattgattcagccaccagagaggcactgcctttccaatgttattacttcttgtttagaatattgctgtgacatctagaggggtctatctgccttcagtcatcccacatacttctacatcttcttcaaaatatcttcaattggttataccttgcacacagaaaaagaccagaccatactatggtaactgcccaaggggttcaccttgcccgctacctagacagagccaattcatcaagtcaggggaattgccagagaaagagtaattcacgcagagctggttgtgagggagaccggagttttattattacttaaatcagtctccctgagcattcggggagcagaatttttaaggataacttggtgggtgggggaaagccaatgagccaggagtgctgattggtcagggatgaaatcatagggagtcgaagctgccttcttgtgctgggtcagttcctgggtgggggctacaaggtcagatgagccagtttattgatttgggtggtgccagctgatccatcaagtgcagggtctacaaaatagttcaagcattgatcttaggagcagtttagggagggtcacactctccagctgcatgactcctaaaccataatttttaatcttgtggctaatgttagtcctacraargcaatctagtccccgggtaagaaggaggtctgctttgggaaaaggctgttaccgtctttgtttaaactgtaaactaagtttctctcaaagttagttcaacttacgcccaagaatgaacaaggacagcttggaggttagaagcaagatggagtcggttaagttacatctctttcactatctcagtcataattttgcaaaggcggtttcactatttggattttgaggttctctataatcaagaaccaatttgtttaatgcctttcctacctcttccacactacttcttttccaagggacacccctagggatctaaattaatctctcccttatttctcccactgccctttatccaaaagccatccatggtactcatcacactctgctcttagagcatttgtgtttgtctgcttttaagtagtgaatctctggatcacttgtccttattgccttactgtgcttactacagtatctttaatgtaaaaagcactccataaatgtttgttgaataataactgtaaatagcccttgcttctgctcaatcttcaattcaaggatgacccttagcacagctatgaggtaaggcttcaaggactctccacgcccttgctatgctccccttactttcccttagagatgtccagtaccctcacattttctcctgctgacccaagcttcttactagggtgcttacacagaccactccttctaagcaattccagctcccagaacttgccattcccagtctcttaccaaaacctacatatccctgggatgaactttagagcccagcctyttcattttataaaccaagaaactaagtcccaaaaaagtgacatgaattccccaaagtcatgattccaagtccattgctctttctctcacatctgcgtttagtgcccatcctgcaactcaaccccttcgcttcaagctgctgctaaggattggcaaggggctgctgcttatcttcctcagtaacacatctctctcttaacaacagtcatctgtgctctgactcacactaatggatactggaggaagttcacattggtacctggactcatcctgttgttattttggtcacagtgcttttcctacctcctgaacccagacctcggagagacactgtcaatgctgggatatgtaaggcctgcacatttttgcaatgtgctttcttatgactgtggaataagtgatattcactgtctgatgcaatcctcccacatgccgcagaaaccatggtagcagaactccagaggcatccccccctgttgcattacaacttcctgggggaagagttcagttcatgaatgtgttgtaatttctgtgaagggtatctaaagtccttaaaaacatccatgaatgatccttttcaacagtacttggaaggaagtcagggacttcaccattaaaactgagccaacacagtaatgaaattcaatgaccaccacaggagacatatgaatgyctcagggaagaacaaaggccagcaaaatcagccaacagcagttacttccacaaaakgcatttacctgaataggaacttgaatggttttcaaggaatgacagtctccttccagaaagtgtcatgtgtttgttattcgtccagtaacactaagaatctaaatttaaattttggtttagtttgggattggtgctggattttagggaataatcttatcagggctggattattctagttagtgatgatctgaggaaacactgcatttcttcagatggaagaagggagcactggcagcttgctttttctgaaagctttgattacagaagtataggtccctgatgcttaaagggaccttacagcacatctgattcaactgccttttataggtgaagaactgattcctgttaacctgataacatagaaattgcctatcctattttgtgaaaatcatcctactctagaagtaggaaataatggagtaggaacctgggcactaaattatagttgttatattattaggactaagtgtgtatgtccacgggcctgacagaaatgaatgctctggaccccatccacttgcctttcatttgttcctgtgcccttttttcatacaaagtggatggcctctttaggtttcctttaggaaatgtgtaagtgcctacaggcctttgtgctcacattaaaataattttttttgtttttattttttggaaaaataacttaaagtctgctcagagacagctcaatttctttattttaaaaatgggataagacacactatttttagatggcatttgtgactatccaaatgaacaatgtaaagtactttcaaaaatagtgctttgtcaaagaaacaagttattctatttactttatgtatgcattccatttatttcttcagcaaatatttatgaagcacttactagcatgatcacaatttcagttaaatagttaagtacagtagtcccccctttatccatgggttcattttccacataattattcaatttaattattagttattgttaatctttcactgtgcctaatttataaatttaactttatcatatatatgtataggtaaaaacataatacacatacataggtttcagtactatccatggtttgagtcatccactggggatcttaaaacatatccccttggattaaagggaaatactgtaattaattgcttactgcctgtatcagtcactagaattccagctttctgggaaaaggtacttcttctcttttgttctctaatgctcagcaccctgcgtggctggcatttaaaagactaacaaatatttgttgawtggatggatgaatgcatgaatgaaaaaccaaatgaataatgaaaacaaaagtgtataatacactataacacgtactatattgggcttgcgtagtactatgggaatctatagtaggagcatttaaagccagccttgacggggctaatctccggaagagcaattaatcttttcaaaatccgactcttgcaggatacggtcccccactggcctgccactagtttaaaacgaattagtttctgtgaaacatcaggatcgtgccaatagtaggggaccaataagactgaataagtcaaagggctgcgcggacaagtccaattagaacacctctggctaaaagccagaatgaatgaaagggttcatgcctcggcgtagacacacaactgggactgaaaaatctgccccaagcctccacgtcgactttggctccacctgcagcggcggcgccgtagtcacgtgacccgggcccccgcgccctaggcgcctgggccagcctgcgcctgcgcagtactcggagacagcggacccgtgtcagtgacagcttccggtttggtttctccgccttctgcttggctagagctattggggctcggtggcggccgcagtggggtggagggggcagggcgtggtgaggtaaggtgagtgccgtagtggggttccctggagccatggcctgctccattgtccagttctgctacttccaggacctccaggccgcccgggacttcctctttcctcacctgcgggaggagatcctcagcggcgccttgcggagggaccccagtaagtgcctctctggcctcgcccttccttccctcgtcacccgcggcctctgctcacgggttcgagtctcctactcrctctgcgcctcctgcctctgccctctggacccccagttctccccgtgcctcccctccgctccgggatgacaccctgcccacctcgtcctgaagccccatttgtgttgtcttcctctcgacccagcttttctccttaggccctctgacccctggctaaaaactgcgtcttgtttcctctcgcctctgcctatcaccgctttctccctccctccccccacccccacacattcctagctttctctctgagtatcttctccgtctcccatcttcagcctggggtcgttccctgtttcatgttgcctgctccgtgatcgcatcctccccgttccttgccacatgtcagcgctccactctggtattgccccagctcccactctcttccatcccggagactgtggccttctgctacctcccattccgaaagtgttgatcatccccccacactctcccttctttcatctgcatttcccccattcagattttgagaacaaatggctgacaaatgagtgactcttgaggtaagactctctcaaagaaggaaaataacctgtcaggaagtgaaygagaatctacattaggaactaaaattacagtgacatagccaagaaaggttaatttgctttattgaagccttccacctatttttatcatcaaagtgtttaataagcctttccccaagtagtataaagttccaaggctggtttattagatactatataggctttcagaatttcgtacatttcattttgaaagggtgtgccttgtgttttattttattttattttattttattttatttttgcatttccaacmtgaagcacatttggctttgtagtacagcgctctcactttgtgctataccggaatggtgatataaagcccactaagctcctctcccttttttagaaaatttagaagatatcaaatcgaacccatctgtgaatgattgcatactttgtgccagtcattggtgctacaaaccaaataaggttggtggaccctgctgtaggaacttctggtttacagacaaatcattaacttccattcagtgtgactgagatatacatgaggcattttcttgaagtggtgatacttaagcctacctttgaagtactagttagaggagtaaaggagcagtaatagcatgtgcagaggaagggaggcctgaaatggcatggtatttagagaactaagaaaagctgaatggctggagaggaggatgggagaggaagagttggggcaatgaggcagtagtagtaataaggagctagaccatgagaggccttgtgaaaattgtggcgtttctctgaaagtttaagtagagaaatgacattgtcagatttgtacttaatgtaatcaacaacatttgttgaagacctgtaatgtgctctggtagcaaagtggaggagagattggaagaagggaaatggattgggaagctcttccagtaatccaagcaagaaattatgtgagcttgaattaagaaycttagtaggatgaagatgaaggactagattagaaagacgttaaggagttagaatctgcaggaccttgtgaaggtctggtgatgggcattgtaactagtaagtgagggggagtttaggaagtctttggcttgtggtttgggcaactatatgtaataagagaatgaaggatacagattttcaaccttttgcattttaaatgtttatggtatgtccaagtaaggacatctggttgaacaccagatatagatagtctaaacagtagggagtactgggccagagatgttaattggggagctaacagcaaaaagtgtcagttcagtctcaaggattatgtatgttgtgaaatgcactgagtactaaagctgtaagcttagaggagcactggtgtttaaaagtcaagtagaggttactgggaagaagactgagaaggagtaaaagaaagaggaaaatcatgtgagagtaaggccctcggagctgaggaaggcgagaacttgatgagggtgaggaatggtcagcagttttgcaaatgcagcaggggtcaggtaagaaaaggatagaaaaatgcttattggttttgagaaggtggaggtaacttggaccttaggacagtttcagtaggatagtggaggcagaaagcatagttataggataaggggttaaaaagtgaaatatactatttcaaggagcttggctgtgaaggatagcagatgcaggattgtagatagggaatgtagaaaaaaggaacagattttctttatccttctaccactctcctggtccaggccaccatcttttctcaacctgggctatgatatgatatgtgtcttcttctagcaattcttcctgcttttgctcttggtttcctgtaataattctcaacagtagttacagtgagcttttaaggcataatttagatcacaacattgcctttttttttgagatgaagtctcactctgttgcccaagctggagtgcagtggcatgatctcagcttactacaacctccacctcctgggttcaagtaattcttctgcctcagcctcctgagtagctgggactacaggcatgcgccaccatgcccggctaatgtttgtatttttagtagagatggggtttcactatgttggccaggctggtcttgaactcctgaccttgcgatccacctgccttggcctcccaaagtgctgggattacagtcatgagccaccacacccagcctaacattgcccttttaataacactcaatggtttttgattgcacttaacgtaaaatccaaagttcttaaatggtgtataaggcccttgagactctgcttcctgccatttcttggaccttatacacctctccccttatttcttatgcttcagacgctcttttttgttgttaaaccagccaaccacatttgtggctaaggtttttgccctcactgttgtctatgccttggatgctttttgcagatctttgcatgctagttgcatcttgtcattcaagtctcagctcaaatgtcaactcagggcagccttttctgaccacctgatctagatctaaagtagtcaatacaacccccttgttcctacttgttgttctcaatcatatcatcctgtttattttcatcattatatttctactgtscagtatggtaacctctaggcacatgtggttattgagcctgtgaaatgtggccagtgcaactgaggaactgaatttttaaaattcaagttaattttaattaatttaaatttaagtagccaaagtggctaatgcctataatatagtatggcacagttataggtgctaaaactcargtacatacagattgaatacttgtccaagttacataggcagttggggatataaatacaccccaaacatctagattaatttgcactatacctatagatttataaatatggtttaatgtatttctcttctaaatcaaattcttgagtttatgtatgttgatattattgtggctatgatcagttcatgtagaaaatgaacagaatggacctcttcaccagtgagcccctttgtaaaacctgtacagatgatctcagacttatgatggtttggcttccaattttttagctttacagtaatgtgaaagcaatgtgtactttgtagaaaccatacttcaaattttgcactttgatcttttccagagctagtgatacaatgggtaagatactcttttgtgatggtgggtagcagcagcaaatatgagagactgtactctacggtattcaagaagtactgtattcaagaaattacatgagatattttcaacccttcatgataaaatagactttgtgttagaagattttgcccaactataggctaatgtaagtgttctgagcacttttaagatagtctaggccaagccgtaatataaagagttttgaacgtaaacttttgtacagtgaaattttacagagaaaaaatgacattagcagagcaggtaaataggacctgacttaaactgctgatggtatttgcctttgcttttcttcactttatttattaatgttataaatgtttattgggaagcagaaatcatgagatcatcttaaatttttttagctgatatagttgtaatttcttaacctagctcatctctagaggatatgtaaaaacataaaacacctcaattacttgtgaattatagaggtgtatcagttggtttaaaagtgcttttattgggctgagctcttggaagactcaggtccttgggtcataggcatcacggaccaatctgaagaaaactgcatttcagggcctgttgaggctaaaactccagttggaggtccagaacatgttctcgtgactcagcaatttccttgtcagaatccattacctgcaaatagtggccaggctcagtgggtcttgtgtccttcaaattcttcgcagcgtrttcctttgcaagcacaaaagcttgtctccagtcacaagccagttcagaatcagaagcagaagcaattgcaggcaaccagtgtacctcatcctgcctccaggccactgaataacacccaaaacagcaagcagtccccgctgtyggcacctgaaaataatcctgaggaggaactggcatcaaaacagaaaaatgaagaatcaaaaagaggcaatgggctttggaagaccttgaaattggtcgccctccgggtaaaggaaagtttggtaatgtttatttggcaagagaaaaacaaagcaagtttattctggctcttagggtgttatttaaagctcagctggagaaagcaggagtggagcatcaactcagaagagmagtagaaatacagtcccacctccaacatcctaatataatcagactgtatggttatttccatgatgccaccagagtctacctaattctggaatatacaccacttgaaacagtcaatacagaacttcagaaactttcaaagtttgatgagcagagaactgctacttatatcacagaattggcaagtgccctgtcttactgtcattcaaaaacagttattcatagagacattaagccagagaacttacttcttggatcagctggagagcttgaaattgcaaattttgggtggtcagaacatgctccatcttccaggaggaccactctctgtggcaccctggactacctgccccccgaaatgattgaaggtcggatgcatgatgagaaggtggatctctggagccttggagttctttgctgtgaatttttagttgggaagcctccttttgaggcaaatacataccaagagacctacaaaagaatatcacgggttgagaattcacattccctgactttgtaacagagggagccagggacctcatttcaagactgttgaagcatgttcccagccagaggccaatgctcagagaagtacttgaatacccctggatcacagcaaattcatcaaaaccatcaaattgccaaaacaaagaatcaactagcaagtattcttaggaatcgtgcagggggagaaatccttgagccagggctgctgtataacctctcaggaacatgctaccaaaatttattttaccattgactgctgccctcaatctagaacactaaaagaaatatttgttttactgagcaggtgtgccttaacctccctactcagaaagctccacatcaataaacatgacactctgaagtgaaagtagccacgagaattgtgctacttatactggttcataatctggaggcaaggttcgactgcagccaccccatcagtctgtgccaggcatggtgtcctcccaggaggcaaatccagagtctggctatggggaaagtgaccactttgtgctgactcgatcggttaaggagctgtccaataaccttccaagtacctgagtgagtgtgtaacttattgggttggccaagcctggtaaagctgttggactgagtacgtgattctttttaagtaggaaaataaagatatttgtacagaaaaaaaagtacttttattttactgtggacagctgctagagatatagtgataccactctcttctatatttgaattatcaaagtatgactttatgttactttgtatatttaattacaaaagaagactgtcctctgtagctttaaaagatgctgaaccctaccctttcccaatgtttacattaatgacaactgttaaattttgtttttataaagtaaatactatctacttaagacatgaagtctggtcttactgctttgtggcttttttgtttgttttgtttttgttttttagagacagggcctcactctgtcacccaggccagagtgcagtggcatgatcatagctcactgcagccttaaactcctggattcaagggatcctcccacctcagtctcctgtgttgctaggactacaagtatgcagcaccatgcccagataatttttttggtttttgttgagatagggtcttgctgtgttgcccaagcaggtcttgaactcctgggcttaagtgatcctcccacctggactctcaaagtgctagaattataggcatgagccactctccctggtttattactttgaagttgcagggatgggtggagtataggtccccactttatgggtccccatttaacctatagtgacataatttccaatgcctagaccagaactttctgaaatttacagttgggttgggcaaaaatataaataaatatataaataaataaatacatgaatagagagggagagccagaatagttggagataatttgggtattataatattgtggatttcttgatttacctaatagtaaaataatttcttattgacatactaaaaatgtggaatagttttccttcttgcctcttttaccaaccagaatataaagcatgtagggaattatgttgaaataatcaattcatgtttttaagcaatctctgagaaaaatgtgctttatttaggataacctaaaatcatagaatcactttgcataatgggctatcacaaatgatataaaatactctattttttatatgtagtaaaatattttctctagtttgagatcatactaggagagaaaataatctgaaaatagaacatttatagagatttcagaaaatatatagagttactgggtttctttaaaattggaagaggatcatacagataaaattttaccagtgaggaaattgagatttgagtgttcttcagtttcttcattcaggtagtatttattgagcatctactatgttctaagcacaaaatgagtttaaagataaataaaataagtccctcaagcaattttcagctaataaaagaagacacgtatgtgaaacgattgttagaggtgttatgctatgatatggcacatgatgggagagaatgaaggagtgttggtctagtctatgcaggaaacccagaaagtcttcatataggaggtgatatttacacattaatagtttaaagatgtccatcagatggagagaaaatagacaacagatgtgaaacagtatgggattcagaaagctgcaaatagtaaattgtggtgggagggtgggatgtgttcagaggtgaaattgaagaggttggtgaaggagtttagattttattcagtagcagggtctttagattgaagtaagagtaccttgggatcatggaaatttataaaaggttgcttgggaacagatgattttaagtaaatcattttccacatgtacctgtgaaagtgcctactttctcaccctgccttctcccactttatctctgacacgtttgtagtcttattatagtaagttgcttcaaggtgtaaaaaaaacctcccctttaatcaaagtgttgtaaattcctccattcgttttattattagttttccaaattttactttttgtttaattatcaagatttatgatatatttatgttgttttcctcacttatttacataaaataattgtaataactcaagcaagaagaaaaatgttaatacttaagagtcttatcacaggaaaatgttttcttaattcatatccttttttgcagagagagttttgtactgataataataaaaatctgtgtttattagaatagcattctgtggaggaagtagaatagaaataagtattcaaggagaataaaggacttgtaaaaactgttgagaaggtcagcatttttttttaatggatgtcggtgggtatcatttccctatagtgtttagaatccactaagttttaaaaagtaataatagttttatgtttaaatgtacatgtttatagtataacagaaattacatattttttgcaagagatacatactaaaaaattcttttggggcatatatgaacaaaaaatttgaaggtcattctcctgtaagactcagtgattcccagtcttgtcttttcttttttttgttggcataatagcgtacataagaaaaatgagatatggaccccaaacagctaaaacaattttggaaaagaagaaacaagttagaagattcacactttctgatttcaaagcatattgcaaagctgtaataacccaaactgtatgatactggcataaagacaaacaaaccaatggaatggaatagatagctgataagtaaaccctcacatacatggtcaagatgatcttcagcaagtgtgccaagagcattctttgggggaaaagacagcttcttgaatatatgatgttagaggaaatggctatccatatgcaaaagaatgaaattgaatccttatcttataccatatacaaaaattaaatagattaaagacctaaatgcagcacctaacactgtaaaactttagaataaaacataggagaaaagcttcatgacattggacttgcatgcttttggatatgacaccaaaagcataggcagcagaagcaaaagtggacaaatggggctacactaagcttaaaaactttgtgcatcaaaggacacaatcaacagtgtgaaaaggcagttttcaaaatgggagaaaatatttgcaaatcatgtatctgatatgggattaatatccagaatatataaagaattcctgcaactcaataacaacaacaaaaaatcaaccctatttaaaatgagcaaaggacttaagtagacatttcttcaaggatgatatacagatgaccaaaaagaacatgaaaagatgcttaacatcactaatcatcagagtgatgcaaaccaaagcataatgaaatgttacacctattagaaatggctactataaaaaaaaaaaagtatcaggatatggtgaggatgtggagaattataaacttttgtgcattgttggtgggatgataagatggtacagccattaaggaaaaaataagagttcctcaaaaaattttaaaaaaattatatgatccagcaatatcacttcaaggtgtatatacagcagaattgaaagcagggtcttgaagagatgtttgcacacccatgttcatagacagttcacagtagccaagaggtggaaacaacccaaatgcccatcgatggatgaatggataaacaaaatgtggtattatacacacaatggaatactgtttagccattaaaatcaaagaaatgtcacatgctataacatgaatgaaccttgttaaattatgctaagtgaaatattccagtcacaaaaagacaactactatatgattccacttacatgaggaagctaaagtagtcatttatagaaacaaaaaatagaatggcggttaccagaggctgaggaaagggagaacgggaattgtttaatgatacagagtttcagatttgcaagatgaagttctggagatctttttttttcacaacagtgtgagtacacttaacactactgaactgtccacttagaaatggttaagttgataaattttatgtttttttgtttgtttgtttgtttgtttgttttttcttgagacagagtcttgctctgtcgcccaggctggagtgcagtggtgccatcttggcttactgcaagctccacctcccgggttcacaccattctcctccctcagcctctcgagtagctgggactacaggtgcctgccaccatgcctggctaattttttttttttttttgtatttttagtagagatggggtttcactgtgttagccaggatggtctcgatctcctgacctcgtgatctgcccgccttggcctcccaaagtgctgggattacaggtgtgagccaccgcgcctggcctgtgtgttttttttaaccaaaatacaaaatgtcaatcaattagattaataataaatagattatttaaaaacgcgacaaagctgcttatgatggaaagtgacataagttccagtagttccaggccctacctgactgcttttactgctaaaaggatcaatatcttggctcacctgcaacccatttacagcatactaagaatctctgctatgggcagagggtagccattgatggttttaagtaaaagtgtagcaaaaatattttaagatttgagttctaaacagatatatttggtagctgtaaagagaatagattgggcagttcaaagctagaggcaggtgaccattagatagatagttgtagaagtccaagttagagcccataaaggcagaactaaggtgatagcaatggcagtggagtttgagactattagaatttgagctgagaaataggatagccagacaaatattttagagacatttctttgtcagcaaagagaagaatggatgggagtgatgggtaaagtggaagtggagtgaccagttaggaggctattgcagtattccaaaagaggagattatcttttccttagcatggttttcataagaggttattttatagtatacacagtgacagtcctggaagtatgacaagtatttttgaatgagtactatgcttaatacaatttgggactattgagaccttgaatgaagagtaagttgttgaaccttcctcatagagaagaattcttgaaactcctaggtatctgctgtgaccatatcttgcctttaaaaaagagaccagaaatggtcccttgaacatagattacttttctttgtacaatgtgagtctaaatctcacatttaagttccccagaagagagaatctcatcaggtcaagagagtagacattacttaccacattgcccccccttttttttaaagtatgtaaaatcagacataaaaaccaccacctggctactcatactctacctttcagacgttaaaacctcagtactgtgctgtctaacatggtagccactagctacatatggctatttacatttaagtttaaatcaatagtaattaaattttaaaaaattcagttcctcagtcacagtggctacatttgaagtgttcaagccatatgttgctagtggctaccatattgagcagcacagatacagaatacttccatgattacagaaagttctattggaagtattgccttagtaagacttttttcttcttcttcttcaacttttaagttcagggatgcatgtgtaggatgtgcaggtttgttatatatgtaaatgtgtgccatggtggtttgctgcacagatcaccccatcacccaggtattaagcccagcatccattagctattcttcctgatgttctccctccccccaccaccccaacaggccccagtgtgttttgtcctcccctatgtgtccatgtgttctcatcattcagctcccacttataagtcagaacatgtggtgtctgtttttctgttcccgcattagtttgctgagaataatggcctccaactccatccatgtccctgcaaaggacgtaatcttgtttctttttatggctgcatagtattccatggtgtatatataccacatttttccttatccagtctatcattgatgggcatttacgttgattttgtgtctttactattgtattgtgaatagtgctgcagtgaacatatgtgggcatgtatctttataaaagaattatttatattcctttgggtatatacccagtaatgggattgctgggccaaaaggtatttctgcctctacgtctttgaggaatcaccacactgtcttccacagtggttgaactaatttacactcccaccaacagtgtaaaagcattcctttttctctgcaaccttgtcagaatctgttgttttttgaccttttaacaatagtcattctgactggcataagatggtatctcattgtggttttgatttgcatttctgtaatgattagtgatattgagctttttttcaatatgtt

SEQ ID NO: 97781 - DNA, 77522 bp, Homo sapiens
  misc_feature (1)...(77522): n = A,T,C or G
aatacagatgactgggcctcacacctcattccttccatctgcaggagggccctgacatgtggattttgaaaggctccttggagatgctgactatccatgctagatgggcacctggatgatgtttaagtcccttctagcttgacaaatcctcagctgtagatattaaaatgctgcttgtgctggagtgtatccctgtcatcagtccacaagagaagctctcactggggcagctgggctccctagggagcaccctggaaattaaaaaaaaaaaaacttttggttgtcataatgatgaggctggtgcttctggcattcagtgaggggaatactgcagtccctggggcagaaataaggcccatgatgacttttctctctcccccaggtgctgcaggcaggggcaacaggcaggtccctctttgttcttagtgagggatgcatcccatcacattgaagaattgtcctgagtcctgtacatcttttgaatgtactgtcagaatattcatagaggtgaaaagctagttcataggcacatgagccataatcaacttcactttacatgtacgtttaaaaaaaaaaaacaccctggtgcagtggctcatgtctgtaatcctgaagcgggtggatcacctaaggtcaggagttcgagaccagcctggccaacatggtgaaaccttgtctctactaaaaatacaaaaattagcctggtgtggtggcaggcgcctgtaatcccagctactcgggggactggggcaagagaatcgcttgaaccggggagacagaggttgcagtgagccgagattgtgccactgcactccagcctgggcgacagagtgagactctgtctcaaacaacaacaacaacaacaacaacaacaacaacaaaaaagaacacatgattttattgcacaacctacctggagtacaactaccatgttgagagctgtgtgtaaattgtcctgcattttgtctgaaacgttatcgaccttaagccacagttttgtaaaatcacatcatccatggcaatgctgctcacatagtaattgagtcactaagacactacctctatactggtctgcatctgcagctttcctatccatgatgattgtatctaattctatgaatagcctaatttagtccttatgtcaaaatgtcaaatataaagaaagcagtgacagcactattcaattaaatattgccttcctgtaatgcaaacatatccattgtaagtccatgcctctgccaacttcatgtatgattttatcgtgacattcccttttaaaattatagtgctatattgatttcaagatagtaaaagagagttacaaaacaatatttgttataaacaggggtgttggatctggttggtttaggacttactgatctacaagcaataaaacctgcaggaaaacagtagatctgtagctctcagacaagccttgcaaaggtctagcatgccctagagagggcaaggggcacgttggaaggactaatcaacttgttaggatcaggtcctgatggggatcgaaaccagcttccagcaacaatgtgagagggctaggctgggcttagtcaatcacacggctcagattggaatcttatttgagtacaccctggatgtatgcggagggtgttagaccaataattcttggccgggcgcggtggctcacacctgtaatcccagcactttgggaggctaaggtgggagaatcactggagcccaggagcagcctaggcaacatagtgaggcattgtctttataaattaataataataataatagtaataattattgagtgcttatggtggatcaggcctcatatgtgatgggcacacacatacatctcttacaattgccacagcagtcttagggtagttgttaattcttgctttacaaaggaggaagcccaggcttggacagttacaacaacttgctggaggccacacaatgattcctgggtagaaagctgtctccctgccttcaaagctattttgaggccacacaatgattcctgggtagagacctgtctccctgccttcaaagctattttgtcaaaggaagtttatatttattcagtgtttgagaaacagctgctctcagtttttaatgttttgctaggagtgactgtgcagcctggatagcaacaatggtgggtgtattagtccgtttcacactgctattaagaacttccctgagactggggcatttataaaggaaagaggtttaactgactcacagttccacacggcttggggagggctcagaagacttacaatcatggcggatggtgaaggggaagtaagccccttcttcacaaggcagcagcagagagaagaacgaaggaagaacttccagacactcataaaaccatcaaatctcatgagaatcactcagtgccatgagaacagcatgggggaaaccacccccatgatccaatcaccctccctccctcgacacatgggaattatgatttgagatgagatttgggtggggacacagagtcaaaccctatcagtgggcttctttacgaaagatgaggtttccttgggaaataactcttggctctctgagggcttggccactctgactttgatcaaactggcaactggggtatgtacctgagtgaggtcagggggcccatgataactcggtgacttgctgccccttgctcactccagttggcaatgtcggggcatttggtccctgctgtgggggctcccatgtctgtctggcccttggcctctcctcccctggtggccagctctgctgtgatcagctgagcctgctgctggagctatgtgctggtttcctgcctcttcttgggcattctgggctctaggaactgtttgttggtttcctgtgggccattcctttccaggatgggcctagaggctgcaaccctcctaagatctgcccacacccctgtcctgaggtgagcttctcaagaaggtccccggctgagcaaggggtgtcaggagcaagaatggaggcaggagagtgtgtgcgcctgctttttagagtgggagtgtgcactcatgcatgagtgggaggctgtcattaacttggccatggatggctgccattttaagcagaaccagatttgctggcatgaattgtttaaatgatggcaggcacaagcactgcagggagatcctcctagcctaaattaaagaagccacagagggaaaaaatcccagaccatcttgctccacacctccctcccccgtcccaagccttccgtcatctgcgggaatttcagtgcctcactgacacctgaatgacaatcttttgtcatcctggaaggcaccatgatggtaccaaaggacaactggggagcattggttccctccccagccccaaacaaacacgttcttcatcagcctccttaagccatcccaaacaacccacacgcttaatacaactatcgtgccttctatccgggcaaagtgccatgtgtctgtagacacagctactcaggaggctgagacaggaggatcgctcgagcccaggagtttgaggctgtagtgagctatgataatggctgtaaatagccactacactccagcctgggcaacattattgagaccatgtttctaaataagcaaacaaaaattgtgctttctctgcaaacagagtgtctagggaagtgctttttactttcttgtgcattaagatcatctggggaccttgttaagctgtagattctgattcaggaggtctggagtggggccccaagaacctgtatttataacaagctctcaggtaaagccaatgctgctctcagggaaaccacactttcagaatggaagttccagatagccctcctctgcctctgaccagccagctatgtgcctgctaacgtcattctgctgtcagagggagtgtggggtaggagagcagggtggtctgaagtctttctctctctctttctctctctctctctctctcacacacacacacacacacacacacacacacacacacacacacacagggcttcatcggctcagagagttgcaaacccagacccatgttctaggctgggctctgccaggaactgctaggagtcgcatctctctctggacctcagtttcttcacgtgtatttgtgtattctctggggtggagctggcgaatagctggagacccctctagctctaccattttttgattctaattaaccaaaaaggatattcgaggtccccgctacaaattctgaacccttggcttcccctccaaactcccacacaaactccaccccatcctgcctgtgtgtctttgggaggatcatttccttctttggtcttggtgtccttgtttacaggttgagggatgataagagtcacctgatctgggcaagtcaggccataaataaggcttgtatgtaaaggtgcctagcatagttcttggcaaagcaaggatcagtcgatatgattgcattggtttgtgcatctgggaagaatgagcagactgcatactgtgtgttagggtgtagggaggaatcagacgtgaccctgccctctagtcatctgggtgcacagattctagattaaaggatgtgggggtggtaactaacaaggagatggagaggaggtgtgcagttcctgggggatctgatgaagaattaaagcagaagggtaggagatggagaatgggaaggcatacctgaaaccctaaagcaactcttgatgagtaggcattggcaggaggccccagaacattttctgaccctcaaacactgagaatgcatgtctgctggggaatagtagtgagggggctaagggtatgggggtgttcatgcctgagtcaggggctctggatggtagaaatgtctgggagttctgacggaatgggggtgaggaggcctaaagataacctgttcatagtctttcagggccttaaccattatggctggggaagtgggaagtgccgatggggtatgcagaggagggcagctgtgatagtacatttcatcctgaaagcactacatgtggataatgacggtagtgatgatgccctaattttagtgtcatggcaacattttccaaggggatggaattgggtaccctcattagtgtcatttttgtttgagagatttcaagagtctatctaggtgtcattttaaaatctattgaaaaaaaatcttgaatgcaggtcactgaccagttggttccatgtaactgcactgccttctgctaccactaaagcaatgttatgacaacctggacaagtcatgggaaacctatgtgagacttagttttttctttttctttttggagttgggggtctcactatgttgctcaggctgatctagagctcctgggctcagacaaccctcccgcctcagcatccccaagtgccgggattaccgatgtaagccactgcacccagctgagacttagttttttcatctggaaatgaaggcgacctttgtgatcccagtgggcccttgcacttgtgtataaggtgattcccagcactgctcatgaaagtagtgatggcagagtagcctctgctctccattttatttttggggtgggggggggcagtggtggaggggaggatgaggatgatatttccattaaataagtttccttgttgcttttcttcaggcaccactgacctcgatggaaaaatgaagtccctggcccaggaaagagacccaactctgtggctgttttggattagtttgtacaatgccctgcagacctactctctcaggaggctccaagtgaccaaatgtgacaagaaagttttttgtccaaggcagtttggaagagaagttggtgaccgtcgggataccacagccgccccaggacggcctggttgagacattcactggagggtctgggtgcagcccgctgcctggccggtaggcggcgcgcacaggccgtggggcccgggtctgggcgtgcgcgcggctggtagcagcggggccgcgcacgccagggtccgggagccgggccggtgcccccggagccatttccgggaggggcgaggccggcggctgccgggcctccaatctcggcggcggcggcggcaacaggggagcctgggtctcgcggcctgcgagtccgtcgcgtgctgagggagacgcaggaggtggagccggccgggtgctcgagggaaggagactggaagctggttccggcgtgaggaggtggaggggccgccgcgggctccggggggcggtgagggtcgggacggaggcgccgcggggtgaggagaggacaggggccgggtgggccgagggcgggcagaggcggcggggcggctgcggccggggcgggggcgggggcgggctgaaggcgtgggcaccagccgctgaggtccaagcaagtggacggcgggcgggcgcggggccgcggtggggcgggtctggagcccacgcctgccgcggggtaggcatgggcggccaggatttgctggtcctccgacgggaggggtgacaacgagagcgaggccgtgctgattctgaagggagtgcggaggaggcaggaccctggtagcctcggcaccttcagcccgggttaggtggcctgggctgggctccccaccccsatcgcgcgcagacggggcgtttcccctagtttccacctgggtggaatgctttgtgggagtctgggtctggattagtttcatcagctgtgggagggaaacctagttgcagcaggattttgattcgctggtctggggtgctaggggtggactgtgatatctgggaatgaaatctgagccttcaaaggagggagagaaccataacttggctgctctggcgaatctaggcgggctggcgagacagtttaaagctctagaagtaaacaaacctggttcccttttacagagtctgaaaaaggggagcgcggagaggaggctggaagaggaagatgcctagcacagaccttctgatgttggtgagccttttgcagacatcctcctggttccaaggcatttgtctccgttttttyagtccaaaggatcccagtgtgtagatttcacctctgatgcttgcttttggtwgctgagcgttttgccaccttttattttgttttgttttgttttgtttttttggagacggagtctcactctgttgcccagactggggtgcagtggcatgatctcggctcaccgccacctctgcctcctgggttcaagcgattctcctgcctcagcctcctgagtagctgggattacaggcgcacgccaccacgcccggctaatttttgtatttttagtagagacggggttctccatgttggccaggctggccttgaactcctgacctgtggtgatccacccgccttggcctcccgaagtgctgggattccaggcgtgagccaccgcgcctggccaaccaccttttattttggatgaatgatcaggatgaataaatagctgaattaaatacatcaatacagtatatgtagaacttaaattattgaagaatctttttcaaaattattattattttttttaaatgagacaaggtcttgctatgttcctcagaccggagtgcagtggctatttacaggcataatcatagctcactgtagcctggaactcccacttcaagtgatcctcttgcttcagcctctggagtagctaggactaggagcacaggtcacctctcctggctttctttttcataattcttgcagttttaatccctcccttcccgtactaccagagcagttttgaaacctctattattacgttttatcagggtctgccatatactagtttatctgagtgtttgtcttccagattagagttatggttcctcgacaggcagataatcatgtcttctttgtttagagatgaataaacacctagcatggtgctctgaatatagtatgtgcttaacaaatgcttgttggattgaaccagtatgaatttaagttcttttgttggacagagaggtatgcctgctttagagctgtttcctctcctcctgagatctttctgtgctgttttactgagcagggaagaatagcgttgctaaatgcatgtttaccaaaatgacattttatttttgggacttttatgattccttatggacttcttagtgtgagaattatggagagtttatagctttgaaatggtggtatagaaaaagtgtccgggtttagttttttttgtttcgttttgttttgttttgtttgtttgtttttgagatggagtttagctcttgtctcccaggctggagtgcaatggcacaatctcagctcattgcaacctttgcctcccgggttcaagcgattctcctgcctcagcctcccgggtagctgggattataggtgcacaccaccatgcctgggtaatttttgttttttaatagagatggggtttcgccgtgttagccaggctggtctcaaactcctaacctcagrtgatccacctgccttggtctcccaaagtgctgggattacttacaggcgtgagccgccgtgtccagccaagtttgtttgtttgtttgtttttgtcacttctctgagtgcaaaatcagtgctttaaaaacaattcatttctctctctttatctcactatcccagagggtgggttggcgtcactgggaaactggcaaaaactggtagtgagatttccttatactgggtgctgacatcgtagtggcataacctgtaaggtctgcaggggggctaaagaagagagaaactaagttttgatccattgtgatttgaggcagggatctaggataattttaggttgtatgtgagagacatagatgaatacttaggttatccgcagatcccaatgaaaagttcatctaaaatagtatcttgccccaaatttcatggatttttcagttttaattaatacccttatataacttaaaattcttattcaaagaccattatgttagaaatactggaaactataagtaagcaaaaggaaaggggatttgttaatctcccctatctcctacatccccttcattcgcctctaccccgtgcagtaatttatcacccagaaataaccgctgtgagcatcttggatggttaatgcagagtgacttgtagcaattgacagtttctgtttatcctcttacagaaggatatgtttatgtaaattataggttcttatatgtaagatatttccccatgcacagagatatggttattacttatagggcctatgcatttactttaacagaacaatgactgcttttactcggaatattaactttggaatcagttttcttttgaggtatttctctagctgttgccaccacctttcacctcctcacctgttaatttagaatgtttaggagtgttgctttgcttgttgctgtaaggaattaatccacatagatgcgagtggccctaggcagtcatcactttctgaagacaacatacatgttgcatgaagtgctttcactggaaaagttgtcattcattccttgactgtaatgtataatrctatttggaactaactggtaaagaaccaataaccatggctgggttttcagtggcacactaacccatcattctatgaggtgtttctcaagctactttatatgatatgtaaaacatgttcttggccctccacctgggaagaaaggacctaagtgaataaaaaaataacctcagtgcagtgcagcatctcagaattagaaatagtcttagaagtcatgggatgcagctttttttttttttttttttttgagacaaggtctcactctgatgcccaggctggagtgcagtggcatgatctcagcttactgcatcctcaatctctgaggctcagatgatccttccacctcagcctcctgagtagctgggacgacaggcacatgccaccatgcccggctgatttttgtatttaytttttgtagagatggtagtttgccatgttacccaggctggtatctaactcctgggctcaagggatccaaccgcctgccttggcctccyaaagtgctggattacaggcatgagccactgtacctggcctgtgatgcagcttatattatacatgaatctgttgaagagtatctctggtaaatggatatccagtctcccgtcttttctgctaatggaataagtgagcaaaagctaggaaacaatacaaggtggattcaggaatagtaatgttaactctgatagctaacatttattgagcatgtattacatgttaagtgtaggaatactgtacttatttaattttcacaaaaaccttttggtatccttcttttacagatgaaaaacgaggcttatagagagtaactacagcagttgagtggtggagccaagtttgacctcagttggtctgacttcagatccctccctcttgcctactttgtgtccttacccctggtaagggtagaggttgctgaccattgtgactgatgggagagggtctgtgtggagcagatgggataggatagctccaccctctagggggcactttggcaatgggggactgggggaggagggagtcttttttcttctagtgtagtctgaaaatacatgttttattattaaattattattaaatcttgtttattgggtcaggcgtggtggctcatgcctgtaattccagcactttgggaggctcaggcgggcagagtacttgaggccaggtgttctagaccagcctggtcaacatggcgaaactctgtctctactaaaaatacaaaaattagctgggcatggtggcgtacacttgtattcccggctatttaggaggctgaggcaagagagttgcttgaacccgggaggtggaggttgcagtgagctgaagctgcaccattacactccagcctgggcgacagagcgagactgtctcaaaaaaaaaaaaatttgtgttttattttcttttacgtcgcatttaatgaattatattgaaattttaaaacttgtrtctgcaggcatagtgttataatctttaaatgccatgtcagagtagcaaaagggattacagaatatttgttataaaaagagggcattgggtcatagagttgaagactacttgtgtggacagtatgctgtgagagaaaacctggagatgacctggagtccacatataacaagccttgaatccagactgacaggctcgggctatcagccctcagtgtgttcctgccctcaattttgttatcatttgattaggatagtttgcttgcctttttccatttgctcgtatgtgatgtgtcatagactgcagtactttccacctgtgtctcatagagaataaaatgagtatgttcatctgctgagagttgtgatgatgtcagagggaattcaagtcagacagctttgtagcagcctttctcccccttggcaaccattctttttattcatactctcctccttggtgctagagggtggtatcactttgcaagttgccaaatatttgtagtttttaagaaaaaggtattttataaagccagtctaccccttaggtggcttttttcttttctcatcagaaaatgatgactaaattagctgatattcatagatgaatcaaggttagcgtgtgcaccctggtagtgctaggtggggtttgagtgataattgcttatctagggcagtggttcttgaccaggggcaattttgccctctgggtgacatttgacaatgcctagagacattttgggttgttacacctgaagggttctgctggcatctagtgggtagaggctagggatgcaaccaaacaccttacaacgcacagtttcctgcaaacaagaattatctggcctagaatgtcaatagtggtgaggttgagaaactggtatgaagtttcttaccatagatacctggatatctgtgtagtctatgctttcatatgggtgggggagtgattcccttcttggaggttaacgtgtctgttattgtctcacttggggttattttgcccatgggtcaagccttgctgctcaggaatatatattggagatggtgcagctgatcttttatagcaatgcagaattcttaagaaatgctgtcctttgcaacatttctgcaccactcttttcttgatttgcaaacagcaagcttccctcagttttgttttttgggttcaaaaattgaatctttccaggtccttgagcgtctttatctgtgacccttgactctttttcagggatgctttctttctgaatctcaagtgggatttaagcaataaactgaaagattgaccttaggagctctgttctattatttgagccttgtgtcttgtttgtaggatttgctagaagaaagggaaaattcattgggattgttgataggacattaaaaaatttgttgacatttgagtggccattgcaggatgaacactgtatttggcaatctcccagtgttatagatgaaacagagctgtaataatttccacagcctttggtttaaaggaaaagagggttataaacagatagaatccaaatcccagtatttgacttagcttttcagtctatgtgtcaggaatttttagtaatatttaccttcttaattaggttttacccaatctaatattatatacagtttgtgcacattggtggcagaattgagaatcagcctgggtttaagaatttccatagggaattgatgtgaatcagtctgtatgtgtaaatgtacagaacccaattactgagataaaaaccatgctgtgggggaaggggagataggggccctctgagaagatggaatggtgaaggctgcgagtagtttgtggatatatcagtcatatcttggcataatccaacagcgtactaagggatcaagggactattttcaaggctgagcaggtttaaggaaaacatctaggtgaaacatctaagggctagctagcaataggagagccattatcactcttttttttttttttttgtcatggcaatttcactgaagcttttattgcctctattggtaatatgacagggactgtaagaaacacaattgaacttacagagatatgcagatgatattcactaaagataatcttcatctcaagtattttttatatgtgggcacttctaattttatacatttttctatttaaaaagcattacattttaaaatktgtacctgttttgacatttggcaaaaaggaaactgtacctatggttcagtttaaaacaaagaatcagcatggggagtttaccggaatgaggactgaaacacttaggagttaaagcaattcaaggggcgtgtgtgtgtctctccctttctcygtcaatctctctcactctctctggctctctcacagacacagactcaaacacacacagccatatgtgtaatcattttttagtacaaaatattccctgtagccagacatttatcttcagaataatcacaccacattaaatcagtcttctcttttcagccctagtaaaagttttgtttaattctaagatgccatcatagdgaacaaccttaacttttatsctacataattatattcaaagctttatgtatttttgtttataattacacagtaattataaatgtttagtaccaacctgatgacaaacactattttgttgaaaaggttttgcatttaaaaagaaaaatatgtaaaatccaaggcactaggccacgaaccaatatcagacttttaaagaaaacactttatattgaaaaaaaaaaaaaaaaaaagctaatgggatctcatttcaaaacacagcatatgtgaattaatcaatctgaaaccaataaccataactcaaaatcttcaagacaggaaacaaaacagtacatatatatagatatatagatatatatatcttttaaaaatttttcataattgaagttcctctttatatttacaaaaaaatcaggaaatactgaaagcagcaagattcttctttttcctttttcttttaataaccaattccagtagcctgaatagaaattttcagatttttcttttggtaaaactgcattcttgaattaaagttatgattggaatattgatatgtctatagggaaagctttctagtctatttcaaaatcatgtaaataaaaagcagttttgatatgtcattgtttcttaaaataatttccatatttgcataaaatgtactgctattctaagtacattcctttgttaatatcaaccctagaccttagagagtgcctggatatatatcccaagcagaatctgttcctatcaaaagaccataatcatcgaacatttgaagcattacatttctagcctgccttacggaaatgtttaagaaagcaagaaacccttcttcacatgtcagtaagtgaacagggaaatgaccattttcagcataaaagcagctcatgggtcttgtaatgaaaaaaatacatacaagatagcattctgctttgatgagaaaactgagctaatctgagtgaaacaaaaacagtaaagagactagaagccagattggtattttgcatcatgtatgcttgtttgaaaatctttgctcctgaagtaaatatttggcaaccaagtgattagcgaccacaatttcaacaaaataataagtcattgaaaatggactatttgtctgaaagagcaatacctatattacaaagattgaacttcatggctcattacaaccattttcaaaatttaactgcaactatcttcttataaattaagagagtttaatttgtgttccatagtgcgatgacaawaaaaaagtaaaaacaaaacaaaaaaaccctcatgcctaaatttagaatattgtattatgtagcaatccaaaacattcaaaacaaattaaatagtttaacttatgtgacaggcagataagcatttcaaaagcataatgaagtccaattatgtagtgcwtaatgtagacaggagaagaatctaacattatgcagacattttctaaataaaagctccctgtaggacagctatatataaacatgggtaaggtaagcgcagactagttctgtggaaccttttgaaatcaagagtctaaaacacaatacatttttcaggtaggcaccaagttatcctaaaaaattttcatgttggttattctgacgttgttttttctcttttttttttttttttgagacaagtcttgctctgtcgcccaggctagagtgcagtggctcgatctcggctcactgcaacctccgcctcctgggttcaagtgattctcctgcctcagcctcccaagtagctgggattacactcttaagcctgtgagagggcaaggaagggagtagtttctggaactttgagagagttgagatgaaggagaaggtaacctgtaggaatgccagccagtgacccagtaggaaaggcatcaaggggaataaatacttcaaactcttttgctaccctctgatctcctgctgtagcctcccattggtctaatacaactggaaaccagaggttaaggagtctggttgatttaattcagagggtggaatccggaggcacatagccgagctggaaaatgctggatggaggatctggaggaggagatcatctggaggggagaacatccagcatgctggagttgagaggtctagtttgtcttaaaaggcacaaatgaggagataattcttgaacagaatcttgaaggtggatagcatatggattatagaaagggaatgttcccactgattttaacaggatagattcagaggcacacagttgccacagctttggcaagcccaaagctgctttgttccagtagtagccttagaatcttaattgcctggagggcctttaaaagtactgcagtccagctttcttgctgcctaggaatccctctacaatgccctgtcaggagtgagtgctacatactttctcagggggttctttccactgttggacagctttaatttttagaaaatttttcatgtgtccagatcactgaatgcatcagctagaattaggtttgagtgtatataacagaaaaacctaaagtaatagagattttttaaaagacataaatatatttctttaagagaaaactggcctggcgcggtggctcacgcctgtaatcccaacactttgggaggccgaaatgggcggatcacttgaagccagaagtcaagatcagcctgggcaatgtggtgaaaccccgtctttactaaaaatacaaaaattagccgggtgtggtggtgggtgcctgtaatcaatcccagctactcaggaggctgaggcatgagaatcgcttgaacgcgggaggtggaggttgcagtgagccaaggtcacactaccgcactccagcctggacgacagagtgagactctctcaaaaaaattacaacacagtacaatacaatacaacacaacacaacaatacaatacaatacagtactacagtacaatacaatacaatgcaatgccagtacaattccattccattccattcattcccattccattccatgccgataaggccattcctgagtctttgaggtgccaggctgcttctgtctgtcattccgctatcagtagtgcatcccctcctgggccagggtagctgcctggggttctacctgtcaggttcatgtttcattcatgaagaggaagaggaaacggaaaaagaagggcttgccctccattttaattaaaaattattttggaatttattatacgtgcagaagagtatagaaagcacatatctacattttaatgaacaataataaaacaacgataccagattaggatataaaccatttatctctaactctacgcttcaccctgttacaaatatttcctttcttcccctctakggataaccccatcctgacttttataattattcccttgcctttttaaaaatagttttaaccacctgtgtatgcatcctaagtttagtttgtttttttttaaacttgatgtaaatggatgcatatgtatttttatttttgtgattttcctgtgttgctcagtattcatgcgatccatgttattgcatgtagtttaagttcattcatttttattgctgtatatatagtattttattgtgtgactaaactgcagttatttatccatttgacttataattcacatttgggttgtttccaatttgaggctttttcaaacattgctgttatgagcgttcttatataacaagtgatcacaagtgcaagagtttttctgggatttgtgcctaggagtggaattgctgattgtaaaggcatacatgcctaacttcactagatattgctaaacttttctgaagaggccaatacaatttataccactatcaacaatatatgagagttatttccacccaacttggcaaacctgatatttataaagcttattttttgacaatctggtaagcagataaatgtaattgtaatttccgtatgcatttcctgataactgatgtggttaagtacccttttcaatgtttaccaaccacttggattttctgttttgtggctgcctcttcaagtcatatgccttatcagttatttctcctttttagttctattattaatagattttgctgtatatttgctgagattttgttactaggtgcattcagatttaaaattgttacatcttgtaagttgagcttttcatataatttgctttttgacataatatagctacatcagctttttgtcatgaaataggaaacttcaaatgtatgataaatgaatgagttgcctgttagtataggcagaaactgcagaacaatcctagcccattattcaggctttatgtatcagcgatttgttctgttatcccataaagtgaatgagtcatttttgagtttaaaaaaatcatagggctttttttttgaggtccaatttgcatacagtaaagggcacaaatcttaattatccaggtcagtaaatatttatgtatgaatatacttccagatcaagatattaaacatttccagcactccagccagcttcttaatgtccctcccagttgatacctaccaaaggttttgcttagttttgctgattttgaactttacataaagtggaaacatacagtatattctcttttgtgagtggcctttttgctcaacattgtgtttgtgagattcagtcatgttcttaggtagcattagtttttctttcttattgctgtgtagtgttacaatgtataactatattataactaatttgttctgtagttgtagaacatttatgtttctagttttttggctattgtgaatgacactgctgccttcttgaacatgtcttggtaaacataaaatgtagagttgctgtgtggtaacgtgtactgccaaacagatttccaaagtggttgtactaatttacgctaccagagttttaatatataacttcttgatttagctttgggcagcaaatgttaaatttctgtcatctgcataccacacatggagaagagcactgagaactctttcctgaagttgtataggcacttttattttattttttatttttatttttttcggagacagggtttcaccctgttgcccaggcaggagtgcggtggtgcgatcatggcttcctgcagccttgaactctgggtctctaaccatcctcattgagaagcctcggcttcctaaagtgctgcgattatgggtgtgagccactgtacccagcctgtacaagcaattctaaaatgtgaaatgcccttccttttctgtaatttccccagagagtaaagcctactgcattcttgtttatctagtctgtaaatgttaatacacaattgatgggaacaaagcaaccttagttctttttgagtatgaaaaggaccctgttaagggcagaatttaaaatatttgtagtagttaattctcaggttaaaatcataatcttctagaatgctttagattctaagtggctattgtagtaacactttatactcaatattgggggaccatgttttttggaggctttcactgaagcatttaattccattcttttgaattcgttttgacagatgggtctaaaaaggaatagatcaattctgtattgaattccagtcttaatggcaccgagtctttgagacaattgaggcaaattggaaattctgttttcacattcttctgaaaggggatgcctttcagaagtgtcctgaagggcgctggggagggcaaatatgaggatgccagggtaagtctgctccctgtctggctgtgttgggccagagtggaagaaagcctaagactctgttacccagccctttctgaaaatgttttcaaatgctttcccaacaatcacgaccacaagagtcaacagtctgtttggatgactgaaaacacacaggtttacgatctgtaaagatagtaggtaagtgatttaatcttgttgtataggtaggccagagggcactygcagccttctgattgatttaatagattgttgaagattaagagttgacttaacatctctcttagaaaactgagaaatagctcattactaaggtgtgttttattaccaccgtctgtaagaaaatacaacataggcatgggaatcaaactacttaaagcctcttccagctcctttgtgactgggaaggttacttttccttgttgcttattgaagagaaaaggaaaatgtttatcattggataattcaggttcactgaatatttaatgagtgtttattatctgcagtcattttcttattaccttatctcatttaatattcacaacaaccctgtgagtggacgatggtatcttttttttttctcctgaacgttttgttgaattatcccaatggcttctatttttgcagatgagcagagtccagttgcatagaggtttagtgttgtgccacacatcacacagcttctaagtgagagctaaaattagagccraaggttttgattaccagtccagactttctaggacaccacagctgcctttctgtagaacagattaacatgactctcagagtccgcaagagtagtggtgaggtgtcagttcaggggaatactcaaaggtcactgtccttttcagrtatctgggtagttgctacagtatgtgcttaggaattgctggataaaaaaatattctttaaaatctcatcattttagtcgttaataatttattattataactcgtaaaaatatacctttaggcaagttattcttaggtagttatggttgctttcatttggagtccagagctttactctctatttctggagttgcaatttctgctgtccttggcccatttaaaaactttttcagaaggccttttaaattttatttttttattaaaagaaagcctgtgaatccaaagaatcttaggtggtttcttagctgaagggacatttggtgaacacaaatggaactgttaggtcatgatgcttttttaagtgtacaactctggtgttttgtatattcacagttgtgcagccatccccacgatcaattttaggacattttccaaagaaacccagtactcagcagtcacttccttatttccttctcaccggtcctcagcaactaccagtctactttgtgtagatttgcttagtcaggacacttcatataaatacaatcatacagtaaatatgtggtctttcctgattgacttcctgattaaccattcgtttaatggtttcaaggttcatccatgttgtagcatggatcagaactgcactcctttttattgcagttacagggcttttcctacagaattttaagtaatggatatatctaacaatgtctcttgttctcacctacaggagacacaggatcttgggcttactttacttatataggaccttttgtaatatcgaggctatttctatgctttattgtagaacagaagttattaactggggaatatggacctttatgactggcctttaggatgtcctgaattctttgtaattatataagattttatgttcacaagcattttctgggcgtcggaggagtctggaacagcaaagatctctagcttttgttaaaagataattttcgaaagtaatatcctgactcttatacagatataaaatgaacatatgttgaagattttattttactccaaaagaggaaaccaggcagatgttataactggttcaaaggagaggtccaaaaagctgctcatttatggatcaggaatatcaaatgaatgtgcaaatggaggcaaaacaactctctgtcataggggtaggaaagtcaggtgaaacttcacctgacggcagaatttgcatatttagggatctagattactttgcactgctatcagttatctacaactttcagagccgtaaacagcctcctcataatcagaatctggtaacccggaggggcgtcccagataatgcataatttttcantggaagccgtagggaaaaactctctcctctactctcacaccacaacaatcaacaccgaagacttccgtgaccaaacgtgtgggatttttttccccacactccaagaagcagacatcactgggtgtcgcctaattcaattctgacactgtctacctggagatagcatcagatctatgggttgagggctcagtcccaacccatacctgtctcccccaaccccaacctgtcacaagtctggtccttcaaaatgtctgactgactgtcttcaaggtgaggttcccatgacctcctcttggattggattaatttgctggaacagctcacagaactcagggaaacatttacttaggtttacaggtttattttaagggatactgcaaaggttacaaatgaagagatgcatggggcaaggtataggggaaggggtgtggagcytccatgcctccctgggtgcaccaccctccaggaacctccatgtgttcagctatccagaggctctctgaaccctgtccttttgggtttttatggaggcttagttacataggcatgattgacaaccatgtagaaatgtgactggacacaggaggcatgatctcatactaatagactgaccggaaacccagcaaggcctgtctgttcaggttgtcgctggcctttctgtgcagccttccttcctccagaatatggggcacaaccctcccaggaatgagggttttttggcccacagttggactagagtcttgctttgaggcaggtaaaagaggacaggagaaggttgagagagattctgtttcctgaggcccaaagtgccccagcattataatagaagactataacaagggctatgggggttatgaaccaggaaccatggatgcaaaccaatatatacgtataacatcacagaagcacactttcctgctcactttcaatagataccacaaagtttgaaactcttccaagtattaattttaaattaaatttactcagctgcttacttcagcttttaaaagtaggttcttggtaatttcgaagatgcactttccaaagggtgtttatatagttgaaggtcagtcagagacctagggataggtccctgcttattcttttgagcaggcttacgtgttggaaatctctagagaaatagctttagttaggttacacttctcagcaaatattcagtattcctcatctctaatagcagcatgactgttgtagggaaggaatttccacaaatggttatgaaaagtctaagtgtcttaactcccagacaaagatagagaattctgttagtaagataagtatgggactggagaagtcagctaacctctgcccttccccaatcgtgatatgctcagagaagttaagacttctttctgtgtgagaaatacgggatcttttccactagatcttgcttattatccaagaaattatcatttctagttttagagaatgatgaaactcatttgtgctttgaaatataacctgtatacatgtgcacagtaagtcatttrgctatttattgtcagactctgrgagttcatagcaaacttagcaacattccatgtgcaaatttgcatatttttccccccatatcttacctacttgccttaggctgggagtctattttcctacaaaactggtaattgctcttatctctgtgtccttcagtgtgttcctctgcttattgaattcagttttatgcatttagtcttctctcctagtataagctgctcctgatacttttaaatatgtatttcagaagagaggtgctcagaattgttacttaacagaatcagcatctccctttacttgatgccttgtcctgaccacaagtacattaataaagtgaccatttagcagtgtttcgggttcagcttttaggaacttagaagctgtggttttccatgagtgcacttctgatgacttgggaacatttcatatgtgtgttctttctgtggccaagatggttttgttatttcagggatggaaagatgctttgcctgaatactcccatgctaagtgtatagcagttggtgcttggggaatggtaccaagtgtacatatctggcaaggccaggctagaagggaaaatgtagactcttaagctttttgagacgaacttctcagatactggatctcttgactcacatagtggaattttgggggaagtatgtggtttgctttttgtctcctaagaaatgatgattcagtttcctcaaacgtttctcacagtcactactggttgcttggaatggctgtctggttttgttgctcagttcttacttctttaatgacccaagaggattttccctttggggttgtgatgtgtttttgatgataaactttaatgcttttggaggctataaagacaatagtattttcttacctgtttaccttgcactttgaagttctgtagactgtaatatgaaagaaaatcagattaaattagctttgctttctggcttttctttttttggtgggggggcagaagctgataagaataaatatactaactgagtctcttctgtattttaacttcactccctaggctgaggcttagtccttagagtaacatttgaactgggtagaacagatttttcttttcctcaacagcccattcctgctgtaaagctcagatttatggtccttctggaaaaagtattgagcgttgaatagttcaggaaaacaaataacaaattctgtcttctttgcaggattgtggggtagaagattttgatttttattagtatctggccaaagaataaatattaggcaggaacaatgaattgatatctagtagagtgacgtgactgggccctgacttttaacacttcccaggaaagcttcgtggatgtcttttccctgctgcgtgaataccgggtagccattaagtttggtgattgggtgtcagtaatatgttaagtcagctactgggtcatcttttaataaaagaaaaggatggggaagagaatggattcttaagcagtgttgcctgtcagaatcaccggagggaggtttacaaaatacacattctgtactctgaccctgtgggtggggtattctgacccaagaagatgattcgttccaggaatcatgcttcttggatgatattgatgtacccccactggctttatggaaagaatattgaagaagaagatagattctcttgggggctgtgcctctagtttgaaaccagggaaggcacattttggtattaktctgtggcctcagtttcttcatcactgcartgagattggactataggtggtctctaaggttccttcagacagtagcattttatgattttgaagacaacttttctgaagtacttttcaaactaatttctttccgtctttcttttgtaagcaaataagtagtatgagtgtaagtctctagctcagagaagaatgaagtttgcagttcgaaaaggccatgcaatagcagttcacttccccaaaatgctcagcccttgtaggatgccgttaggtcatctggaagttctgtatgccttcactgggagcgtagtgaagatgagagcctttcctttggctcttggagtaaactagctgacaggactttgagaactgttggtctcctgatttgtgccactgatagtttggctctggaaaactaggcagtggaaaaaacaatgcattttaaaccagaagatttgagtcctggctcygctatttccgagctttgtgacctgtaggcctcaatrtcttcatctgtgaaggacaggttcagctctgatggcctatgatgtgatgaaccttgtgaacttgtaggcagagtgccackgtgtgcagagtccagttacagataaccagccattctcctctgcagattcaacccactgccactgtgtcttgttaagcttaaataggagagatgtgggagagaggaggcagaaacatcctaggatcttgcaaaacaaaactgtcaaaagtataggcaatatcataattactttatttgaataaacgttgagttcctgctgtgttgaagatgctgttttaggcagtgtaggagatagaagacttatatcctcctcctaatttgtattcttatcagcacctggtaccatagagagttcatatattaaaattatttggttgttctccctaaccagagttgaattctttccttctaggacaaattaactcataatgcaataggctaatgcagtttggccctgagtgactcttgagaaataccctgagttgaggcacactggaaacgtggcacattagaaatgccaagaagaggccgggtgcggtggctcatgcctgtaatcccagctctttgggaggccgaggcgggtggatcacgaggcaggagatcgagaccatcctggctaacacggtgaaaccctgtctctactaaaaatacaaaaaattagctgggagtggtggcgggtgcctgtagtcccagctacttgggaggctgaggcaggagaatggcttgaacccgggaggtggagtttgcagtgaaccaagattgcaccactgcactccagcctgggtgacagagcaagactccgtctcaaaaaaaaaaaaaaaaaagaaatgccaagaagacattgtacaggagaatgaagggaaactttctgtagggaagtagctttcccagaaacttgactctataatgaagctatagagatcagtaaaatcattagggcattactgttttgaacatttccttgagtgaataacagacttacactcagggccctaggtctctgttgtggcccagcaagctgcattcagacaaggaggcagtttgagaggtacgagttgttatggaagcctgagaaaactggtttgtgtgcacttcagttttgaccatacaaccttcactcacttagcactgtgcagtaatccactgagcaaaattgccacattttccttggcagggaatctgtgtgcctgtggcagttcaraaattatttgtagagtgggtcagcctgtcagcaggaatgtttttctttgatcttcagcctgtttttctttaatgtgagcagaacagtaaagagagaatacattggaatatcttgttggttcccctgtttggctttacctacagctctttggttttcttcttttaggtcatactttcccaattagtatgtaggtatttatgatgttttgaagcccagagcgatggttccaatatcttgtggaattcagctctgagtgtgaagtcctgactttgcctctttctatcagtttgactgagcaagtcacttaacctttcttgacttcagttttccccatctatagagtgatactgyacactggtttcttttcttttctttttccccttcctttccttttcctttttcttttccttccctctccctctcctccctttgcctttgcctttccctttccctttcctgagatagagtctcactctgccgcccaagttgtattggagtgcagtagcatgctcatagctcaatgcagcatcaaatgcctgggctcaagtgatcctcctaccttagcctgccaagtagctgggactacaggagtgtgccaccatgcctrctgcttttttgtttgtttgttttttaaatttttttgtagggatgggawcttgttatgttgctcaggctggtcttgaactcctggcctcaggggatcctcctgccttagcctcccaaagtgctgggattacaagtactttataatgtgtaaatggcctgtacattcttaatctaatagcctcatgaggttataaaatacaaataaaataacatgaaagccatttagagttttaaggtgtataataccatgtattctcattaattaaattttaataaatttaaaagataaaattatttttataaaataaatttatttttaaaattttaattacgttaaaaagttaatgctttttttttttgagacagagtcttgctctgtcacccaggctggagtacagtggtacgatcttggctcactgcaacccccgcctcccaggttcaagcgattctcatgcttcagcctcctgggtagctgggactacaggtgtacgccaccatgcctggctaatttttctatttttagtagagacagggtttccccatgttagccaggctggtctcaaactcctgacctcaggtgatctacccacctcggcctcccagagtgctgggattacaggtgtgagccaccatgcctggccaaattaaaaagttaatactttttaagtgcttcactctttcctgtgcatgttgtcttggcctctttttctaaattagttttattccctctgtaatcagagggtcaccaaatctttgagttttagagggaagagaaagtttttagtgaaacaagtgggtgaactctgatccctgtaaaatagtgccttcatacagtaggcactccaaaaataattgttgaatgactgaaactcttaaacagcagtaagcatacgtatagcagagacaacattacagagtagagctctttctaggttggcatggtagatagctctgagggactacctgaatggagatgccattgcttttgaataaaacaaatatacatggtgtcttagtccattttctgctgtgatagcagaataccacagattgggtaattataaacaatagaagtttatttggctcgtggttctagaggctgggaagtccaagagcatggcactgatatctggtgagggccttcttcttgctgaataataacatgtcagaagggcaagtgagcacgcgagctagaggggatgggccaagatgtcatcctttatcaggagcccactcccaagataatggcattaatatactcatgagggcagaaccctcctgatctaaatcacctcttaaagatcccacctctcaacactgttacaatggcaattaaatttcaacgtgagttttagrggggacattcaaatcataacaggtagttagccctgttgagtaatggagaaaggattgtattagttccaaggaaagatgcatcatccagtgtgggtctggaaatatttgccagatggcttttctcttttagtaatattcatttgtggaatgtttctttaggtataaattggtgctgaagtaatttgataaggaaaaaatatcactgcctaattggtatttggtcacgagcagtaccagttcgtaagatttttttggaggtagcaaggggtggatagtgctactattggaagtttgcttatggaatcttttgctctcttgaagtgatttggagattaaaagagtttagtatcattggggatagctgtggtctactgtcagttaggaagtaactcatgactagatatcctgggcttattacttcagctcatattcctgacctcacaaaaatgttaagagaataaatcgtaagtataaaaagcactgagattgtgtagagtggaaaataacattagtgttagctccctcactgtattacacaaccacattctaaatttaaggaagccagaagtaaaatcactctgaagcactgcttttgaaactgcagattatgatccatttagagggacacaaaatcagtttagtatatcaagcgttaaagaaggaagaaatagaaatgtgagtacattacaagtaataaggtgctaagtattattttggaaacttttggttttatatgtttctgtttctacatgtattagattgtgttgtaaaagacatttctttgggactgtattttacaacacagtctcatacacgtagactctaatacacatattgaaacagtttgaaactcagtggtctaacaagtagcataccccaaatttacaatatttgtagccttctgctgttgggtacattcatgaaaaggtcttgcatccttaaagtgaaggctgaaagagttttatgtcattggggcragtgggctaccaagctcccataaattctaggagctgccttttgtctaacgattaggattattgagtactattttgatgccttttgggtatcatctgaaatgtaatcattgaattggaaatggaataaacaagagaaaggctagtttactcattatttgacaatagctctttaaagtagttaatattatgaatattcctactactaaggtttataagagtttgtttttttctttaatgttatactttaaaaagtattattcattcactgggcaaataatttttttttctagaggaatacctttccaattttataacagtgaaggaaggaatgttttacttayagaaactgtactgaaactactgttctattaagcaagggttggagataagcacccctgtcccccttccctgcccaggcacacacatatacagatacagcttattttatgactgtattgttcttgtgtttcttcttctagataaagacataaagattgatgaaataatttacctggagttgcacagtaagctagtggcctttgtggatgaccattcatagttcatatatttccagagacacaatacattgataaaattgaaataaacagaagcctaagaattataagtatatattcagagatatatagacaaaaaagtactgttataagtaaaaagacatagtgggaatagtaattataatcacatgaacttctgtgccatctctatctagatcaggggtgtccagtcttttggctgtcctgggccacattggaagaagaataattgtcttgggccacacataaaatatactaatgatagctgatgagcttaaaaaaaaataaaaattgcaaaaaaaaaaagtctcatgatgttttaagaaagtttacaaatttgttttgggctacattcagagctgtcctggactgcatgttggacaaggttgatctagatgtttatctgtagtcatgacctaactatataattttagtatgttatacatggtaccatgtatccagggtagatcctgccaagaacataaattgtgaaaagaaaactcttgggatgctgctggattgtaatgtgttactcctctgcccatgaatactgaaaatcaagatttgaaagggtactgaatactgagtcaaaaggcatgcgttcctagacttcacttaatcacaagcatgtctgtatgagcgtagtcatgtcatttcactttggggtctctgcttgtaaaatgaaaatgttagacttgatcttccaggttcccttcagctcttacattctgtgcttcccaagggctagagtattgcatcaggacccagcctggggtttgtgctgttttcaaggtcctaaggaactgcatcatcctttagtccaaggagataggataccttatgccacagagcccaataattcagtgagctgtgagtgttgtgagttgcatctacattggggactgagcctaggttgtttgtagtaacactaggaggaccttagaatgatgccaggagatgtaatttctgtgatcaactagttgactactcaaaaagcttgtcaggacccatccaactacagtgtcattctgtctttggtgttaaagaatttagatttatctccttttaaaggacctcctttgaatttaagaattgccattatcttcataagaatcaaaacaaatacaaagaaaatatattcttgctgaatgtaatttttaaatgttagtgargaatgtctttatatcttaattttaaggcttttaaaaattagtttgcatttgctggttctttgctgtcaccctaatactggttatgttacttttttgctcagtgctgtgaattgttcataatatctatagtcatcttttgacattggtaacttctgttttctgggtgaattaggaattagtatcaccagaagaaaagctaatctgaataattgttctttcatcatctcgttcatgcacagtatttaaccatctggtttgaccacaactttcacactagacgagtctttataatgatagaaatcatgacatacttttgatgatagactcctctggtctttcccaggttttggctggtattgccattgctttggattgaggttgttgatgcaacagtgggctctggggaatggccaccaagaactgttggggaattgcagataaactgtctccatgggtagccctccagggaacttagtagttgtctaatgttaattaccttataccacagtctaattactaagagtattgtctgagtccattcaggctgctataacaaaatgccataaacgtggtggcatataaacaaaagtccatttctctcagttctggaggccaggaagcccaagagcaaggcaacagcagatatggtgcctgatgaggcccacttcctggaaggtggccttcataaaagtggttcatagaaaatgtcttctcactgtatcttcacatggtagaaggggcamatttgctctctgggggtctcttttataaagtcactaatcttattcacgaggcctctgccttcatgatctaatgaccccccaaaggctccctcttcctcctwccatcagcttgagggttagatttcaacatatgaatttttgggggatgtaaacattcagtccattgcaggtataaatgttttcaacaagcatttgttgagtatctgtcctttttctaagctttcatgttcctactagaacactggatgtggatatccaataggaatatatttaagtcagtatcattatctttttctcaaaacatcttctaccttttttaccttcccttcctcttctagtcttaccatagttaatactgatattaactgttaacatcatagttaaccagtctgtcgaacttgaacttgaaaattttgaatgatctatacccacacccgaaaaaattactcacatacttaaaaatccatgccttttgttttgttttattgctgttgtttgtaatttacttatttttaccygatactatgttctggaaatttttctacgtagttcatgtagatctgtcttcttcttaatgtttcatggtatgggtacataaaatgcacgtattatagtttatttaaccattcttctgtgggtggacatttacattattttttcccttttgttagagaatactgaaatgaatatccttgaacatgtttatttgtatacatgtgcaaagtatgcagatgccaaaaagtgagattgctaggtcaaaacgaacatgcgtttaaaatgttgatagataccaacaaattgctttacaaaagttcctatcagtttgtatatcagtttttctaagtcctttttaaacatggactggattagcccgttcttgcattgttgttaagaaatacctgagtctgggtaatttataaagaaaagagggttaattggctcatggttctgcatatttgtacaaacatggcttcaacatctgcttccggtgagacctcaggaagcttacaatcatggcrgaaggcaaaacttgagcaggcacgtcacatggcaagagtgagagcaagaaagagagkggggggaggtcctaggcttataaacaaccggatctcacctgaactaactgagcaagaactcattcatgaaagatgcacccccgtgatccagtcatctcccaccagacctcatctccaatgtcgggaatcacatttcaacatgagatttggaggataggcatccaaaccatatcatggacctagcatacttctcccagcctcacgtctctgatttaagtgttcactcatttacttgggcactgttacttgggcactgtcagcccctgtccatgtttgtattcagtataaattgtgtgccgggcactctgccacatgttggggatttagtactggatgagacagaaatggtccctgccatcatgtagcttacactttgccacatagaacttttgccatatgcagactctttttatgcatttgcagctactatcctctctttctggtatgacttttttccttttaacttttctacctagagaattttctttcatccttttaaccagcttaaattttgccctcygtcattatctttatcccttcagagttagatagtccttcctcagtgctccatcttggcactcatatgctttttgtggctattcccctgagaagttttcgtgatttgtttgtatatgtatgtgcctgtgtgtgtgtgtgtgtgtggacacacatctacatcttgcatattagattgtaaactcagtatagacttggaactatgatatgtacctgaacacttccccagcttactgccttcaaccctggagatgcttaatcaatgttgattaagtgaatgaatagtaaactataaaatgaccttagtttgtacagggcattgtaggggattgtagatatgaatagaactggtctgtcttcaagaacttaaccatatagtcagggagataagaaacagatgagtagactgcaaggcaggttgtgataagctctgtataggacttatcaaaaatgagtactggaggagaatttaaagggagagaggaattctcgtgaatgagatactctggtaagtttacagaggacaggttttttcttgctcgtaccaggtgttgtgaggaatacacatgatggtaagatatggttgctgactgagagattatagtcaagtaaggccttagagcaggcattggtaaattgtggcctgcaagccaaatctggctcttgcctgcttttatatggtccttgtgctaagaatgatttttacattttaaaaattgttaaagaatattttatgaacatgaaaattatatgaaattcaagttttggtgtcygtaattacattgtgttggaacacagccatgttcctttgtttacacaataactgactatatttgtactccagcagcagagakgagtagttgtaaaggagaatgtttgctttgcaacacttaaaatataaaataatttagtatcaagctcattacagaaccagtttgctgactactggggtagagaataggaaagattcaaatagagaagagaaatgacattgatattgggggtattagtgtgagttaagagagtgggacagtgattctagcagtcatatagaaattttagggctgaagtgacgatctagcttaaccctcttactgtataaaataggcacaagattgaaaatagtctcaaagtccactagctgttaagtggcagtggagtgctgctggagtgactggtacagaagccttgagggctgtagatgataataagattattgctgaagaagggcaagatccggaatgaccttgcccttgaaaaatgagagttgaagtacaaactaagaacagacttcttttctctctctaaatgtaatgtttttatttttcacttgtatttctagaaggcctttgagccctacttagagattttggaaktatactccacaaaagccaagaattatgtaaatggacattgcaccaagtatgagccctggcagctaattgcatggagtgtcgtgtggaccctgctgatagtctggggatatgagtttgtcttccagccagagagtaagtatgctgtctcctctgtaaaggtatagtggtgtgtcactagcctcaaactaattgctgagagataggactaatttattgccttttggttgtttttttgtttgtttgtttgtttttgagacggagtctccatctgttgctaggctggagtgcactggcctgatcttggctcactgcaacctctgcctcccaggttcaagtgattctcctacctcggcctcccgagtagctgggactacaggcacacgccaccacgcccagctaatttttgtatttttagtggagatggggtttcaccatgttggtcaggatggtcttgatctcttgacctcgtgatccacccacctcggcctcccaaagtgctgggattacaagcgtgagccaccgtgcccggccctggtttggttcttatttttaaaatctgtttaaatgtaaagcagtactttgtcttctgattggtcaagttataacaggactcttgtataactaatactccttacattgattttttttggatttgtagttcacgtaaaaacgcctcagaattagtcattgtaaggatccacagaaatctcagtatggtttaaacctttggtaccagtttcttccctagaacataattatgtcacctggagttcccagagcaggaatttattgctttcattttgtgctatccttttcagtaaagattaggtgaaattggaacagcacttacatggtgaccatttgagtgcttgctatgtgccaggcactgccatcaggctgtggggatatctgcacaagtagtacaggatctctctcctcttggagttgaactggtatcaggggatcgtatactttgagcttcctagaagtgactcagtgccagatcaacatggggaagaagaggccacttctcagggtgcagaagatgagcagtctcagtgatctgcttctgaatcttccacctttgcttaggattaagcccctctcctgcccacccacctttttcccgcctagaaacctggttgtgtgttaccttccttttttttttttttttttttttttttttttgagacggagtttcgctctgttgcccaggctggagtgcagtggcgcgatctcgactcactgcaagctccgcctcccgggttcacgccattctcctgcctcagcctcccgtgtagctgggactacaggcacgcgccaccatgcccggctaatttttgtatttttagtagagacggggtttcaccgtgttagccaggatggtctcgatctcctgacctcgtgatccgcccgtctcggcctcccaaagtgctgggattacaggcgtgagccaccgcgcccggccctaccttcttatgagttattttcctctgcagtctgtgcttggtgagtgttgttagtacctaaacacaagtagtggatttggtgctggatgttctataacactcccctgcaccttttccccactcttagtagggtatgggagttaacttccttgggataagaaaacagtaacattgaagataatcattagctgtttctcatttgcttgaaatttccccaccactttgcttccctgataacacctgtttaaaagggctctttaatgtgttttttctgcttttcttctcttgttcaaggaaagtcaatttagaagccagattccatttttatctctttaccctgcaaatagcttcttagccatttatggcgcagtaaacattgcaaaacctgacaaccaagaagcaagttccaactgcttagagtttttaaattaaagtggaaatgagacctgactctcctgtgtaaatctgtagctcactccagctttaaaaaccttgtcctcagttgctgctcctagtccttgcaagattttctgataaactctaagaaattagactggccggcccttccgctgcatctgctcaatggtttggatatggatgtagcttgtgtccttctgctcttgcttattcctttcctaggaagtattcaattcagtgagtaaggggcccatttcagaggattctgaggggtagcaagaaatatactttctttttattttttaacttttcattaaaaaaaaatcagtctctgcttatccttctattataataaaatatatacaacataaaatttaccactttaaccatttttaagtgtacagttagtcctgtggcagtaagtacgttcacattattgtacaggcatcactattaccagaactttttcatcacyccactggaactccattttaataaacatcaaataataactgcccattactctctcccgcatcccctggaaaccaccatttattgtatcgccttgttttacaaatgtactacaattcaaaggtggtacatttatgaaataaggctaagcttagagatctgagatttatattttacttgctatgattaatattaattttaggtattctttttaaaacaaattttaaaattaattggcaaataaacattgtttatatttatcatgtacaacatatgttttgaaatatgtatacattgtgaaatgggtaaattgagctaattaacatgcattacctcccatatttttctttttttgtggttaggtatttacttctgttttcagttctgcagctcactatgccatacattttgcttagctaatagtagagacacagccatcttaggttctgatacttatctgcttttagtggtcaaaaaggaatatgctggcctctgagaggccaattttccatgagaaaattgttagtcgtagtatactgatgagatatgccatctaaatccttgtgggctgaactccaagccatttgaggttttttttttgttttttgttttttgtttttgagacggagtctcactctgtcacccaggctggagttcagtggcatgatcttggctcactgcaacctctgcctcccgggttcaagcaattctccctgcctcagcctcatgagtagctgggattataggtgcccactatcacgcctgcctaatttttgtatttttagtagagatggggtttcgccatgttggccaggctggttttgaactcctgacctcaggtgatccgcccacctcaacctcccaaagtgctgagattacaggcctgagccaccatgcccagctgagttattttgtttctaaagatacaaaacaaaagcagtacatattcactatggaaaagttggacaatatgggtatataataagaacaaaattaaaatcttactactgaaggataccactattgtatttctctgtttctatatctgaatccagtttgaaccatacaaaatgtaattttgtaaaaaaaaaatcgtcaaatgttgacaattttatacaatttagcacatacacacacagcacactttcatttggtaatttccaacttgaattttagacacagataagaatgtcttccctccagagatcagggataattttgatagaatattcattttttttagcacttgctcacttgccatgtgttgctgaacaatcaagttatttttagttacactgcactaaaggagtctgaagtctggactagtgatgaattttgctgatcttccaacactgaatccctcttgagggaagagagtatttctggaacaaaggatggagcctggggtagaggagaagtgggcagcggcatgaactgtgctggggttagcagcctcttccttaattctgcctctgtgattatcagctcacagtttattacttttactttaatgctgattttaactgtgggttgtccataattcatcaacagaaatcagctttatgtcatggaggaaatgataaactctcagtttcttgttgtgtcaccttgggtgacacccttaagctctcttagcccatttccttgcaataaaatggacatcataatagctgctttacctagtcatgggtaatatgaggactgaatggcatcttttgcatgagtggaatttgtaaactgttaagaaccatgcattgttcttacactggcattttctattttgttaaacttaaaattctttttttaaagtaacaaataaaaattgtatgtttatgatgtacaacatgaagttttcmaatgtgtaagttgtggaatggctcaatcaaactaacgtgattacctcacgtacttttttttttttttttttttttttttytgagatggagttttgctctgtcacccaggctggagtgcagtggcacgatctcggctcactgcaacctccgcctcctgggttcaagcgattcacttgcttcagcctcccgagtagctgggattacaggcgcgtgccatcacgcccagctaatttttgtatttttagtagagacagggtttcaccatgttggtcaggctggtcttgaactctgatctcctgatccgcctgccttggcctcccaaagtgctgggataacaggcgtgaaccaccacacctggcctcatgtaccttttttaatggtgagaacacttaaaatctactttcttagcaatcttgacgtatgcaacacatttttatttactatgtcaccatgatctcttgaacttattgcttccgtctaactggaattttctatccttttgaccatctcccagtcttccttcttccccttactctcaatcccactaaaaaattctaattacttttcattctgtaccttctggggacttttgagataatctttttaggtcagggccatgggatctttttatttttagtttcttcatctctgatgctgtattccgttctttttaccctgtaccattttttctcacaacttccacaaaattagtttattcttttatcctccacctagtcacattactatacttctggacagctggtccagtttgctgatttttagacttctttttacctcattaattacttcatcaaataaggaagcatttctgaatctgtacagctttaacagttagaaatagttgaataacaagaagctaaaatatccaatattagattatagtcatttgatgaactattataacattaaaaatatgtttagaaagaattgttaataatgtagaaagtgctatcagtgaggaggatacagttattttacattatacagaatctcaggtatgtattacagtgtgtagaacatagggctagaaggaaatactccaaaatttaaacaaaaagtaaccacaaacaagtggtttcagtctctttgtcttcttattcagtctgtgtcttagttacctggttttgtcccaggtgtttacagaatgtggactctagggagagttagaaagagagggatgcagctgaagcaaaaacagctagcagagatgcaaggcatgatgtgatagatacaaaaagggggtgcagacacatcccgtggttgttgagtgaagagggagctccttctggccaggaaagtgggaatttccagatctcctaggaatgcagtagaagttcatattcagttcacaccttggataaaagccaggcttagattcttatagactcaaacagaaaattcctgtggtgcatttgaagcagtatagaatcctgggaatcctggactgaaaatacaaagacttcagttaaatctttgctctatcactgattttatctgtggccttgagcaagttttgatgctttgatcttgcattgccttttatgtcactcgtagatggtatataatgccttctgtgccagcctcagaatgctgttgtcagagtcagtcgagatacattgattgtgaatgcatcagaaggtctattagtctatttagatgccatgtatttatgattattatgatcgacaggatttgtattccctatttgttctatgtactgcctgacagagtggactctggcatctgtgatttttcaaacttttttttctttttgttgagacagggtctcactgtgttgcccaggctggtctcaccctcctgtgctcaagcagtcctcccacctcggcctcccacagtgctgggattagaggtgtgagccactgtgcctggccagcatccacaattttgagggcatttgtaggtccagaaaatgttagaatctgtgttggatgagaggctggacatagatccaagaaaaacaaaactaaaaacaggctgcccattagtcttgggggaaggaagagaaatgttgaacatctagaaaccttaggaaggtcaagaattctggaacacgtatatcatttgacctagtagttctgcttctgggagtttatcctgtaggtgtacttgtagtttatcctgtaggtgtgcagtatggtgtgtgttacaaggttatttcagcatgatttgtaatagcaaatattagaagcaacctatatatccatcattaaggggcaggttaaataaattttggcacatccataaaatggaatactctgcagctataaaaatgaatgaggatgcactgatctttaagataatactcctaagtggaaaaacaaggtctactacagtgctagagtgtgctactttttgtgcaaaaaaagggagacaaataagaatatagctttactgttgcacgtgtatgcataaggaaactcaggggggtagcatgagggttggggggatacgtttgagagagggaagcttcactgctttactgtgtgtgttatgtgtttgtatttttaaaattttgaaccatgtaaatatagtacttattcacaaacttaaatttaaaagtttttttwaaattttttaaacgaaagaaactctttgcaattggaaggcaagtgaggtggaagacacattgaatggttgctatatgccaggtcatatccatggaaatttatttgaataagagaaccatttgtttcttttaggtttatggtcaaggtttaaaaagaaatgttttaagctcaccaggaagatgcccattattggtcgtaaggtaagtagaatctgtgtatgtcattttttcccctcttgataatcatacctctttctttctatttactaaacctaatattctcaaagtggaggggtgattttgtctcttacctccaggggacacttggcagcatttggagacatttttggtggtcacagcttggatggaggggtgctcttggcatgtaatggatcgtgtccagaaatgctgctaaacactaaacatcctacagtgtacagggcagcccccscccacccaccaaacacagaattatctggctggaaatgtcaaaatggccaaggttgagaaccctgacttaaccctttctccaaygtaactggccaaaggagagatgagaagcctgttaaggaagtaagaatttgagaaaacctgactgtattgttaggtgctttggaacaacatgcagctggctgactttaggtatttatctaggagttgggtgcttacatggtttaggtcaggggtcggcaaatgttttctataaagggctagatatgaaacattttgggctctgtaggccatatcatttctgttgcaactcctcacctctgcccttgcagagggacagcagcaagaggttcaggaatgagcctggctatattccagtgaaactttctttacgaattcaggtaggcctttgttggttcctggctgtagtttgctgatcccaagttgcacagcgctgtctcttgctgtttgcaattttctgtattgtagtatgtcccctttgttatgtcctcttggccctcatccatgttgaggataaggtagtcacctctgtgcgtctcccacaggttatcccagatgaagataaacagggcaggccacttggcaagctctaaggaaggcatatgagtccttggaatcttcatctcctccagtgccctcccctgacccccctttggtctttcccaactttacctgcctttaagttttcttctacttttggctttcagttccctttcctggctataccagggtttgtttgccaacccctgacctaaagttggccagttatctttaacctttggctgaaatccattcagatcgctgtgctaactctcccagagataggtatcttcaggttcatttcctgtaggagagtgggagcaataacaggtggtgaagggaaatgtgagcatataggcttctgtttgctctccaaattatattaatccctaaaagtaaatctagtccttacagagtataaggggtggggacagggaaggtattgtagaagatggactgtagcacaaaggagattaggatttccccttatctcctgaatttttttttcttcttttcgttcagttttcagactttgagacaaataaatgctagggttccagaacccactcttaaacttagaaagtaacagaattggaagatccttagcttgccaaggactatccaatcactctccatttttcagaaacagattctgaggcttagatacaaaaavttacatgtgtgtakgtgtgtgtgtgtgtgtgtgtgygcgcgcrcgcgtgtgtgtatacctctgtcatttattcacttaacacatgcttattgagccacctgctcagtgtcaagtacttttctgggtgctggggatatggtggtgaacaagaccaaatccttcctctcatggaacttacattttaataggaaagacagaaaataaagaagtaaacaaatatgtggaattttattttgaaataaatgctttgaagaaattaaaattgggtaacgtaatacaggctttgaggcaagaattgggggtaaggaagtacttgtgctttctaatatacctctctgtcactttttgtctgttttatggcaatagcatactctatgtatggaagctcagctttcatagcctgttctgttgcatgagtcgccatttatgtgaattaattttttaatttacaacttaaaaaatgtcttcacatscatagcatgcccaggcattgcccaggagtgtagcctctgctccctgccagtgtgggcctcttagactattgcagacatgctcgaaaggagtggctttccctgtggtttcactgagggccatatctaagaagatcttcttgtattctaattatccttggctagagatgagaaaatcttagtgtggagtgagttctggygttctttaacaaatatattgctgaaacaatagcactgtgacaaatcgtgacatgtagcttctctccccaaacctactacccaagagccttttgctataagcagcagcccctgcccttctgcctccttactctgctattttttttccctcagcactttttgttacctgtcttactattttctgtctctcctgctgaaaataaacttcatgaggacaggaggttttttttcctgtgtgctccattgcctaagtttgttttgttcactatgtgtccctggcctgcatatttgtgaatatgcagtgaatatgaatgtgaatatgtaagtgaataaaagaaaacagctcagaagctgtggctttgaggatggaaaagaagggaaccatagttgataaactacctagcagaaaggaccttagttccttttaatattttggggtcagacagtgcaagctgtcgacagcagcttaaggagayacattagagtcttcctggcagttcttagaatgccttgtgmtagtgttgaatggsacctccaaattcctagtgtgctgcgtgtatgtctgttgaaggagctcatcacttgcacaaggaccagaatcacttttactgcagcatggccagttttstggccactgttcctagttayacctttgattcttttacacacacactgtagctgctgccaaggcaggatcaaagtccaaatactgccctcaaggatgtgctgactttagcaatgccaaccaagtgaagcagcagtgatgtcaatgtggcagagaaaagggttatggggaaattgggtgcaacttttttttttttttttttgagacagagtcttgctctgttgcccaggctgaatggagtacagtggtgtgatcttggctcactgcaacctccacctcctgggttcaagtgattctcatgcctcagcctcccaagtagctgggattacaaatgcctgctaccatgcctggctaatttttgtatttttagtagagatggggtttcaccatgttggccaggctggtctcgaactcctgacctgtaatgatctgcccacctcggcttcctgaagagctgtgataataggtgtaagccaccgcgaccggctgagtgcatcttgacctttagagagaagcttcgcttttcaaatttttaagaggctattgtacatgccagaaagtagctgatcagtcagaatatcaccatatatctttaggaaaaatgttagtttagttacttgtgcggtgcctagcattgagcagttgcttgactgtcataataattctgctgtctctacygtactcttgcatctggataactttgtctttcttacctttggagattcaagacaagttgaacaagaccaaggatgatattagcaagaacatgtcattcctgaargtggacaaagagtatgtgaaagctttaccctcccagggtctgagctcatctgctgttttggagaaacttaaggagtacagctctatgggtatgatgcttggcatatacatgctctctacttccttaaagagacaggttttgtcattgtttaatgttcacataggttaagaataactcatcattggttaatacatgtttaggagggcctactctctgtttcacaggttgaatttcctatttttaaaattatgtttagattcatccttcatccataaagcaagcaaatctcagagacagtggaacttggcttttatttccttttgtaagcatgaataaaacaaatatatttgtgtttaagaagagagartataagatatgtaatacaaatgaaatacagatccatgtaaaaatgtgaaatctgcataaaggcacaaaagaaaataagtcactataattccactatcaaagataaacagatggtgtctatctttatgcatgtagctataggtagagctgtctatatagtttacatctatctatatatgtatatctgtctgtttctgagaatgctaatagtgtttgtctgtgtgtatacacatgtatgcatgagcacatatgggatggataaatagaccaaatagcttggtgcttaagagcgtaaccctggaaccagcctggattcataycttggtttgccacttaaagtatgcctttggcgagttacttctgtatgtcacagttcctgtatctctacaatggggatagtaatagtagtacagtacttacctgaaaagatgattatggggattaaatgagatcatacatgtataaatgttttatagtgcctggcatatagtaaggattcagtaaatgttaaacattattgctattattaactcaaacagatttatgtttgttactgattaagatcatattacaagtactttttaaaaagaagctttttagtttgatatatttacagaaaagtagcaaagatgatagagatttccctatacccagcttctcctgatgttaacatcctctataaccatggtacgtttatcaaaactaaaaaattaacattggtacagtgctattaactacactacaaattctatttctagttcatcagggtttttttttgttttgctatgttttgttttaaactaatgttcttttttctattctaggagccaatccaggagccatgttgcattttgacaaatacccttattttttattttttgagacagagtctcactgtgttgcccaggctggaatgcagtggtgtgatctcagctcactgcaacttccaccttccaggcttaagcaattctcgtgcctcagcctcccaagtagctgagattacaggcgtgcggcaccatacccagctaattttttgtgtttttagtagagataagatttcaccatgttgcccaggttggtctcgaactcctgaactcaggtgatctgcccaccttggcctcccaaagtgctaggattacaggtgtgagccactgtgctcggccttgacaaatacycttacaatttctaagtgacatgtgttgaggtcttgacattgaatagtacaaaatttgatatagtctaggatgtagatgaataaagcagtggttagcactctaaaacctggtgttaaagatttccatgattatgagacctggttgccgccatcatattgccttctctttaatgtttaagtcactgtccattgctgtattctctagcatcagtaaaagaacaggaaatgaaaccagttatcttatttttgaaaggctggtgaccactggtctgaagctgtgtatagtacagagcagtgtcctctaaggaaagagtgaaagtcaaacgggcagcaagccagagcttggcagattgctgtaagaatgagtttgtctgtatatttaccacttagttttctgttctcaagagctgaagatctttgctttggagagcccttggctccatgcagtttttagttggtgtgtttccgtaatagctttctcactacccactttcaatagggcacagctgcattgtagcacaaggacctgagacacccatatcaacaaatttgtgggtaaaatgaagaatgtctcggggagagaggaaagtggaaagtcagatcttatattctactcaggaactttacttttctttccacactgggataaaggaggtttatcccaatgttgactgtgttcctgatcttgaatatgctacagcgtgtgctgctggaagcaggtaactagttttatgtgggtttccaggcttggcttaagggagccggcgtctgagaccggggtgctcatggtttatacctcattgtggtttgtttgctggtttcatctctgatgatagtgtgctgaaatttcacacttttcattttgctttcttctgccaactctgctcataatagttctcaaaattcctaggactggataggaaaggagagaagaaggaagctattgcagaaaaaggccactccaaagccatatagagaacaaaaaataagtatagacaaaggcaaatgttcctgctgttagaaggcagttgaggatgaggacaacattattatcagattgcctttattgtagctaaatgctattaatatctttttcacattgctgataataatgatttttcatctttattttattgtgctaactctattgaacttttttcttgatttgctataagaatgctgttgggtttccwctcaacatttttttcttttgtatccagaggagtttcttcctgtttcttctttatcagaacctgtcttcccagagattcttgcttactgaccagtgaccttacctttctctgcagacgccttctggcaagaggggagagcctctggaacagtgtacagtggggaggagaagctcactgagctccttgtgaaggtgagtgtccagttcttgagggaagcctgtgaggtctgtgccagtttacatgacctcctttttttcccttacttttgtaattagaaaaattacttaaggaaagcttattggtacaataaaaccataaaagtttctcttcacccaaacataggcgaatatgtataatattatcaaagacatcttcagtctgtaaaatagtaaaatgttatttatgttttcagtctttgcagatgtcctgtctagaaggcagattactagggaaggtagtcctgtcagatgagatttttgtggtgagacagattttgtttgataagaagagataagatagggaaactctttcataattttctcaaatcatgtgacccaagatgagcagtggtctcatgtatacttcaaataattctcattcttagcttcttccatttctaatcaaatttatttttattttattttattatttttacagacaaagtctcactctgtcacacaggctggagtggagtggtgtaatcatggctcacttcagccttgacctctttggctcaagtgatcctcccacctcagcctcctgagtagttgggactacaggcgtgcatcatgacacccagctaatttttgtatttttttgttggagatggggtctcactctgttgcccaggttggtcttcaactcccagcctcaagtgatcctcctgccttggcctctgaaagtgttgagattacagctgtgaaccactgcactcggccctcatatttatttttgaaactccacttcatcatataaaattggggttgtactgatgatctctaaggtctttgtgtttgattattataaatatgaaactgtcccttactaaataaatatggcaggttttgcataagttggtgtaatgctctgatcttctgtgcttaaaatctttcagtagcttcccattatctacaggatgaaactcaggttcttatgcagcagagaatacaagtttcttcatgagccagctcccacttattttttcttaactacttctcttyatttcccacataaacactaatcctgccttttctctttactaaatgtgtcatgcttttacgttgttttccttcccttccatcattcctcttgttccaaatgatgattcctactcatctctcaaagttccactcagcagacacctctagatcactcaggatgttagttgttccctcttcagggtcccttagcactctgtacacacacctgatattgcagtcgataacaacagctgctttgtgccagacactctactaagtgcttcacatgcattatgttatttaattattgctagaacactagaagatagctaccataacaacttctgcgtatgaagaaacaaccttagattatgtgacctacacagctgaaagtaataggcaaagcttagacttcctcctgggtcggtttggtgttatagtctgcgcttttaaccatatttatacttctttcctcatcacattgtaaaattatttatttacatgtctgtctcctctgctatgttttgatcttttggttgaggaatatatcttatctttttttccagtttatattgttgtgcctaatacttagaaactgttgtttagtgcatgattctttgtcctgtatagtgtaatagttttgatttcacatctgcttgcatttttttgcaggcttatggagattttgcatggagtaaccccctgcatccagatatcttcccaggactacgcaagatagaggcagaaatygtgaggatagcttgttccctgttcaatgggggaccagattcgtgtggatgtgtaagtatatgcaaggggcatccaatagccttattttttaggttaaaatagaagagtttttaataaatattaattatattttaaaaaataaaaaatattaaaaatattttactacacaagaaatatttgatcattgtagaaaggtcattttactacacaaggaatatttgatcattgtagaaagatcctaattaactgcagttttaaatgttacttrtaattttgtaacctagacaatgtcaacattttggtatatattcttctagatatttttattttcacctttttattttgaaaaactttgaacctacattgagttgctaggatggcttaaagaacaccttagattcactaaatgtaaatatgttgccatatctgctctctacactctttccctccctacccgcttcttccctcatcccccacctgcatacctaccattcccctatttatctgtgtatacttttgttgttccatccagcagtgtttttagtgtacttctggttttacctgagccaaagtttaatttattattttgctgtaaactgaacctcatttagttgctattaggcataaagaaagggggaggacatcattatayttaaagaaacacatgaggattctttgttttacctgttctttcaagtagatggttgttagttttcgtaaactatgatagataaacttctgtttagatctgttgtctttagaaaaaacgaaatctcaggttatgtaggatagatagatttaactcaatatgctgcaatggtgtcctagaggtgctaatcctatcagatactcatcatatttgcagtcattataaagactgcagatttaattattgaagggcccattcgaagagcacctaatttagtttctttttttttttccaggaagcattgtttttgttttgtttttctaatatgttggcgccatgaaaatcatcatgttcaaatattagtagtaataaaggtgatatgcctggcattcattttcaaagcaaaatactgaaactgttaaaaacagaaccacccataatacagcagcagtttcccttagagtactgaggtgaacagggtgactttcagagggaagatgataatgtacttacagtatattctcctatgccattagactcttgaagaacttgtaagaggccagagtgaatagccacagaacagtttggccttatctggtaaatttgaagatacatatatcttatgacccagaaattctgctactaggacatactctagaaaaattagtacacatatatatcaggatatatggacattaatattcatagcaatgttattcatgatagctaaaaactggaagtaattcaaatgcctatccacaggacacagatgaataaattgtggaatgctgtgtgtgcctcaatccattgtagctcttattcagattgatgtacaaattgcctcatccatctttggccagtggaaacatcatattggctcctaggtccatttacatgacccaagtaatctttgaaagccttttttctctttctttccttttttttttttttttgacgaaatattccaggttcaggttcactttgtccatttcctgctccaggccttcaatcagccatttatccaaggagccctggttcatttaaaactaggtaaaataattacatagttccaaaatcacatttatggaacaagacagattaaaaaaaaaaagttaaccagaatgcagtccagagagacaaagaaatagaaggtatgaaagagaggctaagagatgcaaaggataggatgagaaggctaacacacatctaactggtgtttgagagcagccagagaaaatagattacctacaaaggcataactgttaggacaactgatactcaatagcaacgatggctggggcagttgggggtagatgaaagattggctgtaaattgaaaattgctggagcctggtgataagtagtgagaggtcacagcgtgctggcagtcctcacagccctcgctcgctctcggcgcctcctctgcctgggctcccactttggcggcacttgaggagctcttcagcccaccgctgcactgtaggagcccctttctgggctggccaaggtcggagccggctccctcagcttgcagggaggtgtggagggagaggcgtgagccggaaccagggctgcgcgcagcgcttgcgggccagctagagttcccggtgagcatgggcttggcgggccccgcactcggagcagccggccggccctgccggccccgggcaatgaggggcttagcacccagccagcagctgcggagggggttctaggtcccccagtagtgccggcctaccggcactgcgctcgatttctcgctgggccttagctgccttcccctggggcagggctcgggacctgcagcccgccatgcctgagcctcccaccccctccgtgggctcctgtgtggccccagcctccttgacgagcgccactccctgctccacggcgcccagtcccatcgaccacccaagggctgaggagtgcaggcgcacagcgcaggactggcaggcagctccagtcctgcaggcagctccacccgcagccccggtgcgggatccactgggtgaagccagctgggctcctgagtctggtggagccttggagaacctttatgtgtagctcagggattgtaaatacaccaatcggcactctgtatctagctcaaggtttgtaaacacaccaatcagcaccctgtgtctagctcagggtttctgagtgcaccaatcgacactctgtatctcgctgctctggtgggggcttggagaacctttgtgtggatactctgtatctaactaatctgatggggacgtggagaacctttgtgtctagctcagggattgtaaacgcaccaatcagcgccctgacaaaacagaccacttggctctaccaatcagcaggatgtgggtggggccagataagagaataaaagcaggctgccagagcaagcagtggcaacacgctcgggtccccttccacactgtggaagctttgttctttcgctctttgcaataaatcttgctactgctcactctttgggtccacgctgcttttatgagctgtgacactcaccacgaaggtctgcagcttcactcctgaagccagtgagaccacgagcccaccgggaggaacgaacaactccggacgcgctgccttaagagctgtaacactcactgtgaaggtctgcagcttcactcctgagccagcgagaccacgaacgcaccagaaggaagaaattccggacacatccgaacatcagaaggaacaaactccagacgtgctaccttaagagctgtaacactcaccgcgagggtccgcggcttcattcttgaagtcagtgagaccaagaacccaccaattccggacacagtagaagcccattgggcttttmaattttatttactctaatttcattctaaagaattctgttttgtagttctccttttattttattattattttttgagacagggtgtcactctgttgctcaggccagagtgtagtggtgccatctcagctcactgcagccttgacctctctgggctcaagcgaccctcccacctcagcccccttgagtagctgggactacaggcatgcaccaccatgcctcgctaatwtttgtatttttagtagagatggggtttcaccatgttgcccaggctggtsttgaactcccaagctgaagtgatctgcctgccttggcttctcaaagtgctgggattacaggcgtaagccaccacgcttggccgtcttttttttktttttttttttttaatctgcttggttgttttttatagtccttttccttggcttaacttttgtttacttaaatatattacacataaatatgttgtattctgtgtctgwtaattccaatatccatgagccttacctgattctgctggcttcagtcatggttccttgtttccttatatttgtgattttattttatttatttatttttttatgagccactcatttttctgggaacctagggattctttgaggcctagattgaagttaagtctggaagttctcttcttccagagaagatttgtcrtacctttttgagttgctggggattgccaccacactggaaccaaattaagtcaaatccttagcttgtcattttgtaccacagaggtagtgtgaattctgaccacaaactcacataaaggcttccttgttacacattcttgaaagattgctatttttctttacttgaacatcagggttgagaaaaacagtttttcttttctcttttgcagtagtgggatttatttcttgtacactgtagagtgtggtctttttccagccatctcctgttggactccttatcttgggcagtctctaatgtatcttctggtccatcctttgctcatctgtcagtgtaggagtttgaagtctgaagggtctggtgccacctcagggtgaaagctagttttgccactcacttatcttgcaggattcttgattttgctttgtttgggggtttagcaagtttctttmtgttaggttagtgataggtttaaattttttttttttgatgttttatcaagttttttagttatttcagttaggaaggttgctcaaggtatataatattgctagaaatagaagttccataattgttttttccatgtkacagaccttcgtctrtttgaaagcccctttctccctgaatcttctctgccccacatttttctgggttactccgcttttcatatgatttcacagacttccaaccatcgcagtcattctctgtatgacttttggttgcctctggccagattgaacacagttctccacatttggagtggcattgatctttcaatctctgtcttttttaaatctgggttcaataaacttatttcagaccttttccttgaagtcagcatttttattcttggcaatgtttattttattccttgctgttcctaatgtctttgttagttctgtatggatgctactggctttgtttttttaggtctgtagctcattctttttgtttcatggtctaggttttgaactctttgttttcttaaattcatgttcttatgatattttcctawagtgagaaagttataaggggtttccttcatcccttagcttgtttccttctgtgttgggtttttattttgcatgctacatactaccttttcccctgccttttagtttgtttgcatagtttccttgccattttctctcatcttggggtggcattctccagacattgttmttatgcactgtgggtgcttcctgtctgagaccatttggctggggacaaagctcagccaaagctttgttctatctgtattagaataaccaggtctattctgagattctcttcaaagttacctatcagagttcactctcttatttggaagagataatataccctttgagctctgattatttaattcactgaagtcttcactctaaagagccaatcctgatgttctctcttcattttgctcatttctccctagcagccatgtttaccactcactcatgagaagaagaagaaaataaggaaaccccctcagcttgcctctgcagatttgggggtataaaggaaaattctcaggattttgctgactttgcggtacagtttcaagggctgattagaaactagtgttttgcttacttctgctctctgctgtttcactgtttcttttttttttttgattgccaatatttgaagtttattgcctagattatctctctttccttgtttggttgttgttattgtagattttgactcttttctctccctgcactcaccctttttttttttcttcccatcttactcctgaagtccaggcctaggggttttttgcattgctgcaattaaaccatatctctattattttgatcttcagcacgtgtgagggatcagaagaaggatagagtctgattcccaggctcttctaatatttagacttttataaaataactaatcagcactggtattgtctttttccctctcccactctgtctcccccactcctcccttagcttcttacttctctctctggatgagctgcttctagtgaagaaagagttcactgttcagaggtgggaagccagaagataaaaccaaatggctgggcagtctttaggttattcctagctaagagttaagagttgtaagctctctcattctttgttcttcagccttaaactatctttccttctattaactttatttgtctcagttacaatgatagaggtaacttcacatactaaaagaaattaggttaccatgtgaaacattcttcttggcttgtgctaatgttatcagatccaaacagcatctgaaagaaaattttccaagtagatgttgttctcttgttttctgaaatacatatcatatgttaaagtgagagtttttatacatgttgaaagaagttgaatgacataacaaatagttactgaggcctccattttcttacttcacagttaaaattcctgtttctctttgggtataggaggtagaaagaagtgggagagtaatagcattttaaaacacagaatcaaaaatacatattaaaagtagaacttaggcccaggcacagtgactcacgcctgtagtcccagcaccatgggaggctgaggcaagtggatcgctcgagcccaggaattcgagaccagcctgggcaactaggtgaaaccctgtctctacaaaaaatacaaaagttagccaggcatggtggggtgtgcctgtartcccagctactttgggggatgaggtgggaggatctcttaggcctgggaggtggagattgcagtgagccgagatcacgccatggcactccagtctaggtgaaagattgagaccccatctcaaaaaaaaacaaaaaagaaaaaagtagaatttaggtattcctacttttacagtcaaaagtccactggtgtttgcataacaatgatgttttgactagttattggactaaaagtaggacacatgaagcaggtgactaggaatttggaaatattattgcttaggtcattactggaccttacgaagagattgttgcactggtgacttggactttgctggtccctccccgactcttcacagctggcttgacgactcttgtgacattctgaggttttatgctaaaccacaggacatgctgctgatttgcagagctgacctcagctgtaagcactttgtcttctgcagcgtagaaatgtagtgacctacaagtgtcccatgcccaagttgggtgcattattttktggtgayggtcacatgtttcataaagacttcctgagtcaaaaaatgacttttctcagttcatcttccatataactcctggccacagggattttgtatccaatggtatttttgttctatgtgtggatattattttagcaaagttcagtggtcactttctctgattccatcttgtattaagctacactaaatatgaaaacgtagaaagttttacttcttatcaacagatgctaatgtatgacattgagtgaaacactttaattcctcaagggctcagttttctcacctgtaaattgaaaaaacctttcaaagattgtatgaatcttcagagatggtaagtctaagaagttgtccaactagtttagtattgtggctttttgtttgttttggaatgattcattctcatatattattttttaaaaaaatagccaggtggctatgacatgcctgtgttggtcaaggtttactgagagtcaagtcaggcattaagaaatgtgaaggccaggtgcagtggctcacacctgtaatcccagctctttgggaggctgaggtgggcagatcacttgaggccaggagcttgagaccagcctggccaacatggtgaaaccccgtctctgctaaaaatacaaaaattaggtgggcatggtggtgggcgcctgtaatccgagctactcgggtaactatggcaggagaatcgcttgaaccaggaggcaaaggctgcagtgagccgagatcatgccatggcactccagcctgggcaacagagtgagactctgtctcaaaaaaaaaaaaaaaatggattgagggtttgttaggtgtcagccactatgtcaggtgctaggaatttgtcatgaacagactggtccctactttcatgaatttatagtccagtgagggaaataagatgaataaaaagacccctacgtctttttgtttgaactctggtaaagaaatgtgtttatcagaggggctaggccaaactttaggaaaacatttcacttcacttaaaaaaaattaggatttttgttttatttcagataaggcaacaaacttccatcaagtagaaacttctgcttttctctgtctttcaaacttgtcaaaatcagcagtttactttgttaaatctgaatgtctctttttagtgtattgcacagtttactagaattgtaatcacaatttcacattctttaacaggtattgaaaatttaaattaaaattctgatatttttgaatggcataaaatgccctatcttatctgaaaattgaaaaattaatacagaaatgtaaatggattgtgaataggtgggatctggccaagtgtgcatttgtctaggcagtgctgagtttctgctcattatttagtagctttcattcttcacctgagccaaaattaggcttagccaataaagccaaattttccttctggaagacatggcagtgtctgccttgcagcatgcatccaagaccttatctgtttctgtatcaaacattgtcaagatcagggcatgaagagccrgggcattcctgactcccccaacagatggcatctcttctttattataggtgacttctgggggaacagaaagcatactgatggcctgcaaagcatatcgggatctggcctttgagaaggggatcaaaactccagaaatgtatgtatgtgtggctgttttgtccccttttggatttgtctgtctggagtacagctttatgaaactaaagcagataatccattttcctgctgcttctcttcctctggtaattctggtcccctttccccctgtcctagcccctctgcccttatccttttacattcagtaaaattctaaatggatcagccagttatttttaaagatcattcccatcccgccccacccccagatcatgcatagtatatactacaagcaaaaataagatcctttttccaaaagtgagagtttgaggactacatctttgaatcctgtgatatttgcaaattatttggagcctaaagaaacctctctaggtactttagttctgcttaccttagaaagttacttaatattataggctgcctcagggtactctctgggaaaactttagtgtgagggctgttttctgggaggaagaataaaaatatctttttgagatttacccacattgccttccttggacataaatttgatgtttagttacattattttttcctagactgtccccttgtacagtatgtttatcctacatcttaatatttttactgcaagtattacttgacaatggggatttattgcatatggtctcatgctgtggttcatatgtagcataagagaataaaccaggctgccattctttcttcatatgtcgatctttggtgcttggtacttcctcagtagtagagatttttctccttagagggaacagattcgttgtatgaatggagtagttgaggaaagtctaaagcaaatacccgtgacctcattttctctttcaacactatttgaaatactatttccaaatgtgtaggagaaatggggattttagtttcttcaggtttgttgtctttcagagttggaaggggccactgagctgatgcttggccgctgtgtgaacatttctgcttgaacatgtgttgtgccgggaagccttcttctcattctcactgaggtgcctgtctttggtaggcaaccgttagccagctctgccttgtgttgctctcatccaaagtctctgtcccccarctttccgcctgccagcctagctttatgctttggatccctcactgtgggatcacttctgagtcctcttcctattgccagaatgatttcctaaataggagggaagtttctgcagaaaatcagttggcctctttttgggtgtgcttaaaaagaaaagtagagcagtctaaacacttaaatttttaatttggggaaaaataatcagaacttactcccggtaatttagattagctgctaatggtgttttctattattttggcctgagttacattattctcctcttccctgtcatttagtgtggctccccaaagtgcycatgctgcatttaacaaagcagccagttactttgggatgaagattgtgcgggtcccattgacgaagatgatggaggtggatgtgcgggtgagtccctctggagggcccactgtctrtgctgggccctgacagcagaagggccctcctgttgactagccgtttccagtcagatgggtctgactgcctttgattgtggcagccagaatatgaaaaactgcattgatagtggtgattgactgcagcttcagtcttttcataggttcatgaattctgaaagggaggtgatctagtcactaacttgggacttgagagacactggttttgcggtcagcgccatcactttttctttcttttctctatttgtaaaatgaacatggactcacttcccctaagactcttaccatggcccgggcatggtggctcacatctgtaatcccagcactttgggaagccgaggagggaggattacttgaacccttgagcccaggagtttgcgaccagtctgagcaacatagtgagaccccatctctacacaaaatttaaaaaagtagctggacatggtggcatgcacctgtagtcctagctactcgggaggctggggtgggaggatcacttgagccccaggaggttgatgctgcagtgagctgtgttcacaccactgtactccagcttgggtgacagagcaagaccctgtctcaaaaaaaaaaaaaagactctcactgtggtttagattggcttaaattaataccattgtcattatgatagtgattatttttatgcctcacatttgtgtagaggagttttctagtttcagtgttctgtcagaatcccatttgagctttatgacattccagagaggttgatgaagctgttatattattgtagttcacagataaggaacagactgaagtagcatactcagggtttcactgctggtacgttgtggggctggggctcacatttggctctttggcctcttagctcaatattattttcgcccccacagcgattctgttcttattttgtgctctcagactattctccaaatggacttacctggagtcacctgtgtcctgtcaccgtggtgggatgcagtcttctcccagttggagtggtgaaggagggggtactggtggaactggaactctaagctagcagcccaaattgctcttggcagcagaagagaagagtaattgtgacatagattctcattttcctttaaactttaaatccctaggcaatgagaagagctatctccaggaacactgccatgctcgtctgttctaccccacagtttcctcatggtgtaatagatcctgtccctgaagtggccaaggtatatgagagaaatgggctgctaaggcaggcaaatggatattttaaaacaaagcctaatggggcagtacttggcaaatagaagcgattttttttttgtttttgaccacagtagtgataagtagctctcatcagccctaggggaagccctgcagctcagttgcaagcctttaaaagttgctagtctctgctgtgggggaagatagtacaaggctgaggccttttaaactggaaattctgaaataggattgccttctagattgagatctggaaataatctgcatgtaggaatgtgcccaccaaaagggtgatattccacatgctgcccctcagcrcctccctttccctcacgcctcatcctgcagtgactgaggcaggacctttcccttgtgcgagaggcagcctaaatcagagctctactcatttcctgcttgataccgcagagcgtttgaggtcatgcatatttaaatataaaattgataccatatttcagatgaattattttgaagggaaaatacatttgaaagataaattttgttgggaatgttaaaaatagccattttttaaaaacatgggaggcataatacaaaatagccttgtgtttatagcccatctttccacccatgtcttgcagtttttattatagggctataaaggaaattctcttatgttctttgttttttggaacaagctggctgtcaaatacaaaataccccttcatgtygacgcttgtctgggaggcttcctcatcgtctttatggagaaagcaggatacccactggagcacccatttgatttccgggtgaaaggtgtaaccagcatttcagctgacacccataaggtgagctaaggaggagatcaagtgttaccagttgattattttgactattattgataaaataaattggtagcttcccygcaaagtataaaattaactayagaattctcatcagatgcttgttttaaactctctctttgccgtcaccagatcagctggttcaggtgatggggtatagtggtagaggtgacaagcagtagtgaaaatgaacctgttacctttatctcaaattggctaagagaatttctgtatccactgactgtgtgtaactagaacatgctagtgtagtggcccttgttaaaaaagctccctgaagccttgagctgatttgaggtggagggtagaggagtgtgagggttggtagtggagttcccatgctggtagataacattagagctgctgtgcaactgggctcctgagcgtacatgacgggaaaatgttgacggaagagtcctttggaaaatgggaagaacctgtgtgctcaggaacattcagcatttgagatggccacgcctgccacccttggtggactgagacaaagtctagatcagttgataacgctattgaatatacatccagatgtggaagaagtattagcagcctcaggaatgtgtaccttgttttgattgcattttcagagcttgttttaaactcaagtatattaaagacttgtttttcaaaatcggtgtgatctgcagccgattttcagtcagcatctgttttttccttaccatccagatagctcctgtgtccttttcccataaccatccatttctggatggttcaggtaatgaaattagttccacgttagttttaataagagttaattagggggtcagatgttctataaggaaaccagttacatagttaattttaaagctggattaagtagcttttagtttctgagcaccattatgttctcataagcataatattcttagtaatactaagcaaaaaaagatgggaagggggtcagatggtgattttaacttgaagtgacaaattccatcctttcctggcttccattgcaaacttacccttgctttcatcctgacatatggtctccagagaaatattttaaataaggtaaaccacatgctgggcaagagagggagtaaaccgattaactgggcgctgttcttccctgggtctcagattcctcattcctaacagagagaatttaaactccatcccttaagttcctactatcctttagcattttaagtttgaatccttaatgtgagtgggaaacataacagagaaactgagaaataaataggatttcctttgcatgatgagagttctgggacaaggtctgccagacagaactatactctcacttttcttgtctgctacttcttccacagtatggctatgccccaaaaggctcatcattggtgttgtatagtgacaagaagtacaggaactatcagttcttcgtcgatacagattggcagggtggcatctatgcttccccaaccatcgcaggctcacggcctggtggcattagcgcagcctgttgggctgccttgatgcacttcggtgagaacggctatgttgaagctaccaaacagatcatcaaaactgctcgcttcctcaagtcagagtatgtgtggaagactggggttctgccttgtctattgcttttttgtcctagtaggctcaaggcacctgcctggctaagtatccatagccctagcccacctgttgtctcctgcgatatagagggcttagggcagcagcttagggcttaggccagaccagctggcctgggagaagaagctccctttctctgccctgacttttggagggtctttgagacgggggcctcatttgtagtttatctcatctctatggatgtcttaataactggcagctcttaccctaaggctaatgtacaatttaatggttaggacagtgattcccaaacttgagcatgcattctaatcacctgaaggacttgttaaaacacaggtagctgggcccacccctagagtttctgattcagtggaactgggatgggctctaaaaatttccatttctggagatactgatgctactgctccaggaatcatacttgaagaatcattggaataagaaaataattggaaatgggccagaaggaatgaggaaaggagggcaatgaaatcttgggttaagccaaggccagaacaggctgcatgctttgtctaatgtatctgttaacatcttatctgcccatctctctatgtgtcacttggattggggaggctctttaagtatattgagggggaaggaaagctgcctgcaggcatttctcatttgagaaagatccttggccaggcacggtggctccggcctgtaatcccagcactttgggaggccaaggcaaaaggatcgcttcagctcaggaattaaagaccaaccggagcaacatagtgagacattatctctacaacaaatttaaaaattagccatgaggcygggcgcggtgactcatccctgtaatcccagcactttgggaggctgaggcgggtggatcacctgaggtccagagttcaagaccagcctgaccaacagggagaaccccgtytctactaaaaatacaaaattagccgggygtggtggcgcatgcctgtaatcccagctactcaggaggctgaggcaggagaattgcttgaacccgggaggcagaggttgcggtgagttgagatggcaccattgcactcaagcctgggcaacaagaacgaaactccatctcaaaaataaaaaataaataaaaataaaaattagccacatgtggtggtgtgcacctttggtcccagctacacaggaggcttaaggcaagaggactgcttgaacagcccaggaatttgaggttacagtgagctatgatcacaccactgcactctagcctgggtgacagagcaagaccctgtctcaaataaataagcaaacaaataaataaaaattagatatatataaaaggtcctcctatagctctgatagggccatttattaagacctgctataccatttcttgstttagggattacatatgactttttagaactgtggagatgggcagattacttttccagaaatttttttagtacatctttcatgcctcagaagcayctaggggaatataattgggagttgggtagacaggttcgaagtcagtgattgagtcattagatctagatggggtttgggccttggaattccatttttattgttccatctatgattctgatctcagtaagaaccactgatccagtgtagccctcttcttttttgaagatgagaagactaaagcccaaagggttagattgcattcattataaggaagactttgaatgattaaagagatagtgaccaggggattgtatgtgactgaatttactttttcttccttcatttatttttttgttttaagactggaaaatatcaaaggcatctttgtttttgggaatccccaattgtcagtcattgctctgggatcccgtgattttgacatctaccgactatcaaacctgatgactgctaaggggtggaacttgaaccagttgcagttcccacccaggtaagcttgaagaagcctctttcccttattttgctccatgattttggaagaacttgggtggtacagtaacctgaagtatagagtttgactgctagaggctagcacgttagtagcaactgtagtatataaaggatttctctcttgccacctggaattattagatacaaagaacaagaccattagctttaaactctggcagaattaggtgacagcctcctagaccagtggttggtcatgaggtttttctctcagtctctagcctttctactctccaatccatcttgtacacagccatcaaattgctcttataaaatacttgttacctggctaatatttagttcaagaycttcctgggggtctctaatcattcaggcctgctactgccttctttattagacttttctaacctaatcttccatgatgcctttgagtaaatgcaccactccaactgagtacaggtctgttcatgtcctctgtgtacagcttagccttccacacgttggtgcattgccagtcccatctggactatctttttccctcttcacaattccagtaaaccccactaaattcctccagggcgaggtagaatttcttctgtgccctgaagtcctttaagaccccagccatgtggccctgtccccatgagagcacatgggggctgattatctaagataaaagtgtctcattgatggtgacgtggttgaaggaatggtggtggaatttgtgaggggatgggtgggacaaagcagccaacactgttcatcctcttagcatggttctcagtcatgccgagaagctctgaggccagcccatgcctgacaccccaagcatgagagagccgagattcccaggactaggaacaacttggatgactacacttgtcagaaatattgtgaaagggcaaccaggaaattcccgtatttggggctgcatcattttagaacattttttctttcttcaaggttcatctctctctgtctcttctttcctagtattcatttctgcatcacattactacacgcccggaaacgagtagctatacaattcctaaaggacattcgagaatctgtcactcaaatcatgaagaatcctaaagcgaagaccacaggaatggtagggacacttggagttttttttcttctctkggaaatttaggtgttggtggagagtttgaaggaatcatatgacccggagtctgttcctgcctctgcccctttgccacagacatcttttatttgttgactggagctgatgatctctgcatcacccaccccttagggttgctgaagtctcaaatgagatacactataaagtaccttgtaagttagagacttctgtataaaagcagctggtggtagtgtccatttgaaaagaaaattttgtcacaggaaagatagtaaacatgttttttctggaattttcttaggctagtccctttatgcagaaaggcagactggaaagtccctgtgaaaaattgactatgccagctgtttttctgatagaatgatgggatgccttaggtggaaatggggtagggcagtgcacatgcgaagctaggactcggggagaaggggctcattgctgcagttttattcttgcttttggacctggcctcactaataatgtctctttctttggatttgtagggtgccatctatggcatggcccagacaactgttgacaggaatatggttgcagaattgtcctcagtcttcttggacagcttgtacagcaccgacactgtcacccagggcagccagatgaatggttctccaaaaccccactgaacttggaccctttctagtctcaaggggattccagccttcagaaggttcttgggatatggaacaggccgtgcacaactttgacatctggtcttgctccatagagcacaactcaagatagaccatgagacagcttgagcctcaggattcttgttcttcctcttatcttccttttgtggtttttaatttgaagaccccagagaattccattacataatgattttgcccttgttataaatgttaccctaggaattgttttaaccatttccttttctaaactctctagctttcaactttacttaaacattgtgtggtagctctgacctgtcctgattctttagagaagctggggtacagtttatgagatagctagagcttctttgttatctcaggcaggaggcgtttacataacagatgtttcctcagctgggtgtgaggtatactctaagcaggaggctttttcagccttctctctcttttttttttttttttttttttttgagatggaattttgctcttttgcccagtctggagtgcagtggcatgatctcagctcactgcaacctccacccactgggttcaagcgattcttctgcctcagcctcccgagtagctgggattaccggcacccaccaccacgcctggctaatttttcaattttctttttcagtagagacgggttcaccgtgttggccaggctggtcttgaactcctgacctcaggtgatacccgcccccccgcctcagcctcccaaagtgctgggattacaggcgtgagccaccgtgcctggccctgtctctcttaagagtaggttcattgtctgtcttagagtcacttctattgcaactcattttctttttccagggcacagatcgaccaagctgccgttccctattctgcaggacaggactattctagcatacctgcttcgtccacccaggcagggtttggggtggtctcttctgtgcctgcagtccccatttgacacttggttgccaccatctttggagattattgtttggaatgatgcttccattggctttttcttgttaccatggactaggaagaaaacatggtttccaaataatctgggagcttttggccatggtgccgccttcctgaattggcagtggtcagagcacacctgaaccctatcctgggctggtgatgagcagaaatcagacctttttctatgcttttttgaatatcagagtaggatgaacacccagattcaaatatgtcaccaaagttggtggtggtccttccctgcacccttgcgttaagccattatgtaatgaaaatgtgtttgcttgaaggaacagctcaaagcaccttcacaagttgccttgacttaccctaggtgggtgtgaaagagcacccgtagcaaggaaaattttctctattagtgtgttcttctgcctcttcccccttgattcagctttcagaggtactatggcagttttgcctcaggtgctgaacatttctcagccctggctaaaagggagcagcacagggagagaaacaggataggaaagcagaatggcgagcagcctatggcccagggcctgtaatcccttcccaagactagctgctcagggtggtgcagggacaggaccagaccctgcgcctatttcctgccttctttcccctatagggaactctgtaggctgagccactgtcctgctcttatgacattatatcttgtgcctttctcctcagcagtgagcagtgagctactcctggcccaggccctaggggaaatggatcagtctttgaggtttctatttggggaggggagtacttaagatgagtcaaaagacactttcctctgttccattccccatctcagggactcctgaatattcagcctctccaggctggtgtcttctagtttcccccactgggaatgctggctgggagagccatgactaccagacttttcctcaggctccttggcatgttagtctgaattgttcttgagcactgtactactgacccaacaactgtgactagctggccacrccattcagggctggtgtggcatttatgtgtgtgtgtgtgtgtgtgtgtttttcctgtttgcccagcagtgcattgtgggttccaagagtgggtagtgtgtgtatgtgtgtgtgtcagagggagacctggcaggcacctctttgagagtagctgtggtcagagctgtttggtcagtgcattatgttgaatgaggtccaggaacccagagccacccagcagacaccactgtggcttgccagctgccaagatggagaagcatgtgcccctgtagagcgtctccccagaaccagaccccgagccactcgcttcctctgtgctgtgacaacattggtgccaggggagatggtgtttttcaaagggacctactgtagccactttaatttacaattaagagccttagtttgacttaacacttttgtaggcttttcattgtgtatttttgtgtatgtgtgcatatagcagctactctgtagcagaggtgggtagagacacttaatagtatcatgtygcatgcagatgtcacatcggcctctgcaaaaactgtactgtcttgtttctgcattagacttaagtagtcatgtgaatatactgctatgtcacttttaatattacgagttttatacttggaaaatggtacttgcttcttttaaatctctgtcttctctaacctcccccttcccatttcartgctcccttcctaatttcagcaataatctcaaaaagcaattaaatagttaaatgaccctaattgtaattactgtggatggttgcattcatttgattacttgggcacacacgagatgacaaatggggcagtggccatgcttgaatgggctcctggtgagagattgccccctggtggtgaaacaatcgtgtgtgcccactgataccaagaccaatgaaagagacacagttaagcagcaatccatctcatttccaggcacttcaataggtcgctgattggtccttgcaccagcagtggtagtcgtacctatttcagagaggtctgaaattcaggttcttagtttgccagggacaggccctatcttatatttttttccatcttcatcatccacttctgcttacagtttgctgcttacaataacttaatgatggattgagttatctgggtggtctctagccatctgggcagtgtggttctgtctaaccaaagggcattggcctcaaaccctgcatttggtttaggggctaacagagctcctcagataatcttcacacacatgtaactgctggagatcttattctattatgaataagaaacgagaagtttttccaaagtgttagtcaggatctgaaggctgtcattcagataacccagcttttccttttggcttttagcccattcagactttgccagagtcaagccaaggattgcttttttgctacagttttctgccaaatggcctagttcctgagtacctggaaaccagagagaaagaggatccaggatgtacttggatgaggaggcctggcttatctaggaagtcgtgtctggggtgcttattgctgctccatacagctgtacgtcagccccttggccttctctgtaggttcttggcagcaatgagcagctttcactcagtgacacaagtaattactgagtcctaatttgatagccaccaactgtacctgggtaggcaaagtcagatttttgagaacctttttcctgatttgaagttttaattaccttattttcttttatgctttcctctgtcttgtaatcttttctcttcttaatatccttccctataatttcaattatttggattaattttagaataaacctatttatttctaaaaaaaaaaagaaaagaaagtgttacctgtgtctttgtctcacatgaatgtgcttcatacaactgtagtgctgccaaggttggctttattttttggagacaaggtttcactgtcacccaggctagagggcaatggcatgatcatcactcactgtagccttgacttcctgggctcaagtgatcctcccacctcagcctcccgagtagctgggaccacaggtgtgtgccaccatgcctggctaatttttctgtatattctgtagagacagagtttctctacattgcccagcctagtctctaactcctgagctcaaatgatcctcccgccttggcctcccaaagtgttggaaatacaggcatgagctgtccctgcatcgggtgaacatttttcaacccttgacccatgaaaataagcagaggcaggaatgtaacataacagcatagtccatacctccgcatctggcgtcttctgtccttcagtcctccagtcatcagatcaaagcacacttggaaaattttaagtcagaagtggagcagatgggagaccactgtctgaatctcgtttgccatcaatataggtattgataatcctttactagcatatatgctaggaacggggtcctgctaatccctcttgtgaacaatacgcttatttctcaacctccagcctctgcccctttcctggcctttgctgggggaccaactcattcagactgagttgtgacatggctagattcctgttccaagtgaccccggcatttacaagtcagcttagtacttgagttaggagacacaggtgagaactattaggaagaaggcttcccagtctctgcatagtgacatatgtgaggtaaaatttgtgtggcattctcgtgggggtagagatgaggctgctcttagtgcccccttcttcatgacagcgtgggaatattctgtcctagagagttcctggctggggaactgactgtgcaaaccatctcttaactgctccagtaataaatagcctgccaggtcctaagctgcctgtgtcttctctcttgtggagtaaaccaggcaagccctaagaactttgctaagattttaagaaactgaagagaccatcaggatttgggatctgccatatctgatatgataggcctgtgtattatgattctccagagaaacagaaccaatacacacaaagagatttcttataaggaattggctcatgtgattatggaggctgacaagtcccaagatctgtagttggcaagctggagaaccaggaaagcagatggtattgttgcacaccggaggcttgtagccttgagacctaaggagagtggatgtttcagtttaagtccgaaagcaggaaaagaccaatgtcccacctcaaggcagtcaggcaggaggacttcccttttatttggaagagggtcagccctttttagccctttttttctgtacaggccttcacctggttgaatgaggccacccatgttagggaagacagtcggctttactcagtctactgattcaaatgttatcctcattcagaaacaccctcacagacacacccggaatgtttgaccaaatgcctgggcaccccatggcccaatcaagttgacacctaacattagccatcacagccaggaagaaaatataggttgagtatcccttatctgaaaggtgtgagaccagaagtgtttcagattttggattttggaatatttgcattatactgacaagttgagcatctctaatctgaaaatcagaaatctaaaatgatccaatgagtatttcctttgggcatcatgttggcattcaaaaagtttcagattttggatttccaattttcaaattagggatgttcaacctgtaatatggccccagactgcctttctagacataggttccacaatgcatataatacctgtgcccttcacacccttatctgtgttcatggtgttctctcagccatctctgcctcccaagaatcctacccaggtcttcaaggcataactcaaagcctccagatttgcccttttcaccattaatcacttgcgttccctttagctcatttcttatcctgccacctagcattaattcactctagtaatagttaattagtactagttaattggtaattggtaatagttaattgtgttcctgtttgatgataatcaaatggtatcccctagatgataatgaatctgaaggcaaggtggtctggtccctgtcattttccagtaccttgaacagaggaagtgcctagcacagaggaagtgctttcatttaaatgcctattgactccaatttggattgacctgtggaaaagaagtttctagagcctgagaccaagtgatataatagttttatttgagacataaaaacacatgtgtttctattacatagtgtggggtttagggtcctggtttctaagacaagactttatttcaccctgtatcacagcttcctgggaaatgaattagggagcaagagacggcctggcaagaaaatcattattgttgctgggaagttgcaaagaaaggggagagtttattcaaattagtgtaacagagcccccaggatgaagagagtggtgcagggaaaaggtctaaattcctggtgttggtggggacactggcacatcccacagcaaggactcagccctcaacggcggcggctgggtcttgggaggggagtggtgggagggtaagggctcctcagctccctccctggactcccagttcagtcaccccttcccccggaagaattcaaagaggaagggcagggtctatgtcatggacactgctacttgttcgatgaagctggccaggtttatgtcccgttctgaaaggccggcacactcatgggtgctcagcgtgatgtggacctgaaatgaaaccagaaattctgcttccactgacttcacttaagaacaggagggagtcactagctgctgggctcagccctgctaggagctccagaatagcagctggccagtacgatctctcctggggactccttcctgacatgtctgtaacaacatcttctacatctcccctttgctgtctctcaaaaataatcatgacttcagctatagaataaaagcttaatatctgaatgtcaagagcaacctaaaagctaaagacaaaaccaaaaaccaatgccaactcctaaacactatccattcatagacgacctcttccacccttactgtttttataaacagagaccagcagagcttttggcacatggtagacatttaatgactgtttctattcattaagcaaataatttgataggttggctatgtgtctgtatttttttttttttttttttttgagacggagtcttgctctgtctcccaggctggagtgcagtggctcaatctctgctcactgcaagctccgcctcccgggttcccaccattctcctgcctcagcctccccagtagctgggactacaggcgtccaccaccgcgcccgcctaatttttttgtgtttttagtagagacagggtttcaccatgttagccaggagggtcttgatctcctgacctcgtgatctgcccacctcggcctcccaaatatgtgtgtattcttagttcaagtttattactttttcattcttccatacctccagcaagattaaagccatttagagctatgaacactgaataagtatgcctgattcccacagcctttcctttcttgggttttgccttcttaatgtctacttaaatgtctactttaaccacaactatctcatgcatcttttaatttgcatttctttatagtaagactgatttttttttcccaggggtatttatgttgattctaggcatgtgcaatctcagtgagattggaaatgagatgagtggatgacctatgggtcaggaaggctcattgttaagtccaaaagccttcagaatgtgtcagagttcgcagtatttggatgggggcagagcacaacagaggcacacagcatcactcaccttgttgtacacgttaaaccattcaggatggtggtccagtttctcagcctgcagggccactcttgtcatgaacccaaaggcctatttaagtggagtgagagccaggttagtgttctaagagaaaggacttctggacatcaccaattcaaggcctagacgcaggaggatgaattagcttccccccaggagactcctctataatcatttcccccttgacatcctgtcactggttctcaggcttgagttagagattgtccttgcagtaggaagaaagtcttgctatttaggatgccaacaaggtggaaacaccacaacaggcttttggcctggccagtcttggccgtctgttcaaatgtcttcagatgtgcatggtttccacttgaactatctcctcagaagactgctgctaaaagttccaggaagggagagcccaagacacatcctcctatggctctccaatccccaaagatgatactttctgagttagacaggaaaattaatttccccactggcacagtgcccaaataactggatgagtgtggtgtctgagagtcttggctaacaagacgtgaagggagagaacatgctttgtaaggtgaccccatcagcccgtctcagaaaactctgtcccaccctggtgccataccctgttgaagtctttgaaatgaaactgcttgaagatggcatcacggccttccagctcattccaccccacagccctcaggtttggcagcagctggtccctctcctcagcgctcagcctgtgtgctttgccagcctagaagagggaaaaaaacagaggcccaagggcatttctctttataggtcaaaacagaggggctccaacctttaggggaacttagcttccactggctgctttggacgtgggtgaccaaagggcagcaggtctttgagcaataggctgggaggcctcaagggtggcaccctgcccaggaggtggggtccaggctcgtctgccgataggccctcaggtcttgggttttaacactccacacacacacaagggaaatcacaaaagcaatgtaattcatatgacggggacagagaagcactcttcccccaccctgccctcaaagccttacggaccttccctccatgagattattacatcagtgagggcgtaaaagcaaaataaatcccagatgcaaatatgttactccacaacctctcaggaagagtacccatgactctccccccttccttttcctattatgtacttcatcatatgcaccccacgtccctaccgtaactttcacgtgtattgaagaggaaacaggcctagagaggggaaacgacttgtctgctgttctttcccgcccacccctagccagtgatggcgcagtgttgtctgtgtgtcagcattgctggggctggacgaaggagctacatttaaaataagtgtccatcccattcttagccacactgcagctgaccgccgttggcactacctctagtaggtcctcagtcatgctcccaggcagcctctggtcctgagccgccagggctaggtttctctggttttccgtctgcttttctggctggttgggaagctcaggccaaagtggaaggaacttggccaaaggcagctggcaaacctagtgccccatcctatttacctaatgtgcgaagtgccctcaaggcagcccaaattggcacaattcaggccatgagtggaacctcagagaaagcaaggaagcaagggtcagtttcatcctaggaggatccaggtctaggagcttaacagatcccagaacctaggcttctagagtagcaccaccccagggcagaaatagagtgctgaattgaaaagatacccttaggggtggggagggaatgtgagggaggttgatttagcttttatgaggcagcctgcagactggacaccatgtgttgattggcaggagttttgagacccgctttcaccatttaccagccaggtggctgtacctctcttggcagaacctccacctccacagatcatcatgaggtgccaatgggacac

SEQ ID NO: 97782 - DNA, 33315 bp, Homo sapiens
taatacctataaagaattgtgaattgtgtcccgctcagagaaaggttgggttatgtatgtggagggctgggagagagaagcaaggagggaacattatggatatatcaagggctacaaaaatcacaggatacacatgatgcaaagttctaaagcattagtataacttgaggatttgagaaaacacatctaaatatatattatggcatattattcaaaacttgcatacttacaacaagagattttaatacaaattttcccttgggaaattggggcgctacaaaacatgcctcctaaaacccctgggaagtacaaattttctttccttccctatatggttccagacttttctggaaccactgtaggcattcaataaatgacggtattattcagccactccccagttaaaactcttccagtgactccccgctgacctctggataaagtctgaacaatgaacactggtggacagagtcctggtttaccctctccaacacatttgtctctactagcacccaagttccatggtactgcaggcggccaagagctctacactttgcctccctcgttgcgggacttttgtctgcaactactcgggcccctctacaccctcatctcctggccaatccctttagccctcagtctctgataaccatcacttcctctggcgtgcctcctctgggtccaactccttttctcccagagttaggctaggagccacctgtggtcctactacatttaccactgtcctggttaccagcccgcgcctctcctactaaactgttaagctctgtgcataagggactgtgttgcctttcccactgggttatttaggcgttcaataaagatcgtgaattaactcatgaatcccggtgtccacagctggaaggccccaacaacaaactctttcagcaccaactcaacttccatccccccatctcttggctgggaaggggcctcaagactggtcactgcactcggttctaaaccaagtaccagggccttaaaaacgccaaactgaccaggagggacgctagctccaaaatacagcccaagagcacgcttcgaggaatgactgacacactagcttcacgatccgccccgcagagacccacagcgcgcctcgcgcccagctatgcgcacgcgcggggccactgcaaagagggcggttccgacgcggaaaacagggaatgcgcacagagcaagagcgcacggcccggctcgagaggaggggcggcctgggggcgccactagtagttcccgaaccctgtcacaaaatctgcagcctcccggccccaattgcgcttcttcctcttcagtcctacagcggcttctcacccacactccgtacgccgtcctcaggaaaggcccccgctaatggcaaagccagccacccgcactggccgcgggtcctcagccgggatagacagccccgctgctgcccgacggacgccggaagttgggccctggccgcgccggaagccccggatttcccggctccgccccaccccttcgcccgggatttccgccgaggcggtgcagctaccgcgccgtgttgtcctctgtctgcaccgccgctgacggaaagctaggcccttctggagacccgctttcccaagggcgcggcctcctgggccgggatgcacgaggaaaaataatcccctgcctttcttcggtagctgttttccagtccacagcaccactgctgaaccgagcgttactgagtagcgttctttgccttcacccctcccttcctctaccacttgtccactctcgaggtttaactaagaagtcatactttactagacaacccaatctcagaagtcgtcatttcccccttagctacttgaatagtacctggcacctcttgcttcctccattaactactccctcgggcagcgacgtccctcctttccctcttctctcccgattagagccactacgggccgtgccttcctcttccacgggagctctatcttggtacacccagaaccacctccctccctaacccgctgccacactcgtgggggtctctacctgtctcctcttgatccaggtaagttatgtggacctgaataatagagtacagaaaagtcactcttatgcactcactatgaaaatgactgaacaactttctggagccgtgttgacataataggatactcactcgggttacaccttatacaagggttataccccttgataaaaccactgctctgtccttgactagggacccatatatgccacccgtatgccacaatctaacacccccactacccaaggctgcagtcagccctgttaggagctgtgacccattctgtcccttggactaggagccatctgcttttcctccccactggatctgaagtttttttgtcttactcatatatgctaagtttaagttttctgtgtgagggtctaattggttgaaggaaaaaggatttggtcctagtttccccttatgagccagctgtctttgaccagattaagacatcaccaaaggattttaagtgggtaatataagaagtgtatttttctaaatgcttcctctgcctgcagtatgaatagataggagagatgccagaatgggtgagaccagataagagacccactgcagggccacaagagagatacttgaactagaatgtgtggaaacaaagcaaagaggataaattcataggaggcaaaacagaaactggtgacagattagattggggttagggagaaggcatcaattatcaggctccaagactaggcaattgggtagtgtaactgatttttttttttttttggagacagggcctcactctgtcacccaggatggagtgcagtggcacaatcatggctcactgcagccatgacttcccaggctcaagggatcctcctgcctcagcctccccagacagctgggaccacaggtgcacaccaccacaactggctaattttgatttttgtagacagggtggggtcccacgatgttgcccaggctggtctcaaactcctgggttaaagcaattcttccacctcagcctcccaaagtgctgggattacaggcgcgggcaccaatgcctggcctcattcagattatgtggaatcatgggacaggactaatggctttctcctctccaaatggatctacttgatgaaaggcaagctaagaagaaattcagcccctccaaagggagggactggattcagaaaaaaaaaaaaaaaaaaggagcgggggggcaaaaaacccaaaggagtgaagccataaagcagtatctgaactggaacaaaaacagtaggaaaaacttatcttgatcgttgatacccttggacatagcccactgtgtcccaggtccttgcatcgaatgttttcacaatatttgacttctaatgaaaaatcaggggccaagagaaatcttagcaaagaagaattccattaccattggtatcaaaatgttatttttgttgttttgagacggagtctcactgtgtagccaggctggagtgcagtggcacaatctcagctcactgcaacctctgcctcccgggttcaagcgattctcatgcctcagcctcccaagtagctggaatcacaggcatgtgccaccacacccgactaacttttgtcttttaatagagacagggttttgccatgttggccaggctggtctcaaactcctgacctgaagtgatctgcctgcctcagcctcccaaaatgttgggattacaggcgtaagccaccatgcccagcctcaaaatgttacattggtaataacttagaaactaataaatcaatgagaaagtgatttgcttcataagaaacattttacttaaggagaacatctctttggttgaagcacatctagatacaaacattagtgatctggaaaagatatatatatatatctggaccagacttctgttctgaaggttattgaccaattttacagataggacaaccaaaaactactgaggtcttaggaagtttatttgctttcagtcacatggtaaaaggtttgcttgatatattagaaatatcttgcctcctagtctttttactagtcaaatatcttgctttctcttgtcatttcaccagtaatacacatctaacacatatagaacacagattgcctactcttattgtatctaaagcaaggattttgatggggagaggaaggtgggggaactcatttagctttttatttcaatagctttaggggtacaagtggtttctggttacatggatgaattgtatagtggtgtaaagtctgaaattttagtgcacccatcactggactactgtacattgtactcagtatgtagtttctgtttccctcaccccctcccaccctccctaaagcagggattttatttttttatatttttacttttttaacttttaggggtacagtacatttgttaaataggtaaacttgtgtcacgggggtttggcacagattatttcgttatccaggtgctaagcctagtacccagtaatttttctggcactctttctcaccctccaccctcaaatagcccccagtgtctgttgtccccctccttatgtccatgaggtcttatcatttagctcccacttataagtaataacatgtggtatttggttttctgttcctacattagtttgttaaggatgatggcttccagctccatccatgttcccacagaaggtattatctaattcttttttatggctaaagcagggatttttataagatactttttagctatatttttgaaaatttagggttttatggaaatgccttgggaagcctgacaagagtgcagtggaggctgaatagtgagcctttgaatcccagctctacttcaactaaaaacaaataaatggacctactctcatctggtttagatacgggaatgttacagttctgtgtcagaattcctttgaaaatctggttctgctgttaactataaaagtttgaaaaccactgtacttgattagcgatgaatttggttaatatctacagactagagccaagaaccttcgcacagttcagagacatgcaaacacagggccagaatacataaggactataaacatcatcggtatttggagtccagaatcatcacaaattgttaatcctggtaatagataaaggggaggacatgggcaggccaacaggcacttaagttactgtctactaaaataacacactctgtttactgaatcacaactgctctggggaaaccagggctgaccagtgaaagcttacagacccctcttcagccacaaactggaattatgaagtggcctccagatatgacatattttgatgttcagttcagtgcttcactttcctcagaactacttggctacagaatactttgatcctggcccttctgtgactgctccctgatggaatatttggacaaaatcccaacactgaattaagatgaaggtatgctgtaatgtcttatatgaaaaataacatcagatcaaggtctctcttttctttcattttaaaaaattttgtactgctcataccatatggggaaatgggcctgccctcaagtaactgcttcttttgaatcttttcagtagctcaaacttgaactcaggcatcagttctttgtaaggctaaaagaacacggcctctaagtaccaaattagtcattcacatgagccaagtaatcaactaagaatccttggtactttccttggactagctgcaagcctatagtccaaagatcactgatctctaacttaggaaaggccaaaaggtacttaatacctgctccatagttttagaagtaactgaagtcatgaaataaaaggtgctcatgagtcttctggatgtatgtcagcaattcagttaattcactgaagaaaaaaaaatacatgtaaatatttactttcattaactctatactcggcaattttacagcaaagaacatataataagaggtgttcacccaaaatggagattaatgcagttaacactgacaggtttatactaaggtacaaaaacaagtgcttgacttagaaatttaactttatttacaaatgttctcctataaacaaagatgccattctacacctttaaaatrttgtaactgataatttccataaaaaccatttacatagtttcaacctttctgcataaaacygtattatgagataggcaaacaatctcacaagatggtctgagacataaaaacaaaagacaacctatccagcatcaatgtcctattgacaaactcaatgaagaattaagaatcacactccacaatgtgctgctccaccaagaaatagaaatgtaatgattttttgaaaggtaaatgcttcacaataaacagtcttcttgggtagtacagtgtaattgtgattgtttaggactgctcttgtgggctaatatttacgctgttgttttttttaaatcatcattgtaaaaagggcagacttatagatttttctgacaatgaaaatctgtagacactggtctggtctcatcattcaggcaaattaataaaataacaagtgcatggaaagaatgttaaacaaaaacataatcatcatgtgactgacagaattctccctgaaatcagagaatattaatactcaatagtatgtataaatttgaatttatagctgagacaatagacaaaataattaaccaaggagcttaaaataaaattattcaaattacctatttatcattttatgtgcagtaattactttttaaaaatccttttaattttatctagggataaccactcacatcatggctaagttgcaaggaacttcaaaactttgaaaaagaatttcatccctgagaagtgagagatagaaaaatatctaaaaaaagagaagcaacagtcttgcacccttttaacaatctcaccacagcatgaactactattaacactgagcaatcagatattccagtcctggagagttactgcctttcatgatctgatcttttgtaatgaaactacaagtgcaacattaaaaaaaaaaacagataaatagaaaccctggttttattttcagctttacatttttgacaagtgcaaggtcagccagctaagatataaatattccaataatgaccaaagtaataacttctactggcatgtccycttctgagtctccattttctccactgatattcatccaaataataaaagtaacacaattgcaattgagtttactattatcaatggcactgtaaagagaaaaaaaaaagtttgttactataaagaaaaaacagagaaaaaaccagaaaataataattagcctccaggaacaatagaaatatctaacaatatgtcatcataatcatgttgtaaaaagttataacaaagaaacattctaaaatacattggatcatgagatccaaaacttattttaaagagaacttgtataactgggagtaagggttgcactggaacagctagatcaatgtgaaacatctgtggatagtcccggtgcaaccccaagaacatgagtgcaytggagcctggcagacgtagacccacagggttgccactgacacttgatattagaaatatagtgcatagaagattctgtagtgtcattttactacattaaaaatgaacttatttaacattgtatccaaggttgtgagtaaagggagaagaggtactaattataatggttttaaataaaagatttttgaactctttttttcttgaattgctcaaaaatattttccaatagaatgacagatacgaaatctctatttttcttttttcttttctggttttttttttttttttttttgagacagagttttgctctgtctcccatgctggagtgcagtggcgtggcacaatcccagctcactgcaccctccacctcccgggttcaagccatcctcctgcctcagcctcccaaatagstaggattacaggtatgcaccactggctaattttgtatttttagtagagacggggtttcacccatgttggccaggctggtctcaaactcctgacctcaggtgatctgcctgccttggcctctcaaagtgttgggattacaggagtaaaccaacacgcccagctttctcttggaaacctcccaatactgtatgtgattttacaacttggaaacaacagtttccaaaaggcaagaatataattttgtcttttagctctgacaggtaacacacaaacagattatatgtattatactaagcattctatttgtaccaactggcttagatagaagtaagaagcmaactaagaaaaaaaaaaaaaaaacccagtaactttcaagcagcaaagccatgttaaagagaaaaaaaattcccactacaaatggcatatatggtattcacactcagaagccttgctacttaaaccacaacattaaaacttaagaatgctctattagcttttcttcttacctctcatcacggttcttacagatcgaataaggttcattagctgtgayttaattcccggctcttctccaaatccaccaattccctggtctgttccccagccaactgtataatgtaaagattagctgtgttaaaagttattacacacttgccttcctccctgtcatcttctaaaagattagtttgagaccttgttaaagacaaagtagaaagtcatatgacttttaagaaaagttaaaacaataatgagttaaatatttgttttctttttaacttttgatagcagcaacaccctcatttcactacatttacactgattttataaaacaaactacaatctaaattattccatggcatttaatttagtgaagatgatctttgtaactgtttttttctcctttttttaaaatatcatacaaaatacttctcaagtcacaactaaaaaccaaagcatactgtcaagctatataattattataattagctcaattcagaatttataaaatccatcacaatcattaatataaaaatgctgtagctgagaatcactgtctacattacttggggaaacttttaaagtaaacctggtaaagtgggagtcaatcataataccaaaatacacaaatcttttcaaacaccaggataccaaatcttgaaaatccaaaagatcaaaatcctgaagtctaaaatccccaaaatgacaagaaatatcaaaatctcaaaaacgtaattctaggaagaatacttttttagattctttttcaaaaattaccataatatagagacagggtctcactttgctgcctaggctaatatcaagtgatcctccacctcagcctcccaaagtgctgggattacacaagtacaagccactgcattcggcctaagtatttctttctttttttttaaattgagacaaggttttactctgtcaccctgctggagttgcccaggctggagtgcagtggtgtaatcacggcttactacagcctcaacctccccaagttcaggtgatcctcccacctcggcctcccgagtagctgggactataggcgcacgccaccacacccggctaatttttgtatttttagtacagatggggtttcgtcatgttacccaggctggtcttgaactcctgggctcaagcgatcgacccactttggcctcccggattacaggcatgagtcaccgcacccagccctcatttacgtttttaaaaggggagttatcttttaaagaatttgggggctgggcatggtgactcacgcctataattccagcactttgggaggccaaggctggtggatcgcctgagcccaggagttcgagaccagcctgggtaacatgacgaaaccctgtctctactaaaaatacaaaaattagccaggtgtgatggcgtgcgcctgtagtcccagctactcgggaggctgaggtgagaggatcacctgaacctgggggaggttaaggctgcagtgagccatgatcatgctactgcactccagcctgggcaacagagaccctgtctcaaattaaaaattttttttaaagaggcaaatgtgtcatttgagaaacataaaaacacaacagaacacttcaaaggccactttacacaaaaaaataggcaatgacagcatatatatatttttgcagcactaaggtatgctaatgacagtcacacaggtataacagccatgagcaggtgaaccatattcacaaagaggtcaaaaaggaaatgtataaacacattatcactatggttagtaagtgtgctcacctagctttatctaactgtggtcatctgaagtactgtgacaaacaacctaagtcttttgacagatcaaaaactacagtaggtcaccattgcatatgcaattgmccaaagagccaagataacaagaaattttatttttcactaatgcagacagatataaagaacctttctttatttactgaggaagtttcaacgtttttacatgcatgcacaatgcctaaacacaaagtcaacactgtggtaatgtacttttgcagtcaaatttgcaaagaatgcataaaacaaattagaactctcaaaagtctctacacagtttatacctccagtattgcaaatgatgtaaagatgaaatacatagcattgggaattgtaaaaaatcatgctgacaattgaaaatagtgaaaacaactgaaaaagaaaaagaagaaagctgaaaaaaatcaacatgtgataatgtgttattacagggagagattatgggcaattgcatggagatattccttaagagctggttggctttctccatcattaactatattttgatgtcctacgtcacaatgaatagctgcttttttttttcttttaggacatggctctcctcagacaaaatgttcacgttcattttctaggtggcacttgctctttttgaaattcttctatggtttgatatacatcaacatgagctttccctattaaaagttcccatccttggccgggcgcggtggctcacacctataatcccagcactttgggaggccaaggtgggcggatcacctgaggtcgggagttcgagaccagcctgaccaacatggagaaaccccgtctctactaaaaatacaaaattagctgggcatggtggcgcatgcctgtaatcccagatactcaggaggccgaggcaggagaattgcttgaacccgggaggtggaggttgtggtgagccgagaccgtgccattgcactccagcctgggcaacaagagcaaaactccgtctcaaaaaaaaaaaaaagttcccatcctctgtgccatgcttctgtgttgttttgggtacccagaaatacattccacatccacttatatagagaccacaaatttggtggaaacaacactggtgatcaaacagcaatactgctgcatcactgtcttcttaccctactatgcacataattatttttgaaccagtcagtaacttcgctggcttcttcaggcaaatgcgggttcaattcactaaaagttcctggaatgccatcggctggaaggaatgctaacgcaggcaaatgacacatttttaaactgaagttttcaccactgcagcatctggtagccaatccactcacctgaatttcccaccaaatgcaaataaagacaagaacatggtaatagttccgcctaacatgatgcacctaacatgatataactatcctgtttatacccaaaaacacactaatcccttccccaaaattcagctttcaagatttcaacattcaggattttaatcttttggggttcaaaacattaggaattatggcatccaggacttttgagattatgatccaaacctgtaatagcttggttaggcttccaaaacatgctctagcctgccaggaggacatatcttttttcccctttttccttgatcattcctcttcatttattaattttgagttgaggaatttagcccactacccctcttattctctgtgagtcttttacattcttttgttattctccyatgatactacaaatcattatttcttcacccttacgcattaattctattgtgtgacacattcttctgaagacttacatgtcctcatttctgcaatttgtccttctcttgtcctcatttcaggtccactttttcctatctcatatgactacagggcttaattaattcctgacacgctaacccttaaacttgaagagaacagtttttttaaatagatatacctgaaagactcaaatatcaggaaataagacttcacttttaatcaacttttatttggttgaaataaaatgctaaataatggttgtttgcttttttgtcactgagatatgctgtggtataaaactaatttaaaattcaagtttacaacagggctgttgttgactcctactcactcttcacagaacctagctcaggttctgcttatagcgcttccagtccacaggggtttcgttcttttttgaattcccatagtacaactaccatcacagttgtcactatcgcagcctttgctatctcttgcaagactctttcaatagataaccttgtaatcttgatgtctcaaccctttgagttttctcccttaaagggttagatcttgctacctcgattcccattgcctactgaataaggaccaaactccttaaattgacattctagttttatatcctaccacacccttccaagtattcctatttgcagtcagttactccagcagtccccaacctttgtggcaccagggactggtttcatggaagacaatttttccacagatgggttggggggtggtggtggtttcaggatgattccagtgcattacatttattgtgtactttatttctattattattacattgtaatacatactgtaataattatacaactcaccataatgtagaatcagtgagagccctaagtttgttttcctgcaactagatggccccaactggggatgatgggagacagtgatagatcatcaggcattagattcttacaaggagtacacaacctagatccctagcatgcacagttcacaacagggttcatgttcctatgagaatctaatgccatcactgacctaacaagaggcagagctcaggcactaatgtgggccatggggagtggctgtaaatacagatgatacttagttcactcatctgccactcacctcctgctgggtggcccagttcctaataggtccgtgagagtaatttaggggtccccaacccccaggccacagacctattaggaaaattattctggaaattggccagttgtcggaagaaagacttcctcccaatactgacatttgggggcctcacctcaatgaaatagccaatttcttcattcacttaacactgagacaccagtaaacaagccctgactacacacatggaacttccaaagagcttctcagtcccttacaattaaacaaatagtcaagaaagaacaattcttaatatggaaagacatatcaaatagaaatggagactctaaggaagagaagatgcaagaagtagaaaaatgcattttttaaatgaacatccttagataaaagccattgtagctatgaaacaaaaacagaataccctaagaacagatcccatccagggatcaagcagctcttgctacattaggattaaaagttcaaaaacaggggttgaaagatgaaattaagaacacctaccaaacacaattgaagaaaaaagaaaattggagtataaatctgtcaaaataatcagttccaaaaagaaagaaaaaaaaagaggcaattattgaagaaataataagtgaaaagatccccaaacgaaggacatgagcctttttagccaaaagggtccaatcagaaaacagcccaatgaatgagaaaattaaaaggtacaatgtcttcaaaactctgyagaaaaattagtttcaatctagaatgctatatctamatcacaaatcaactataagaataaaagtcatttttttttaccattcagctatgagcaatattcatagtgataatgtaaatatggaatgctgatataaccaataattggttggagaagggagagtttgagaagtatgtgtacagtaatccccccttatctatggggcatatactccaagatccccaggggatgcctgaaaccatagatagtaccaaaccctatatatactatatatatttttcctatatatgcacacctctggtaaagtttaatttataaattagacatagtaagagattaataacagtaactcataataaaatagagtaattataacaatatgccaacatcactgctcttacactttarggtcattattaagtaaaataagggttaaacataagcactgcgatattacaacatttactctgataaccaagacaactgctaagtgactaacagctagctgaggcaggcagcatacatagcacggagatgctggacaaatgagtaattcatgtcccaggtggaatggaataggacggtgcaagacttcatcatgctactcataacagcccacaatttaaagtgtataaattacttatttctggaatttcccatttcagtattttcagactgtgattgactgcatgtaactgaaactgtggaaagcgaaactgtgaaataagggaggactagtatacttgtgctcgctcaagcctgagtgtgctgctggtggtataattgtgtgaaacccttccatagcataagtcaatagtttgcttctaaggaatggggctcaggtcgaggaggaatgaggcaaatggcttctatctttctttataaactgatgagctttttgactttgaaaaycatacacatattactttgataaaagtaaaaacaaaatttaaaaagaaagccctctgcaattaggtcttcctccccacaacatgaatatcctgagggctaggatgagttctgtggcatcatgttatttaaaattatgttttaaaaccacctttacatggtattgatagtttcattttctttacttgttttaaaatgtatcattggtaaaattatcaatcctttccatccacagccacaatttcgcatatggtaaaaaggatttgtcttaagtactatatggattatgcactcaatttttattggaaaccatacttcccagcaatctttttttcttttagatctgttccaaaaaattgcttaaacatattttttcacatgtgagatgagtgactcccagaaaaaaaaaattgctcttcaacaaaacaagataaaactctacaataccggaattaacataatttaagcatcaccactgaagtaatttaaacatatagtaagttagttaattgcagcccagtctctattcttatgccaccagaatgaaaaaaaaaaatggatggagaatttttggatggagagagtaaataattagtctagatattccacatacaaataaaaatgtgacaagtaaaagatcaggggccagggattatcttttactaaaacaaatagtttaccctccaactgctatatagggagtctcagttgtttttctcaggaacctagccaaagctttaagaagcattgctgtttttcgttttttttttttctttttaagagaaagatttggccgggtgtggtggttcacacctacaattccagcactttgggaagttgaggtgggaagattgcttgagcccaggagttcgagaccagcctgacaaaaagttaaaaagttagccaggtgtggtgttatgctcctgtagtcccagctactcaggaggctgaggtgggagcactgcttgagcctggaaggccaaagctgcagtgagctgtgatcatgctactgcactccagcctgggtgccagagaccctctttccaaaaaaaaaaaacaagagagagagagagagatttaattctctggctttcttgtcacttccacagctagagggcctggcagagaataaatgataagaccagtcagcagtacttgctgccttaatttcagaaataaagttgaataraaaaagttactgactgcaaccaccaaacacattcttctgctgtccagacttcaaaaagtcacatacaaaatggcaatccatccaggctcagccaaaaacgctcgacacacatattttgaagaaaaagtactagtaacagttttgagagcttgctgaccctgagcagatctcagcctctctgagatcaatttccatatctgtaaaagaaaatgaaagtgattttgtcaatgttaccaagtttacatgtgatcaaatgctatcataaacatgaaagtgcctaataaactacacaaagaactctgctaatgtaagtttttaaaaagtacctttatcagaaagatcaatggtggccaggtgtgatggctcacgcctgtaatctcagcacttcgggaggccaaggcgggcagatcacttgaggccagaagttcaagaccagcctggccaacatggcaaaaaaccacctctactaaaactactaaaattatctgggcgtggtagcatgtgcctgtaatctcagctacatgggaggctgaggcatgagaatcgcttgaacccaggagatggaggttgcagtgagctgagatagtgccactgcactccagcctgggggacagaacaagactctgtctcaaaaaaaaaaaaaaaagatacatgcagaagtaaattatctggtatactgctttttcttagttctatattatttccatttaatccctgataaaattcaacaaaagctttttaaaattcaacaatagctcactcactattttaaaatctaaaataatatattggtctagagccatcatttattaataaaccctaaatcaagtaatagtgtgtggtatgttaactgtttgctatggcctgaagcctggccatctgcaagccagaaagagggccctcaccagaaccaagccatgccagtaccctgatcctggacttccaggctccagaacagtgagaaaattgtttaagctacccagtctatagtattttgttatggcagcctgagctgactaatacactgatttatgtgagggatgtttctattgtggtgttcataacatatacctagtactggatatgataaatacttgtcaaactggtactggataaagcaaacaaaaactctagtaagaacaattttttgcaggtatcaaaatccacttcaytatgtggcattttttttttcttgcactaaaaggaaattaacatcattgtggaaaactggaagaaaccacatattccctgtatcactgtcaaaatattggctaaattatttataagaatacacatatccctcatatcaggaattgcaagaatataatgataaagttatttaattatttagaaaacattcgttgattgacagaactgtaaagataagaggatccttctcagtctactggcctcgacagaaaagaaactacagtgatgctatgacccatggagatgggtcacagacagtttgtgggaaagggcaatgccagaggtaggtcttaactgacaggctgaggagttaaccacttaaaggggttaagtcaaggtcactaatgagtaaaggctcagcagtggtaaaaatggtacacaggacaaatactggggaaggataaaagaggagggggaggaggaaggggcaccttatggtaggcttgtaaatcacatgagagtgttgaagtttatattgaaggctacagatactgaagaactgaagaatttcaaaccactgaagaacaagctcagcttcacctgagagaagcgaaactggaggcaggatgaccagtaaggagtttgctacaaaaatctatgcttgcttatctaaaaacccaaattaaaaacaaataaaataaaaaaacctaggcaacaagaaagcacctatataaacaatatttagtaagtatttaaaatattttaaacttctattttaaaacatatttagatatttttaaacaaccttatccacttagacaagccaatgtagtgtgttcccttaatttggagaccacattcaaaacacattctcaggcaaaatatttctaggctacctctgtagagaagacaaaatgtggaagacaaagttccagacggcaaagtattaatatttctgggccattctaatagtttgtagcagtttttttttttttctgagatggagtttcactctgtcacccaggctggagtccagtggcgcagtgtcagctcactgcaacctctgcatcctgggctcaagccattctcttgcctcagcctttcaagcagctgggattacaggcagagtgtcaccaagcccggctaatttttgtacttgaggagagacagggtttcaccatgttggccaggctggtctcgaactcctgacctcagatgatctgcccgcctcagcctcccaaaaggctgggattacaggcatgagccaaygcacccggccccctgtaccaggagtttttaatgtaagggcacaaatctcaatcacctgcacaaattttggaaaatacacactactgaacttcactttaaaaatctgaatatagatctagagtagggtttgggcattatattttttaaatgctcttttaataattctgaaatatactttcaagtgagaattactggtttattggaacaatggctttaaatacacaaaattgagaccattctacaaattctgagatgctacagacatcatacaaatctatgctttcctaaattagctgtggagatggaatggaattacagtatattttatattaccccaatcaataatgtgaagttaactgtcacttattattctccaattagctcatatagtttatttaaataaattacattccttgaaggcaagaaccaagtatttctcttataaacccaaaatgtctgaaacaatgttagacacattgcaggtgttctaaaacatatcccagttgtgcgtggtggcttaaacctgtaatcccagcactttaggaagccgacgcgggtggatcacctgaggtcaggagttcaagaccagcctggccaacatggtgaaacacagtctctactaaaaatacaaaaatgagccaggcgtggtggcggcagcacctgtagtcccagctactcaggaggctgaggcagaagaatcacttgaacctgggaagcagaggttgcagtgagccgggatcgtgccactgcactccagcctgggtgacagagcaagactccgtctcaaaaaaaaaaaaaaaaaaaaaaaaaaaaaatttagctaggtggtggtgggttcctgtaatcccagctattcggcaggctgaggcaraattgcttgaacctgggaggcagaggatgcagtgagcagagatcatgccattgcactccagcctgggccacagtgcaagactccatcacaaaaaaaaaaaaaaaaagacaaaaaaaatcccttaagtttcacctaagggtagaataatcaaagacttgttattaaacataactaacaagatgaaatgaacattattcagcctgtagcattagtgagtattaaaagctcattagatttcaaaaccatgaaggaagatagcaatatagattagttatgtctatttttaaactttaggtaaaggaattatccaatatatattcttttgtgcctgtcttttgctcaaattgtgtcacagtcatccatattgctttgtaggaccacagttcattctttttcattgttatgcagcattccattatatgaatacaatttagtcattctaccatttctaattttcattatgattatgctgctatgaacattctcatacatgtcttttggtgcacatatttatgagcatttgtataagagtgaaactgtaggaccatagaagatgtgtatgatgagctttagttacttctgccaaaaagtttttcaaagtggttgtgccaatttatacttccatcagcagagtatgagttcacactgttctataaccttatcaaaacttcctattttcaggtaagaatgtgtaattcaaaaaacaaacaaagaccctccagctttctggataccttacaattcatacatataattaaatggtttgaagtacattcagagttgtgcaactatcaccacattcaattttagagtatttttaccaccccaaaagaaaccctgtacacattggcaaccacttcccacaacctcaggccctccagcaccaagcaaccactaatctactttctgtctatataaaattgcctagcataaagagtatcacatgctatgtggtctttcttataaacagtatcatatgatatgtggtcttttacgactagcttctttcacttaatataatgatttcaaggttcatccatattgtagtgtgtaataatacttcattacttttttgccaaatagtattctacagtatagatatctacagtttagtcatcagctgatggacatctgggttgtttccattttttggcttttatgaataatgctattttgaacattccatgtttgttttcaatactcttggtatacctaggagtagaatcactgtgtcatatagtaaccatgtttaacattttgaggaacagccagactgttttccgaagtggctgaaccattttacattctctttaacaatatacgacaattccaatttcttcaccacctcacctatacttgttattatttagtgtttttaacttttttatttattatatttattatttattaacttttttattatagccatcctggttggtgtgaagtggtatctcattatggtttcggtttgcactyctctaatgattaataatgttgaccatctattcatgtgcttattgatcatttgcttatgttctttggaaaaaattctattcagttcctttgtaaatgttttaattgagttatttatcttttattatttagttcaaatagttctttatatattttggatagaaatcactcattagatacctgagttgtaaatattttatcacagtctgtggttgtcttttaaagcatgaactttttaaaattttgatgaaatccaatttatctattttttctttggcacttgtgcttctggtatcgtatctgagatggttttacccaaccaaaactcacagagctttttgtctgtatgttcttctaagggttgtatagctttttatcttacagtttgtaagtctatgattatgagttaatttttgaagatggtgtgaggtaggagtccaattttacttttttttatatggctattcagttattatagcacaatttgttgaaaaggctatttggcacccttattgaaaatcaattgatataaatgtaaggattttttaatggactttaaattctatttcattgatctatgtctccccttatgccagcatcatcctgttttgattattggacctttgcactaagttttaaaattggaaagcacaactcctccaattttgttcttctctttcaagattgtcttgactattctggattccttgcattttctctaggatcaactcatcagtttcttcaaaaaagctaactgggattttgatagacaccacattaaacctataaatcaatattaagtactatcatcttaataatattaagtattctgatctgtgaatatgggaagtctttatctttaaaaagatctttaatcttctttctttcaacaatgccttatagttctcatagcatgaaacttgtactgttaaatttattcctaagtatttcatccttcttaatattgtaaataaaattatttcctttatttcatttacaattgttcattgtgcacagaaaaacaaatgatttttatatagtgttcctaaatcctgcaatcttattaaactcattcatttgtcctaatagccttgtagtggactctttaggattttctatatatacaaaattatgtcatctataaacacagttttattttttcaacctcataatctggatgtcttttcttttttcttgtctaactgtcctggttagaatccccattatgatgttaaataaaaatggcaagagaggacatccttgtcttattccacatcagggaacgaatttagtgttccagcattaagtatgatgttaactagggaattttcatacatgctccttatcagattaagaaagttccctcctattgttagtttgttgagtattttttttttatcatgaaagggtactggatttttgtcaaatgcctttctgcattttttgtgaagactgtgtgatttttattaatatcactgattacataactgattttcaaatgttaaaccaatcctgtactcccaagataaatcaaatcccacttgttcatggtatataatctcttttataggttgctagatttagtctgccagtatttcgttgagaatttttgcagctatattcaaaagagatataggtcgatagtctcttttcttgtgatgtcgctgtctggttttcatattaggttaatactgacatcatggcatgaattgaaaagtgtcctatcccctccatcttttggaagagtttgtgagaaattggtattaagtcttctttaaatgtttggtagaaagcaatgctgaaggcttgacttcatgagaagtttttaaattattcattatctctctttgtatgttataggtctattcggatttcccatttacttgagtctagtcagtctagctaaagacttgtcaattttgtcaaggaatcagcttttggttttgttaattctagtatttttctactatgtatttcattaactttcactgtaatctttattacttccttccttttgctttttttttgtggaggctgcgagagcaggttgtggctcaaatgacagagactattactgttctgagatttagcagactgacatttctcttttttggtctttttttttgagacagggtctcactgtgtcgcccaggctgtagggtggtggtgggatctcagctcactccaacctccgcttcctgggttcaagccattctcctgcctcagcctccccagtagctgggtgccaccacacccagctaattttttgtatttttagtagagacggggtttctccacgttggccaggctggtctcgaactcctgacctcaagtgatccgcccaccttggcctcccaaagtgctgggattacaggcatgagccacggtgctgggccttctgttttggtctttcttagaaaacattttgtgtatatgcctcactgatcatcccctcctccactctcttcatagtgctgactkgttgaagagacagggctagttttcactgtcactgctgagatacctcaagctctaaaaacaaaaccaccaccataaaacacacccccatatcccttcaagctaccttttcttcttttcctccaacttaaagataacattggataatattactgtctccattttataactttctactcacttcccaatccattccaatctggattttacccactgctgtaattgctcttataaaatcaccaatgacctccactaccctgaatcaggattcttttcagtccttaacttacagtagtcctcccccttaatcttggagatacacttcaagattccacagtagatgcctgaaacagaagatagtacccaaccgtatatgtagtgtatttttttcaatctgataaccaagtgactaataggtgggtagcatatacaatgtgcatatgctggacaaagggaagattcatgtcctcatgatacaggattcatcacgctactcagaacagcttgcaatttaaaacatgaattgcttatttctgcaattttccaattagtactttcagatggcaggctacaactgaaaagtgtggaaagacaaaccacagatgaggggggactactgtactaagctactcagtaacatcccactgttgtagtatctcttcaaacacttcctgactctggtgaaatcccactgtctaggtttttccatctctctgttttgctcacttgtcaagttctcctgtcagttcttccatctctacctaaacaataaatactagaggagattctagggctgtctggggcaccaattctttttgtactctactgttttctttcataatttcatcttctcacatgacttcatttattatctatgcttgacaaactcaaatttcaatctccgccctaattcgtgctgctgttctatggatttaaatgcaactggctattttacatctccacttgcgtatctcatagaaatctcaaactgagcatgactaaaatttatttcattatatcttcaccttcttacctagcaccatcaccccaaattttcctccaatactgtttaactcagtaaaggtattacccttcactcagtggcttaacccagagggccaagagatctttgacttcatccactcttattcccaaagtccaagagtaaattctgccttttataccttttttttcttccttcgagacatagtcttgctctgtcacccaggttggagtgcagtggcgtgatctcagctcaatgcaacctctgcttcccaggcaagtgactctcctgcctaagcctccagagtagctgggattacaggcgcccaccaccacaccctgctaatttctgtatttttagtagagacaggtttcaccatgttgtccagagtggtctcaaactcatgacctcaagtgatctgcccaccttggcctcctaaagtgctaggcatgagccaccatgcccagcctctacttttaaaatatcttttgatccacataaaattcctagggctgccataacaaagcagcacaaactgggtggcttaacagaaattttttcataattttggaggctaaaagtctgaaatcaaggcgtaagcagggttggttccttctggggggctctgagggataatctcatccatgcctctctcttaacatccagtagttgctggaaatccttggtataccttgtcttatatatgcatcactccaatctctgcctcagttgtcacatgatcttctgcgtgtgcatctgtgtgtctccaaatctctcttttcttataagggcaccagtcattggctctaaagccctcaatctaacccagtatgatctcatcttaacttgattatatctgcaaagactctgtttccaaacaaggtcaccttcataggtatcaagggttgggacttcaacacatctttttgagggacacaattcaaaccccaacttgatcccttctacttttctggatagcggtgaacagatgaactctggaagatgacatttgaatcctagctccaccactttctactttctacctgtgtgttcttacaaaagccacctactctctttgtgattctagttttccactggaaaacagaaactctctcatagagttgctgtgaaggctacaccagttaatatatgtaaggcacttgatacagatcctgtacgtaagtgctacgtaagtattagctattattattgttgtcatacccacttgtatctacttgccctatttagaattgttcttccttgggaggccgaggtgggcagatcacgaggtcaggagttcgagaccagcctgaccaacatgktgaaaccccatttctactacaaatacaaaaattagccaggcttggtggtgcgtgcctgtaatcccagccattcgggaagctgaggcaggagaatcgcttgaacctgggaggcggaggatgcagtgaaccgagattgcgccactgcactccagccggggggacagggtgagactccgtctcaaaaaaaaaaaaaaatgggtcttcccacatccactgctttcccttccaatctttcctccgtattgtagcctcaaggatcttgcaaataacacaaatctggtcatgtcgctgtcttaagaccctcttctcacctgcctcagttttcacaccaggtctacactgcttaaagctctcctcacccttccagctcctcccaacccttcaccttcaccgagttaatgtttactcatgtatcagatttcaggttagacacgcttcctccaagaagctttcgcagatacacaagttagtatctgcccgtacttctcttacataatactctctatacttgttattgtcatttgtttagtttttatttagattaacttccatcagaagggcagagtagctgctgtaacttcagttactataaatgggcctggcacatactttgcactcaataaatatcttctgaagtaaatgaaatgaatcaatcttgctcctgggtttacgtttcagtgattcaaacgggcatacttggtacacaacgtgaggtcctggaaggtataacttgtgttttcatttttgaatttctaaattctagcagagtttttggcacactctatgcacccaataagctatctgaataaacttttcttggaacatgagtgtctgaatgtcctgataactccaacacgttcccttcctgtaattcctaaagcccaggaacacttattgccttccatcagttagtgaactactgatgctccaaaatgggtcacgcctccttcccctccacacccaactcgttttgttttgtttgttttgttttgtttagacggagtctcactctattgcccaggctggagtgcaatggcgcaatctcggctcactgcaacctctgcctcccaggtttaagtgattctcctgcctcagcctcccgcccggctaatttttgtatttccaccaccacgtccggctaatctttgtatttttagtagagacggggttttaccatgttggccaggctggtcccaaactcctgacatcatgatccgccggcctcggcctgccaaagtgctgggattacaggcgggagccaccgcgcccggccccacacccccaactcttagcccgaaactcagaccccgggttttcgactattaaaagtagtcacaggaccgcgacactgcacttcagcctgggcaaaagagcgagactccccctcaaaaaaaaaagtagtcacagaaaactgaattaaattactgacctgaagtaatcgcaagcagaggcgtccctgactgacttctatatccctccaccccaaccccctgggccctgcacagcgggtgtctgttgaatattctcccggctgttgagcccaaacctgatgagaggaaaggctcggcttccactccaagccgagccttccgctgttcttctgtcccggcccttggtgtcccctcacgcggccccattaggttmcgcgcccccggggactccgccgccgccccagcccgcgccccgcggtcccactcactgttcttgaggaatcgctcctcgtgcagcactgcgatggcgttgacgcagagcagggctgcctgcagcagtgagtacagggtaaaggccatggccgtccgaggccgccccgaagtccaagcgatttctctcccgccgccgcaagggacgtggcgcctccamggcyggcgccttcctacggaagccgatggggcccaaaacgaactctccgggaagccccgcctccatctggctaagaaccgcccctcgctgaagactgcaagtcctgccgcttgtctagaccggtgatgtgcaatcaatgctctgatgtggccagtgctgcaggtgcaaaatacacaccggatttcacacacttggaactggaacaaggatgaagaatatcccaataatttttttttttttgagatggagtctggccctgtcgcccaaactggagtgcagtggcacgatctcggctcactgcaagctccgactcccgggttcacgccattctcctgcctcagcctcccaagtagctgggactacaggtgcccgccaccacgcccggctaattttttgtatttttagtagagacggggtttcaccgtgttagccaggatggtctcaatctcctgacctcgtgattcccccctcctcggcctcccaataatttttaaatgttgataacatgttgaaatgaaaatattttgaggccgggcgcagtggctcacgcctgtaattctagcactttgggaaaccgaggcgggcaaatcacctaaggtcaagagttcgagaccagtctggccaacatggcaaaaccctgtctctactgaaaatacaaaaattagctgggtgtgatggtgggctcctgtaatcccagctactcaggaggctgagagaagagaatcacttgaacccgggaggcagagactgcagtgagccgagatccagcctgggtgacagagcaagaggaaagaaggaaggaagggaggaaggtttcttgtttatttttaattattttatttaatgtggttatgaagatactgtaaatgacatgtgacgcttgcattatatttctattgctcagtactgcacttgatgctcccaggagatacaggagatactaatattcccatttcagatttcagaatgctaaaacaaaataactgttttaaaattactcagtgagaaacatcccctccttgaccaaactccaaccaagatcctctgagcctcttctttttttttttccccccccaggaacagggtcttgctctgttgcccaggctggagtgcagtggcaccatcatagctcaatgcagccttcagctcctggctcgagcagtcctcctgccttagcctcctgcttagctgtatgtgatggttaagactgagtgtcaacttgattggattgaaggatgcaaagtattgatcctgggtgtgtctgtgagggtgttgccaaaggagattaacatttgagtcagtgggctgggaaagacaggtccactcttaatccaagtgggcaccatctaatcagctgctggagtggccaggatataaagcaggcaaaaaaccaatgaaaagggtatgccaagaccagctcggttggggagaccctaacccagcggtgctagaggaattaaagacacacacagaggtgtgaagtgggaaatcaggggtcttatagccttcagagctgagatccccgaacaaagatttacccacgtatttattaacagcaaaccagtcattagcattgtttctatagatgttaaattaactaaaagtatcccttatgggaaatgaagggatgggccgaattaattgcagcaggaacacatccttaagacacagatctctcaggcttttgtttgtggcttaagaatgcctttaagcagttttccaacctgggtgggccaggtattccttgccctcattcccgtaaacccacaaccttccagcttgggcgttagggccattatggacatgttatagtgctgcagagattttatttatggccagttttggggctagtttatggccagactgttgggggcttgctctcaacaagggtagactggcttagcctcccagcctacatctttctcccatgctggatgcttcctacccttgaacgttggacttcaagttcttcagctttgggactcagactggcttcctcagcttgcagacggcttattgtgggatcttgtgatcgtgtgagttaatagtaccgaataagctccctctttgtatatatatctcctattagttctgtccctctagagaatactgactaatacactctattacaggaatgggtcatcccgccaggctgagccctcttcttgacaacacctcaatattggccacttaaaaactacagattctcagcctggggaacatggcaagaccctgtctctaccaaaaatacaaaaaaaaaaaaaaaatgcctcagcttagtggtatacacctgtggtcccagctactaaggaggctgaggtgggaggatcacttgcacccagggaacggaggttgcagtgagctgagattgagccattgcactccagcttgggtgacagaacaagaccctgtctaaaaaacaaaacaggctgggcgcggtggctcacacctgtaatcccagcactttggaaggccgaggcgggtggatcacaaggtcaggagatctagaccatcctggctaacacaatgaaaccccatctctattttttaaaaatacaaataaattagccgggcatggtggcgggcacctatattcccagctacccgggaggctgaggctggagaacggcatgaacccgggagtcggagcttgcagtgagccgagatcacgccactgcactccagcctgggttacagagtgagattccatctcaaaaaaaaaaaaaaaaaaaaaaaaaaaacactacagattctccacacaaatgatatgcatattgtgtatctcctttacccaacactaaaacacttgaatactaacatagtttctttttttaattgtatttatttattttaagacaaagtcttgctttgtcaccaggctggagtgcagtggcagtggtgccatctcagctcactgcaatctccgcctcctgggttcaagcgattcttctgcctcagccttctgagtagctgggactataagcgcgtgccactacgcccagctaattttttgtatttttagtagagacagggtttcaccgtgttagccaggatggtcttgatctcctgacttcgtgattccatccacctcagcctcccacagtgctgggattacaggcgtgagccgctgtgtttggctgaatactaacatagtttctaacagctcgctgttgcattcagttgctactgttgctacttgcctgaaaaagcttcaggctgccaaaaaatttactgtttgttttagccaacaccttacaataggccccaaccttcctttcttagagcgtttactcaagagggcttacaattgtgaatccttctcctgtccctttgagatgtacatgtttctcctacaactcaggagcatctttctcaaggacctgaaagccatccctttaaaatgtaatcaatcatcaggaaggttaagagcctctgtcttccaatctctatgggaaggcagccaacagacacagctggcctaactgcatcaaccaatcctttgtcgtttataggatattaactcacacaaggtcccgcaatatgccgtctgcaagctgaggagcaaggaagccagtccaagtctcaaagctgaagaacttggagtccaatgttcaagggtagaagcatccagcatgggaggaatatgtaggctgggaggctaagccagtctacccttttcacttttttttgcctgctttatatcctggaagtttaacttccctgtctctactgagacaccactcatcttcctccctactccttcattctccctttgaaacaccctgtcagccgggctcatgcctgtaatcccagcactttgggaggctcaggtgagaggactgcttgagcccaggagtggtggcacgtgcttgtggtaccaagctactcagctctgccacctgtgtacaaattgaagctgagttcagttcatgctagatcctctttcctattgcaacagtatattactgattaaaatatgtccttaccagtttaagtagtatctggctttatctttcacagcattaataaaaggctgagttagaacacgttgaattttagatgttatttcagagcaagtatgcaaagtaatcacttcctgaacttcacagagtaccctaaaagggaaaagcaccacattaagtcccagaaaggactttggaaggccctaagttgctactgctggaaaagacactggccaaaagaaaagaataattaaactcccaagaaaatattaagcctaaataggccaactagtttgtgcctacagggaagaaaagctgtattatttcccacagatgtgcacaaacactatctccaaaatctagccctaagtgcaagtcaggtagagaaagacacataaagataaaataaagggaataaaggaaacaacaggataccaaaaaatcctcctgttcttcaaggcccataaaactctagacactggtgatggtaaatatcttagcctgttcaagctactataacaaaatgccatagactgggtggcttataacacaaatttattgcttgcagttgtggatgctggcagcctgagatcagagtgccagaatgatgagattctggtgagggatgcaaattgctgcttcttgtattcttacctggcggagaaagaggaagcgaactctctcaggactctgatacactaatcccatacatgagggctctaccctcatgacctaatctaatcctaattgactcctaaagatcccacctcataattcacattagtaggaagggtttcaacatacgaattttgggaaaacacaagcattctgtctataaaacagtgaagaaaagttatttctgagagtggagagtggctattttaggatttctacattgggctgtgatatggtttggctgcatcctcacccaaatctcaacttgaattgtatctcccagaattcccacatgttgttcgagggacccaggggaaggtaattgaatcatgggggcaggtctttcccatgctattcttgtggtagttaatcagtttcacgagatctgatgggtttgtcaggggtttccacttttgcttcttcctcatttttctcttgccaccaccatgtaagaagtgcctttgcctcctgccatgattctgaggcctctggagccatgtggaattgtgagtccattaaatctctttttcttcccagttttgggtgtgtctttatcagcagcatgaaaatggactaatacagtaaattggtaccagtagagtggggcgttgctgaaaatatacctgaaaatgtggaagcgactttggaactgggtagcaggcagaggttggaacagtttggaaggctcagaagaagacaggaaaatgtgggaaggtttggaacctcctagagacttgttgaatggctttgacaaaaatactgataatgatatggacaatgaaatccaggctgaggtggtctcagataaagatgaggaacttgttgggaactggggcaaaagtaactcttgttatgttttagcaaagagactggtggcattttgcccctgccctagagatctgtggaactttaaacttgggagagatgatttagggtatgtggcagaagaaatttctaagcagcagagcattcaaaagatgacttgggtcctattaaaagcactccattttaaaagggaaacagagcataaaagtttagaaaatttgcagccggacgatgcagtaaaaaagaaaaacccattttctgagaagaaattcaagccggctgcagaaatttatataagtagaaaggggcctaatgttaatccccaagaccatggggaaaatgcgtccaggccatgtcagagaccttcatggcagcccctcccatcacaggcatagaggtgtaggaggaaaaagtggttttgtgggcaggacccagggttcctttcctgtgtgcagcctagggacttggtgccctgtgtcccagccgccccagccatgtctgaaagcggccaacgtagagctcagggtgtggcttcagagggggaaagc

SEQ ID NO: 97783 - DNA, 19729 bp, Homo sapiens
aatgttacttaaataagtggccaggagaggaaagcttgtgcaattacagataaatgtcatcaaaaaatggtaaagggggaagccaaccaaccagtcaggaagattggtagactcataggggtgataatgccgtgttaggattctataaaatctggtcctcagtttttccagtccagaaattctcattttttcctaatcatccagggtaagcatattcctcagagagttaactgtgctaaccaaatctaaaacagaccaagatgaaaattaaaagacagtgtatccatttacaatgagaaccttttcagtgactaggatgattggttttggtatccaagtcacccctttcccaagatcagattgcctaggaaattgaattagtatcagaacagtacctggtgagcagagtcaaacgaaggacccttctcttcttgttttaaatgagggttctgctcagggtagaaacctgacaaatgtgatcaacatggaaaatcatttagaaaaaaaaacttttagagacagtagcaagcccactattacttatttcacccaaagccaagactgcatgtgtcatttgaataaaaatctaaatgataactctttttatatatttctctcaatttttgcaacgtttatggtataatcacgttcctagaattcactgatctgagtataattttgaaagaaaatgaaagttaaggaagtatcccgctttagtttccgtttcagtcgctattgatttatctttaagcctgtgattatggcatcaggccaaaaaagacaacaatgaaaaaaggaacagtctgccctgacaaactaatgagcacagacgaaggcaaaaatgctttcccggaaactgttatgcttagaagaaattttctaaaaagtgagcaggaggacatcagtgatttctgtggactgggaatcccctcagctggtgcagaatatgccttggaaagtatgggagagcagggcaaagcttccccttcacagttttcactctgagctctcaaaagattccccgagctcacagtgtttggtaatactggttacatacttttcaattacccatgtgtctcatccttcatagccagcctaagcagagggcaaactgagtgctggcaaagtgggtggtagaccctaacaatcatcatggcattggagaaggcagaggctcagaatagcttctgtttggatacattttaggctatgcagtgtttctgaactcgtgcacttgagaggacttttacaaatatggcagatttcatcatttggaggaagagacaaaattggaggacattataataaagtaaatgtgtttgggggaagtatggtgcatttctttctccttcccataaataagatatttcaacaaaataaattagaattttgtgatactttgttccatttttaatcaaaatctttagaaaatgtctagttttaattttaattgattcatcattggttgtcttttcttttgagaagaggaatcttgagatatgatatagttcagtagtgcctgttattccatattttagattatcattcagttttcttcaacttcttattgacagtttgtctttgtgaacaatttgaagaagaatgctaagtcaggatttattatatagagtctataattcacgttagggcatttccaatttagtagcagtttattgagcagcactaaggaactatgaatacatctgtacttatggtgccaggatttttaggacgtattcttcttaggtacttaagtgaaactatggtttcagtgttatgtgataatctcagacttgctcaatttcattaccagtgtctggttaataaaatttgcagacaaggcaagaagaagcaactaaaattgcctcattcaccccttctccaaaaaaaaccctaacagttttttttgtgtgtgtactacttataatccacagaatgtgctgaccatatcataaagatttataattgttggctatgaaaatcttttcagaaatagatacaaagaggtatattaattccatgtgggcatattaggtcctgtactcagtagccaaaaataattaagtataatctttccttttctaatagcattatccaaaactactccatttgtttgaaagctcttcttggctaattagaggaaacagtcctgaaattttaagtcactgtgagtgtttggcatcttaagttccatgtatttaaaatcgaatctgcagttttttctgctaaactacatcttcccctcatatccctatttctgttagtgacagaactattctttcagacctcagaagttcagccttttttccttgtctcttctctgctttaaattcagattcaaatccttaacatgttctttgtttcttttttgcatcttcaactttctttttctgagatggagtctcgctctatgtagcccaggctggagcgcaatgacgcgatctcggctcactgcaacctccacctcccgggttcaagcgattctcctgcctcaatctcctgagtagctgggattacaggcatgcaccaccatgcccagctaattttttgtatctttggtagagacggggtttcaccgtgttggccaggctggtcttgaactgctgacctcatgatccacccgcctcggcctcccaaagtgctgggattacaggcgtgagccaccgtgtctggcctcagcttcaactttcacatccaatctatcactgtcttgattctttttgtacagtgtacttgtcattatatttctactcttaccaataccaccttagtgtagcccttcttctttttatgatagtaaaatacaaataacataaaatttaccattttaaccatttaaaagagtacaattcagtggagttaagtactttcacagtgctgtgaagccatcaccataatttagttccagaacattttcatcacccagaaaccccatactcattaagtagttactcctcattaacacctcccccaaaccccagtcagctaatttgctttttgtttttatggttttgcctactctagatatttcctataaaatggaatcatacaatatgtggtcccttgtgtctggctttttttacttagcatattttcaaggttcatccatgttgtagcatgtatcagtacttcattcctttttatggccgaataatctattgtgtgtgtataccacattttatccattcacttgttgatggatatttgggttgtttctgctttctggctgttgtgtataatgctgctatgaacatttgtgtaccagtttttgtttaaagagctgtttcagttcttttgggtatatacctaggaatggaattgctggattatatagtaatatataattactataattatgtttaacttattgcagagccagccccattacttttcacaccagtgtttcccaaagtgtgggacactaccatgtacattgataataacgtttagtatcagtgaattattctcttcttaacttcaatccctctgattaattaaatcagggggaatattagtattttttcattgtattttgttttatcattacattttatttccatggcatgtattaccgattttacatgtacagtagtgaaagtttacttttcatgtaaatgtacgtaaaataaagtggtatacagagtttctaaaaatataatgaagatcaaacagagaaatgttaaaaaaaaattgtaaagatgatatgagaatgccttgaagttttggaaatacagacctgagatattgcagctattgcagcaaatcccaactgattttcctcctccactctttcccactttcaatcaaccattcatgcaattcccagaatattttccaatgactttgatagggtcactctcttcttcacaaacatttattgaatccccattttgtacagagtaaaattcaaggttatttacagtttcatgtccttcatccttccaaccaaacgaatctaattatgattcctaaaaatcactttatacttcctactactgtacattcccttgtgtcattcctctgctgtaaattccttttcccttagtttatattgccattcaatagggtctgatatgcaccagaaactgtactgttggcctgggctacagcagctttcttttacacttatgagagagcagatattaggcacaggaataattcattaattacaattgcagtaagtagtatgatggaaaaatagagagtgttatggaaataaataaataggacacctaatctagttgaagctgaagtggtggtttcaaaggcttcttggagaaaaagtcatttaagctgagacctaagcaattagtaggcattagcttagtgaagaaatgggcagagagaatagtatgtgcaaaggtaccaaggtggggaggatcttggctcaaatatgttaattattaatatttcatatatttattttgctatgaagaactttaggtgtatgttttcttctcagtaataatgtactggcctataatatttaatatacttcttacaaataccaatttatcatgcagccttaactctgtgaattttttttttttttgaggcaggcttttgcccaggctggagtgcagtggtgtgatcacagctgactgcagcctcaacctcccagacccaagtgatccatccacctcagcttcccaagtagctgaggttacaggcatgtgccaccatacccagctaattttcctattttttatagagatgaattttcgctatgttgcccaagctagtcttgaactcctgggcttaagccattcacctatgttggtctcccaaagtgctcagattataggtgtgagccaccatgcccagctgactatgtgaatttttatttttaaagagacttaaaaaaaaaatcactgtaagtagtcaaagattagattcaagtcttttttttttttttttttttgaggtggagtttcactcttgttgcccaagctggaatgcaatggcatgatctcagctcactgcaacctctgcctcccgggttcaagcgattctcctgcctcagcttcctgagtagctgggattacaggcacatgccagcacactcggctaattttttgcattttaagtagaaatggggtttcaccatgttagccatgctggtcttgaactcctgacctcaggtgatccgcccgcttcggcctcccaaagtgctgggattacagatgtgagccatcgcacccagccagattcaggtcttaaaactatccagggaatttatatggaagtcccatctctatatagatatttatatagatttatataacaatttattataaatctatattgtatctataacctatataataatgcaatacagatatatctgattataatcctataataaatatttttatttttcaaatgtatgggtgcctatatagagagtactgctatcagtcaaggcttttggttacatgcagagaaaccaactctggctatcttaaggagaaaaagaatttagttggaggttgaagaatccacaggacaatggagaataagtcttggaaaatggacaaagacctaagggaactaggtgataggaaggactagccagagtcatgctacaggaacacacattgggaagacactactgtaagactttcattgtttctcctgctgctgccaggcttgaaataattttcttactaatagtatctttgtgatgccagctggagttcaaagtctagggtagaaacagcatggctgagtccttgttgtggctacaggagaggatctcctgtctttggcttctctcttttggcctcccaccaacactcacataagggattttctccaagtaagaagggggtttggactatcaagaccccccaaggccgacaaaagaaacaactgtctttcccacctacccattaaaatatatttctaaacagtttttcatgatgacggataggtgtatgtttctgaaatataaggcaaaattgttaaaggcatctcaaatgtcctggaaagtatatagatctttttttaaaaaagaaaggttgtggtagtttattagagaaaaaaatgactttgattctttaaactagtcttgagtatacctaaattttacagtatataggcatgaacaaagaaattgattagattatgtatttttctaagagacagaattacaaaaagtaaaagtgattgctaggtatacatttgcttatttttcaacatttttctttggtagacaaaaacattttgtatttcaaatgtgtccaagatattgctatcatttatacaaacggatcaaaacaaaaagtacagtaaacacacatatcctaattgcttcaaaacatctcaatgaataaaagttgaaaaacatcaaattaagaccggtgctgctaatttggttatgaaatatgtgcactgttgccagtatcccatagcatataatttttttcatagtacattttatgaattacatttaatgaattggttataaaacaaaccaaatgatgcataagaatgtttccctacatattgatgtgctacatgatatttggggaaagaaktgtgtatttgcatgaaaaaatgtttgaggaatgctttacgacacatagatgcttttgacttataagggcttgactccagtaataatgtcaatgtctccactgtaaccacagatagtaatatagcataaagatcaatacagacagataacttctagagacagaaatgttctcatagtcacaacagaatagttgtaagcatcaaatctagaaggttctctagcctagaaatgcatgaatgtataatacaacaagtaagaacgtgaaagcactttgtaaactccgatggtaaccagcctttcttaaggtagcttttcctagaaatccatttaattgytggactcctttgggcagtggaattctgattgtcattcattcaggaagactgtatttctgtttttggtcctttcacccacctttcatccttcacataactgtacaaaagttgaaagtcacaaaaccatagaaaagtctcagtttcctactgtagaattcttgtcatttcagtagtcacagttaaacttgttctaggtttttcagatgcycttttccaggacttcatatgttttgatatttttaaaaattctttctttcaactttctggaataagaaaacaagagttttatttacttgggctgttcttgtttcccccaggacatctaaaaacatgtagtaagaaggggaagctgttacaaccaaggaccccttaacagaatatttcacacaggatcatagcagaatctttctgtagttgtccacattattttctttttcaaaagatctgtcttggataaaacagattataacatrggagtaatytggtaacttactttgattataagccttgcttgcttcgatttgggatttaggcatcgttgtcctttattttctttcagggtaatactgttaaaagaacatacaaaagagtcttaaagtttagatgcaaatacataaacaaaaaagcctgcaccattgtyatcttcagcaagttcattacttacatcacttctattttgtcacagttgttacttgggtacattatggaggctttctcaatatctgccactttcactgcttttaccccagggcctatgcaaagacagcgtcctcttttgaacatggggaagcctagaatagatcatagcattagttagtaatgcrtctgattgcaacagatggctgtggtttatagctggtggtgaacgtgagcagaattttcattaagggtaaagatagtaatttgtcaaatagcacttaacacawctgttactgggaaaagttaagtaagatgttgattattttctcattaaattagtaagcaaatcgctaacaaatgggaagcatgaaggaagtttattggaggtgaagcttgttttgcccccttgattttatcctcaaatattttcccaggaagcttgttaacatgatcgctatataaaatcttcttaacagacatttaaaactgttgctaaaggcttttgccagatattctagccaaatcaaaaattccatgaagttcataatttctaktttcaataatcatctctagtatcttaaacatgtccaccatttctgtgctaaagctgtagtaacttctaatctgtgagattaaataaaactttatcatgtcttttaggataaaagtggaagaaaagacatttgaaacattagaaaargaacttataggttgagaaataaaaattactgcataccttgaacaactgtagcacacaatatcacagccaaggctatagccatgcccttcacactcatgtttgttttttgctgttgctgctggtgctgytgctgctacttcagctttgctgctcttcttggaaggagtagaaatgctgaacatgaaaggaaattgataatyggcatatatagagcattttatacaccagcaatccttttatggcacaggaatttccctctttgagtcatgcacctttcctgcttccaagagtttctgttttgttctcttctaaatgttactgtcccttcctatttgcagtagtgttgaaagtgataagaatgtgaaagcactgtgaaaacccagatggtaaccagccttcttaaggtagcttttcctagaaatccatttaattgtcggactactttgggcagcggaattctgattgtcattcattcaggaagactgtgtttctgtttttggtcctttcacccaccyttcatccttcacatatctatacaaaataatattctgaaaagcttttttttattatctcacttttgcttttcagtccaaactcttataatagataaggcctatattatttgacaccagatgacctttattcaatttcatatttttacctgtaaatgagtgcctaaagaagtttccctgtgtttctgtatttatgtccatattgttttgcattttcaacaatttttactttatatattttattttgttttgctttattttatttttaaawttaattttattactttattttatatttattttattctgcaaagctttcattataggcagatggcagggggctcagtccttcttggcagctgctttcctcatggcagccaggacgttgctcagctcctcctgccttctcttggcgcagatgtttgtccctacccttttcttgatgaatttgagggcctgtttgaccttggagaccttcagtaactccatgccacgccactcgttaggggtcaagccacacacctactgggatcatgtcccacacaaatttagtgagtttggtcaggcgcccacagtggctgtgcctgggcttgctcacattcttggtcaccttgtggcccttgttgaggcccacagctatagggtagtgcagtgtcatggctgctgccctccaatggtggccatggtggaaagctactttatatatattttagcactgttacttagtacatgaagttgtatgagttgtattagggatcataaaaaaaagtgatcgtctttgctcatgtgatagttttacctctgagattctactttgatgtaattcctatttttttgtctttatctttcctcttaagcttcttaaatctttgttttaagtgtgtcacttgtagatgtttaagaaaatcatatcaaaggagctttctaatgggtaagcttaataaaatatatttactgtataactggtaatctgtaatttttaaaatgcttccttgctgattctttatgttttctttgatttctttctaactttaaatatattttatttaactttttgaagccatttttgttttttttaatgagatgggtctcactctgtcaccattctggagtcgagtggcacaatcgtagctcactgcagccatgaactccaggcctcaagcaatcctcctgccttggtctcccaaagtgctaggattactgggatgagccacggtgcttggccttccttaagtaatttgaaaggagtacattgttttacattttgatattaattcttaaaattctttaaaaagatttttacctgaatttttctaattatttacatcaaccatcaatgatatttttttagctcctgtctttgtaacatgagaaaatcactgtaactttctttcaagaattttctcctatttcctagttttaccaataaaagttggtataatcggggaatttatagccagtttattacttttagattattattttatcttattcaacttcattttttgagaattatcatttgcattttatcttgaaattatatatttatttagatataatcctgcatttaaattctttaacaaccatgactagtctttaaaacctttgaaagtctttacagtagtcccccattaaatgagaaattctagaaataattcataagttttaagcacttttctgagtagcatgatgaaatctcacatcatcttgctccatcacttcatcccatcacatagacattttatcatttcacagcatcactagaagagtgagtatagtacaataagatatttgaagagagagagactacacagtcacttaasttttattacagaatattgttgtaattattctatatattaatgttgatgctcttactgtggctaatttataaatcaaacttttttataggtatatatgtacaggaaaaaatacaatatatacagggctcagtactatctgcagtttcaggcactcattgggggtcttggaacatatcccccaaggataaggtgagggggctactgtattttaattaatttccaagtagctggaataktctttccttcttttccattaattcatttaacatatgtaaagaaagactaattttccctcaggaatatgggtaaagtaaaaggaatgtgttcttggagctcataaatccttatctgttattattttttaatgttgcttttcattttctcagcattagaaacacagtagagcatagttgttaatagggaaggctctagagtcagcctgtgttcaaatccacccttgattatttatttatttatttatttatttatttatttatttatctttgagatggattcttgctctgtagcccaggctggagtgcagtggtgtgatctcgactcaccacagcctctgcctcgtggattcaagtgattcgcctgcctcagcctcccaagtagctgggattacaggtgcgtgcctccatgcctggctaatttttatagttttagtagagatggtgtttagccatgttggccaagctggtcttgaactcctaacctcaggtgatcctgccgccttggcctcccaaagtgctgggattacaggcgtgagccactgtgcccagcccacattcagttatttatgaacaagttacckcaactttttgaggctattttctcatctatagactggggataataatagtactttttttttttttttgagatggagtctctctgtgccacccaggctggagtgcagtggcatgatctcggcttactgcaacctccgcctcctgggttcaagcgattttcttgcctcagcctcccaagtagctgggattacaggcatgtgttaccacgcccagccaatttttgtatttttagtagagatggggtttcaccatgttggccaggctggtctcagacccctttttcatagggctgttataaactaggtattaaaagaggtaatgcatattaatcatttagaaaaatatgtagcactcaaaatgtattaactgctattattattatcagtgtcctttcctgaattggcataccacatctagcttgttttcagctgtttttcagcattaacacaaacacaaccacttaataaaagatgagttgacattgttatagcatataaaaatattttaaattataataaccatgaatataaaaatagcatactaatcataaaaatcacttacagaaagtgcatgaatgcaatagcatagttcaaataatatagacaaacaatagtgaatatttctgcttactagctaaagtgttgtcatatagctttggtgtaagacaatttcttaaatagggattcttaatttttttaaaaagaccctggaaattattaaacatatttttacattatactattttaaatagaaaatagacataattcaaatttacataaaacaagactaaactcttccttttgccttcatgtgtgaattactacttagctgtgtagaaaaactgtggatcacaattttctccttcagtactctgctgggagtcttggaatgtatcccccaaggataacaaggggactactgtattttattttctattgttttattttcttccttactgcaaaggtaatatctgatattttaaaaaaacattagagctgggcatggtggctcatgcctgtaatcccagcagtttgggagaccgaggcaggyggatcacttgaggtcaggagttcgagaccagcctggccaacatggtgaaactctgtctctactaaaaatacaaaaatcagctgggtatggtggcgcatgcctgtaattccagctacttgcaaggttgaggcaggagaatcgcttgaacccagaaggcggaagttgcagcgagccaagatcgcgtcactgcactccagcctgggtgacccagagagactccgtctcaaaaaaacaaaaaaccaaacattagaaaatgtgtaataagaagaaccttaccaccagagatgaccactgctttagttttcttccctctggatggatacgcacatacactggatacacacacacacacacacacacacacacacacacacacacacatttcgcctaacaagttctatatcagactatatcaggttctcccccccgcccccyccmtgtgtcagggactatatagatacttcagaaggagacagaggagaagacagggagaaaaaaaaattcttccttttcctctgtgaggaagactactgcataatcttcctcacgraggctgctgcttgtgtatgaccctagaggagggggctatccctcccccatgtagacacatctttgtctgcttttcctcagagctaaatcacagtttgaaaactgagggaggtttatttagttcttcacttcttcaggtgatagatccaaaattatgcagagtaaggagagggattggttttgtgctgtaacsttttcacttcatctccttgaaccacaaaataagcctaattaggctttagcaggtgctaatrtggatactctctccttctataacactctctccctctttactgctcttcctcccagtgttcctgccttagagtgtcctggaaagcactacccttttctatagtagttcatttattcatttactcattcattcagcaaatgtttattttagatgtctgtcacatgtctgkcactcttttgggtattagagatagaacagtgaacaaaactcaccaagtcctttccgtgtgttccaaatttcaaactttctgccttattgtagaagttagtctgcctgatttctgctggctttgtagatgtgtggggtcagacgtgtcttcaggattgtgacttgttctggctctatactctctgacatcacatgaggaagattaccttctttcacagcatcccctcatctggtgagcctgagagatccctattttttatatttgtataatwtggtttttctagcatgaaaatgcactttcctctcctcttttgaatcctttccttcgtttaagtcttgatgtcttcatgaagcctttttcattatatcgtggtatcttcttgacctttatactttgtagaacttactgtcttttctaactttatccagtagaaatacagtgcaaggcatggacataattttaaatattccaatagccacatttagaaagtaaaaagaaacagatgaaattaatttaaatatattttctttaattaagcatgaaaatatattatttcaatgtgtaatcaatgtggatataaaaatgttaaatgaaatattttaccttttattactaagtcttcaaattgaactagctacatttcaaatgcttgataataacatgtgtttagtggctaccatattggacagtgaaggtctagttattcatttggcatgtattatatactgactccatacttattttaaactaaagctgaggttggagaggcagatagataactgtcaaactcctgtaaatttccctagttgttttcttctttctctaagtcattatatctcattgctctttttctttgattaaatgcaaaaaagatcagatacattctctgtgttcttagcagtgttggccttttttattgtttccagaattggactactttattttattttcccaggttcacccacttaaataagttttgcttttaatttaaagacataggagcatcccaggaaatgatggaatctagtttccataagtaaacaccttttcagcttaaaaaatctgtaatctgtgcttcatctgaaattttattaatgctgctaagttagccaattaatgtagaatttaaaaatgtttccaagttaaaagagattaatgtaagctatttaaaaataatttccaactcaccattcaccaggtctctgaataatatattgcctgacaaaagaaaaaaggtagtatcaaggatattttattcagttaagttagtgaaaagtgggttagaaatgaaaactaatgtttccatttattataaataagtatgacttaaaagaatcctgttttgagtgttagaagacagatgactcactcctagggaagaggttgccaggcatgtaatagacacctgaaataatatagatagactgaacagattaatgtagaatcctaaactcttaaaagtgtgtccagaattggtgggttcttggtctcgctgacttcaagaatgaagccacggaccctcgcggtgagtgttacagctcttaaggtggcgcgtctggagtttgttccttctgatgttcggatgtgttcggagtttgttccttctggtgggttcgtggtctcgctggctcaggagtgaagctgcagactttcgcggtgagtgttacagctcataaaagcagtgtggacccaaagagtgagcagcagcaagatttattgcaaagagtgaaagaacaaagcttccacagtgtggaaggggacctgagcgggttgccactgctggctcgggcagcctgcttttattctcttatctggccccacccacgtcctgctgattggtagagccgagtggtctgttttgacagggcgtgattggtgcgtttacaatccctgagctagacacaaaggttctccacatccccaccagattagctagatacagagtgtcgacacagaggttctccggggccccaccagaatagctagatacagagtgtcgattggtgcattcacaaaccctgagctagacacagggtgctgactggtgtatttacaaaccttgagctagatacagagggctgattggtgtatttacaatccctgagctagacataaaggttctccacgtccccaccagactcaggagcccagctggcttcacgcagtggatcccgcaccagggctgcaggtggagctgcctgccagtcccggtgccgtgtgcccacactcctcagcccttgggtggttgatgggactgggcaccgtggagcagggggtggcactcgtcagggaggctcgggccacacaggagcccatggagggggtgggaggctcaggcatggcgggctgcaggtcccgagccctgccctgtaggaaggcagctaaggcccgatgagaaatcgagtgcagtgccagcccactgggggacccagtacaccctccgcagctgctggcctgggtgctaagcccctcattgcccggggccggcagggctggccagctgttccgagtgcggggcccaccaagcccacgcccacccagaactccagctggccggcaagcgccgtgcgcagccctggttcccactggcgcctgtccctccacacctccctgcaagctgagggagctggctccggccttggccagcccagaaagggtctcccacagtgtagcagtgggctgaagggctcctcaggtgccgccaaagtgggagcccaggcagaggaggtgccgagagcaagcgagggctgtgaggactgccagcacactgtcacctctcaatcccccctctaaacaggacaccccaactgctgttgggaatttggccgatgaccactctagctacttcctgctggataggggtgaagaaggggccctgcagttgtagtgtccttcagaggggaactctctaggccaggggaagtgccagtgggtcggtccaggggtccttggtagaagttgttagttgaactcatttggggttccatttgtaagaccatctgtagcttgatggcctcgattctagaggaaacaaatttgacaggaaggttaaaaatacagggcccaaaagcgagtaacagcaagatggctgccatgggacctagaaaggggagaagccatgttgcccaactccagagattggtataagaatttgaaaggcgttgtctgatttcagaagccttttcctgtaaacgccgggcggcatctcatactatccccgactggttagtgtgaaaacaacattcttcccctaagaaggtgcagagtcctcctttctcagcagtgaggaggtctaggccttggcgtttttggagagtcactgctgccaaagagtctatttgggattgtaaagtaagaatagattttgttatttcttgcaaactgtctgagaggcagatatgggttgaagatccacataagtagaatatgccttggctaggaagacagaaatttaccctggcttttaaaggaaaagggtacactgttttttctttactacttccatctctttctttctctcttcgacttctttgtctcttcctctctttttaactctctctttgactttctgtgtctgtccctctttctgactccttttctttgtctctgtttctgacaccctctttaacgttctgtctctctgtctcttcctctccctgtctctttctctgactttctctttctctctttccttcttgctggtctttccctacctctgccagccgcttatgctgctgttctcccctctccttcccattttgatggccttggtagtgtaagactcccacctctttgggttcctgcaccatgtgcaataactccataacttccctgtggcatccagcgggggttcccagaggttaggaactcccattctttccatattgcagcatgggcatgtaggattagataagcatacttgttatctgtatacacatttattctttttccctttcccagttctaaggctcgggtaagtgccactagttctgctaactgggcactggtccctgggggaagaggcttgctttcaagtgtggttacatcactatggcgtaacctgcccttcgtatcccattctccacaaatgaacttccgtcggtatataggttaaggtcaggattagttaaggggacttctaagagatcatctcgggcggcataagtctggactataatttgttggcagtcatgctcaattggttccccatcctctgggagaaaagtggcagggttgagggccacgcacgtgcatattttaagcaccagtccctcaaggagtagtgcctggcatctaagaggcggttgtctgatagccataaacttcctttggcacctagtatgccatttacatcatgagtagtccagacagtgagatcctttccttgtattattctgatagcctctgacgctaagacggccgctgctgcaactacccttaaacagtgaggccagccttttgctactacatcaatttccttacttaggtatgccactggttgtgggggttgtcccacgagtctaaggactccaagagctatcttggctctctctgtgatgtataaagagaagttctgtcctgtgggaaggcttaaagctggagcttgtactagagcctgctttaagcttttgaaggctgtttctgcctctggttccctttcaactagatgagtatttgccctctgggtttccttgattagagtatagaggggcctggctatcttgctgtatctggagatccatagtcagcaaaagccagtaattccaaggaatccccgcaactgttttaatgtcttagggtgaggataagccagtataggctgtattcattccttgctgagggccctggtccctttggctaagattaggcttagatatttaacctgctgtaggcaaagctgggccttcgacctagacaccttgtacccttgattagccagaaagttcaagagatccagagtagcctgctggcacgaggcttccaaactggtagccaaaagtaaatcatccacatattgaaggaccagagtgcctggacttgagaagtggcctatagatcttgggccagtgcctgaccaaacagatgagggctatccctaaacccttggggcaagaccatctgtgtaagttgggacgtgtggtctgtgggatcctcaaaagcaaagagaaactgggagtcagagtgcaggggaataaagaagaaggcatccttgaggtccagaaccgtgaaccattctgcttcccctggtatttgagagagcagggtataggggttgggtacaactggatatagaggaattactgcctcattaatgagtctaagatcttgcactagtctccactgactgtttggtttttgtactcctagaactggggtgttgcagggactgctgcatttcctcactaagccttgagcttttaaatgtttaacaatattctataatcctttatgagcttcaggccttaagggatattgcctttgatacggaaaagtggtgggatcttttaacctgatttggactgggcaggcattttttgcccttccaaattgtccttccaatgcccagacttcagggttgattccctcctcaagtaggggacagcaaatgggtaactttttccccatattcatgtagataatagctccagccttggctaatatatccctccttaataagggtgtgggactttcaggaataacaaaaaaggcatgtgaaaagattaaagtctctcaattacaactgaggatgtgggagaaatacctggttataggctgtcccaggattcctcgggtggtaacggaccttgaggacagtcatccaggacaggagattaaccctgagaaggccgcgccagtgtccaggaggaaggcaatttcctggccctcaatagttaaacatacccggggctcagtgagggtgatgacatgagctggcacttgccccgggcaccctcagtcctgttgtcgcatcatctggttgggggcttctgacccagggaaccttcatcctctggggcagtgcaccttccagtgattgcctcagcatagtggacatggacgagggggcagcttgtttctcattggacaatcttttttaaagtgtcctagtaaaccacactgataacaagccctaccaggtgattggcctgctccattttctgtcctctctgaaccaccaaggcttgtttgtctgagggccatgactaaggctgtggcctttctctgatcttgcttttccttttgggcctgttcctcttggtccctattataggacaccgaggttgccaggtttaataatgcctcttgattttgttcagggcccagggcttgcttttggagctttctc

SEQ ID NO: 97784 - DNA, 14417 bp, Homo sapiens
  misc_feature (1)...(14417): n = A,T,C or G
atgttacaagtttaggatgttaattataatccccaaagtaaccagtaagagaataactaaaaatatacagaaaagaaaagaggggactcaaaatagtacactctaaaaattcaactacttaccaaaaaaggaagtaatggagaaattgaggaacaaaaaaataagacacttaaaaaattcaatagctgaaaggcaaagtaaaaccttccttatcagtaataactttaaatgtaaatgaattaagctctggcctaatgagcttatatgtataaaggtttgatttgctttggtttgttgagacagggcctcactctgttgcctaggcttgagtgcagtggcatgattatggttcactacagcctcaacctggctcaaacaatcctcccacctcagcctctcgagtagctgggaccataggcatgcgccaccatgcccagctaatttttgtattttttgtagagatgggtttttgccatgttggtcagtctagtctggaactcctgggctcaagcgatcctctggccttggcctcctagagtgctgggactataggcacaagcctggcctgggattataggcacaatgcctggcctaggtttgttagtattttattgaggatttttgcatcaatattcatgagagatattggcctgttgttttcttttttgatgtgtctttgattttggtatcagggtaatactggccttatagaatgagtttggaaagtctttatttctccttcatgtttaaaggatattttcactggatatactattctaggttaaacatgttttttcttcagcactttaaatatgttatgccattctatcctggcctgtaaggtttccactgaaaagtttgctgctagacatatttccagatatttgaagatatttgagtgttgctatctaagccatatttgcgttaggaataccccaagcccagtaatactgtagtttttgcagactcaaagagataccgccttggtcttagataagatttggaagaattctctggattaccaggccgactcttgttctcttcccttagtttctcctaaacaaatgaagtctctctctctgtgctgagctgcttggggttgggggtggggtgacaccaagcacacctgtggccaccaccactgacgttgtgctgagtcagacctgaagccagcacagcactgggtctcacccaaggcatgtcactgtaaccactacctggctaccatctgtgtttgctcaaggccctacagctctaccatcagcatgtggaaaagtcagccaggcttatatccttccctgcaagcagcaagttttcccaggcaccagatgggcccagagatgctgtctgggagccagggactggagtcaaaaaccttagatatctccctggtgctctattctgttgcggctaagctggcactcaatctatgagacaaagtctttcccattcctccctcccctttccagaggcagaggagccttttactcatgcccatcaccacagacccatgggatgtacagacaggctacctaacaccaatattcacttaaggcccaagggctcttcagtctgcttatggtgaatgctgcccagcctgggactcacgtttcagggcagtgggctcccctctgggccagggcaggtccagaaatgccatctaagcccaggctggaattgggggcccaagagcccacttggtgctctacctcactgtggccgagctggtacctgtggttcaagaaaaagtctcctttacttttccttctgcttttctcaagcagaaggaatctctcactatgaccaccacagttgggaatgtgctgggtctcacctaaagccagcatatctgagtctcacccaaggcccactgtgtactacctgggtattggctgctggttattcagtgcccaagggctcttcagtcagcaggtgatgaatcctaccagcagtgggtccttcccttcaaggcagcaggttcccttctggcccagggcatgtctagaaatgtcatccaagatctagggcctggaataggggcctcatgactctctgcccagcactctatcctactgtggctgaactcgtatccaagtttcaagacaaagtcctctttattcttccctctcctcaagcagaaggaaggagtcgcttttattgctgtgagctgtgttgcctggagttgggaagggtggtgcaagcactctctttgctgtcctggttggtgtctcattaggtcatgttcccccaactaggttgtgcactccccaagtccactggctcttcagcacagcactaggactgcctaggacttgcaatccttgtggcctagactgcctttcagatttatttaggaccccagagcactttagcgagcagaggcaagacttgccaaaactcaacttctaaccactaggatgggtgattcccctttgcctggggatggtctaaatgctccctccatgggcatccactgagttcagcctaattttgctttccactgtgacagagcatgactgggttcccccaagcacacagattatctttctgtgcctcatggccactgccaggggaagggagaggggtggcattggccattcaagaccatctttcctacctggttttaactttgtatcactgaaagaagtactgattggttcagccactgtgagaagcagcttggatatttctcaaagaacttcaaatagaactaccattcaacccagcaatcccataactgggtatatacccaaacaagtgtaaatcattctaccataaagacacgtgcacatgtatgtcatcacagccctattcactatagcaaagacatggaaccaacctagatgcccatcaacggtggacttcataaagaaaatgtggtacatatacaccatggaatactaaaaaagaacaaaatcatgtcctttgcagcaacagagatgaagctggaggccattatcctaaacaaattaacacaggaacagaaaaccaaatactgcatgttctcacttataagtgggaactgaacattgagtacccatggacacaaagaaggcaacaatagatactgggacctactcgacagtgggggtagggaggaagatgaagattcaaaaactacctatctggtactatgttcattacctgggtgatgaaataatctatacaccatacccccacaacacacgatttacccatgtaacaaacctgcatgcgtactccctaaacctaaaataaaagttggaaagaaaaaaaattcaagaagtattaaatacaaagtaatatgccatgaaaagtctccctgtgctatgaatggaataccaagtttactgtattttacattgccatataaaagtgaatctaaacaaagcaaatgaagaacatatgccagagctgagcatggtggctcatgcctataaccccagcattttgggaggccgaggtgggtggatcgcctgagctcagaagtttgagaccagcctgggcaacatggtgaagcctcatatttgtattatctaccaaaaataccaaaaaaaatttagctggcgtggtggcacatgcctgtggtcctagctacatgggaggcagaggtgggaggattgcttgagcctgggaggtgggggttggagtgagccgagatcacaccatttgcactccagcctgggtgacagagtgagaccccatctcaaggaaaaaaaaaaaaaaaaagaacatatgccagaaaggaagtaatccaatgaagtcatgggaatttgaacataataagattctttgtgaaaaaaatggccccaccaaaagatgaaaaatatcaaaaagattagaactaagtgtgtttttgtaatactcaggaaaggagtaaaaaagaaaagtagaataattacagagaataaaagcagtactattctggtgatggcttgtattggctagggagagctaatggttagattttcatgaattatgtgagttagttttaaaatacagtcattattaaaaaataaactacgtatttgcaattgaatgaactatgttaaaattatactacaacagattttattgtttctttctaggaagatcagtgtactgtacactgaagcttgttaaataaaaaaaattcaatctgataaaaaagcaattcttggctgggcaccctgtaatcccagttgagatcgcgccactgcactccagcctgggcaacagagcgagaccctgtctcaaaaaaaaaaaaaaaaaaaaaagcaatgctgctatcacattattattattattatnnnnnnnnnnnnnnnnnnnnnnnnnnnnnnnnnnnnnnnnnnnnnnnnnnnnnnnnnnnnnnnnnnnnnnnnnnnnnnnnnnnnnnnnnnnnnnnnnnnnnnnnnnnnnnnnnnnnnnnnnnnnnnnnaatctcggctcactgcaagctctgccttctgggttcaccccattctcctgcttcagcctcccgagtagctgggactacaggcgcccgccactacgcctggctaatttttttgtatttttagtagagacagggtttcaccatgttagccaggatggtctcaatctcctgacctcgtgatccacccatctcggcctcccaaagtgctgggattacaggtgtgagccaccgcgcccggccatatcacattctgatgtatgtcctatgcaagaatatctgtggtatatacatagtagtagaattgctggaacatggggtatgccagtgtttagctttgtgagataatgccaaactgttttccagagtagtcatagctattttttctttcatcagcagtggaagagcattcctcattgccttgcatccttggcaatggttgatgttatcaaactttaaaagttttgccagtttagtggtgtgaaatgttatttcacaatgatttgaatgtacatttccttgattacaaatgaggttgaacatctttgtatgttaggggcttatgcttcttacttctgtgaaattcttactcacttctgtttcctttttttttttcttctttttttttcttttagagatgaggtctcactctgttgcccaagctggagtgcagtggtgcagtcatagctcactgtaaccccagactcctgggctcaggtgatcctcctgcctcagcctcctgagtagctaaaaaaatatattttttttggtagagacagggtctcactgtgtttccaggctggtctcaaactcctgagctgaagaaatcctcctgccttggcttcccaaagtgctgagattacaggcatgagccaccacacccagccttgtcttttcctttttgatctatgggaattctttacatattctagatgctaataatttgccaactaaatgtattgtgaagatcttcttagtaagtaattggatgtgggaggagaggaagaagtagtatagaattactcccaggtttctggtttgggaaactgattggatgatggtgcaattaaactaggacatagaatagaggaggagaaacagatctcagggagaggagaattagtttattttggagtttaaactaaagttcctataggatattcaagtggacatgtcttagagaaatttggccatagggctggatgtggtggcttgcacctgtaatcccagcttctctggaggctgaggtcagaggattacttgagcccaggagttcgaggctgcagtgagctatgattgcaccactgcactccggcttgggtgacagaggaagaccctgtgtctaaaaaaataagagattaaaaaaaaaagaaatttggctatagggatttggagattaggccaagctctgttatgctacattagttctgtaggatcttatatgatgggcctttcaggagattacagttggaaggagagagagtggtaattctctaactcatttgtcttctgcccatgccaccttcttctccaggccatagatttctccaatctaagtttcttatgaaataaatatcccaaccaagtgacacacaaggcacttcatcttagttataattactttattaaccttttgrtctttcaacatttagatagtctttcttaatatttccaggagagtacctcatttttattttgaaaaccattcagcacatttatcttatgtaacatgcagagcatatatctatctgtatttttaaaattttcctgttactcattgatacatagtacttaattacatgttattccatgtacactgaaaacaatataggaaatatatacatctaagacttctactttgtacagtctttcattaaataagaatacttacacatacattttcagatatttctaccttcctgtatgtgtttggaattgtatgtaggtagccactgaaagaatttgggccccttgggaggatggcagtggaagtccatgaagtaaagagcattcyttaaaaagcagatttgattgcataccttttagttatttgagattctgagaattctgataaaccccaaagcagaaagattccttatacccttggaagatgggaaaggtgagggaaatatttgaagcagggtcagaacatccactaagaacatagcacctcagtagagcttacattatagtgccagggtagagttattactgaatagcttaggatgatgaacattaaccttcctacaggagtagtagcagctgatttggtgaccatsattggtcaccttttagtgtaactgcaaactaagaacaattatggcttgacatatactccatgtagggaagtgatgggagaggcagcctctgtgtggtccatccttggaagcactgcatcgattttgctcccctctggttttaaggagatcttttagacctgtaagaagagaaaggggatataaaagtgtgatastctgactctggcttcagattgggttgtgtttggaaagtaccgagttcatagaatagataactgagctttcctgctgctatgcattcrttatggattayaggggttgcttttttcaaccatgaaagacttggggaaaatgttgtcagttttgcttagatmgttatagctgtacttcaaggttgactggtaatcagggtaacttctgatacttatcacacaagatgktgcctcagcatttaaataaatggaggtaggggagggcgtggtggtaacatacttttaaaccagcgattgcacagcaaaccacaatgcaagtatttctgactcccaagattgccgtttcctaaagagcaattcttctgcaggcaacagcaaacctacctttccttgctaactgctttcagtaaattcttgatggccttcgattctggattcagacatctcttctcacccttctttttcattgtagcactgtagaaataaatagggatgaaaatatttaaaactgtgttgggtcaataaaacagatggcatacgcarttctgaagtcagacatttaagtttcactctgcatgtttttgtttgctgtacattagttttagaatcatcacaaaccctttactgatctttttttattatcattacatatttaatacagtatataattacaaccaggggaagtgataatcagatgggatttcactcacatgatctcaacacgtggacaaaattggcttgcaggaataatttcaagtttttctaaagaccttggattaacaggttgattactaatgctgatgcaggtacagcgtacagttctagagagaggtactcctgtaggaaaagaggaacagcagagaaggttagcacagtgttcattttaggcatttaatgtagactggtggtatttagcagaacctatatccccatatcagcaaatagtcacttaatctgaggaggaatggatcacatcataacacaactgtaaatgattaaagagttgattatctggaagaaaagaattgcagcttgttgattataaagtcaaacccttaagcacagttcatgtggttcattgagcttagttaggtaaggaagtatctgtatctcatctctgtccgcattccctcacattttctctctctatcctccctcttccccatctcttctgtcctccttccctttttccttctctttctcttattctatttgtttctctcacttcaattcatataagttttrtgatctgagggaatctctatttatttccctcttatttataagcatgcagtgaaacttttacaaatacattatttctgtatttttagaatttatacctattcctatttctcatyttacaaattaagtatcctttgatgttccttaccttgaatgccacttagagtcagaaagataaggcagcaaatcagaatsgcagtttgattcatggtgctgagactggaggttcctctgctgtaggctcagaatatgtctaagcaattgaggaatgtctcagaaaacgtggggctagtgtgccatatttatctgcaaagccattttccctccctaattctgattggataagggcattacagttgacttagcaaaacctgctggctgttcctggggaagtcccatgttgcagactcgaaggtattatttattgtagcctccaagttacggaatttccctctgctcctctttttttggtaatagtgaattaggtttcactttccaaaacatgaactgtttcttgaaaaaaagaacttcattgcatatagaaaaaaacaaaggttgcaatccattctaactataatgctttttctcaacacttaaacttttacagttactttcagaggttatttttcaaaatatccccagtaatagaaatttttcatcctttataggtaaacctaattttttggtaacagcaagttgtgcctgattattagaacagtgatttacctggacagtcctccttgatcaaatactataaagtaataggactggcctgctttgacagggtcaaagatctggaactggcaagttttaaataattcaataaatgctttgatcattcataacaccattagattaagtaaatagcctccaacataactattttgagggaaaacattgctcatttgggtatctgatttgtggtgtgttaaaacaagtttcacgtcttatagcagtccctgaatgaaaacatcataagatggtatctagaatggtgtgagaaaaggattcatagctatcctagggttattgtaaaaaacaaagggtgctttttgaggaaatgaatttaaaagcgggggggcacgcatagagacagaccttgggaaagtagcttgagacagaagggaaacaggttgatttacgatggggttcagctccaagacactgttaaatgcaaagaaaaagaaaaaaaaagtgttggccattgagctagtaacagtgataactgaaattggcacaattttaactggatgatgaatcgtggcaaaacttaatttcacagcattcaatagtacttgactgattattcgtagtagctagcagtagaaagcacatgatactcatataatggaacacatgttgaacctgagagtggaaatttagcagtatccatggatatagtggtccttggttgtgttctttgcaaatgattagtaacagggaatccaagatgaaatactgtttcaaaggcaggcaccaccctgcaatgagagatctgaggcaagtgatatttagaacctaggaaaatatatgggagttcttttcatagtcagctgggctgcaacaatgcagggattggtcagggaatggaaaagcttccatcctgggatcaggctactgtaccaggcagatactgtctcagaacctggtatcaggggccaagaataaagcctgtatctgcaaactgggtgcacataaaacttggatcctcaaatgtaggaactccatcattaaagcagagagtgagttgcttggggtaaatgcaatttgctagagagctgaatcccatgttaatctgttctaggaactggaatagagctaagctttcaagtgaataagtcagtggaattagctgtgggaaaccggaaaggcaaaagagagggaggtgaggtagagactgacagaacccaaaagactttcacctagcaaagaggcgttcgttctgatgagggaaagtcttatgagaaatagtgacatggagggatccttccatacctatttgtgcagaacaaacattttactgtgaatagaatgccaacaaatttcagagaaatgtctgacatcatgaatggaagaggcctagaaaagttcaacattaaacaatcaaaatgagagatggtgacagttttattttagttggtatctaagttgtcagctaaaatgtctctatatagaagacaatgtaaaaaggatatacttgataaatggactaaaaatctgttattagggataaaatatttgatttttactaaacattgtattacattaactgtgtgccaggcattgtttgaactgctttgtgactattgaccatattgactcattttattcttataataacttctacctctgacccagccactcttctatttttttcaccatagattatttttgcctgttctagaacttcatataaatggaaccacttgagtatatactcttttgtgcaagacatcttttgctcagtataatgtttcttagattcatcgatgtagttgcatgaattagtaatttgtttctctttattgatgggtagtaatccattgcacaaacatatcagtttgtttcttgttgatggacaccttgactgtgttcagattttagttattatatataaagctgctacgaagatttttttataattttttttctgggcatatgctttcattttgtggggtacatatgtagcagtggaacatgatcacttactttttttatttaaaaaacgtaagtgatcacgtcactcttctgcttaagacctcaaacaacttccagttagaataaaatccaaatttctaattaagctgctttactaaatcctctatgatctggctgctacctatttgtccaacctcatatcattccttctcaaccactacaatccagtcagtggcccatacactggcagttttctccatctggtatgcttttcctcctgttcgtcacatagagagttccttctggacatttaaattttagctggcttgtaccttctcttgtcacacaatctgaagcagacatgactttaattctctacatggcatttcatactatctgatattcagttcattcattttttttaattagtgtaatgtctgtttctccatgctaaaatgtatgccccaggagaacagggaactaaaatgcatatgagaggcatttggtaaatattggatagaaggatggttgaatgaatctttacagactttaagtgacagcataccaggattgtatttcaagaagtatttccatttgttcatcagatttctgaatctggacatgagtattattgttttccttagctttaagaaccaagtttaatttaagaagactataatttccccagaagttagtttagatttaagtaggtaaaatcaatacagatattctcagctagctataggacagactcttcattccggaactctggtaaatatagagtggtacccctaaaagcttcttagttatttgctgttttttatctgtaattaagcattgaatgaatgaatgcaggaatgcaaatatcctcagtgcatatcatgtatatggccatggatggtgttagaagaaggaggagaagtaggcttgttctcattattttctgtgcactttgtgtagggaactaagctaatctcagggaatactagaagggttaagatccaatatttatccttgatgggtttacattctaattgggaagaccagaaactatgaaacaataaatatcaataagagaaactttatgggccgggcaaggtggctcatgcctgtaatcccagcactttgggaggcccaggcgggtggatcaccttaggtcaggagttctagaacagcctggccaacatcgtgaaaccctgtctctactaaaaatacaaaaaattggctgggcgtggtggtgggcgactgtaatcccagctacacgggaggctgaggcaggagaatcacttgaaccctggagacggaggttgcagtgagccgagatcacgccattgcactctagcctgggcaacgagagcgaaactccgtttcaaaaaaaagaaaagaaaaaaagaaactttatgatcagtaccaaatgagtggtatagaaaataaataatgtggaggttcataggagactgtactcattaaggtcagaagttttcagaagatccttcagaaaaaaagacctcagatgagccataaagtgtgaatgttacttaaataagtggccaggagaggaaagcttgtgcaattacagataaatgtcatcaaaaaatggtaaagggggaagccaaccaaccagtcaggaagattggtagactcataggggtgataatgccgtgttaggattctataaaatctggtcctcagtttttccagtccagaaattctcattttttcctaatcatccagggtaagcatattcctcagagagttaactgtgctaaccaaatctaaaacagaccaagatgaaaattaaaagacagtgtatccatttacaatgagaaccttttcagtgactaggatgattggttttggtatccaagtcacccctttcccaagatcagattgcctaggaaattgaattagtatcagaacagtacctggtgagcagagtcaaacgaaggacccttctcttcttgttttaaatgagggttctgctcagggtagaaacctgacaaatgtgatcaacatggaaaatcatttagaaaaaaaaacttttagagacagtagcaagcccactattacttatttcacccaaagccaagactgcatgtgtcatttgaataaaaatctaaatgataactctttttatatatttctctcaatttttgcaacgtttatggtataatcacgttcctagaattcactgatctgagtataattttgaaagaaaatgaaagttaaggaagtatcccgctttagtttccgtttcagtcgctattgatttatctttaagcctgtgattatggcatcaggccaaaaaagacaacaatgaaaaaaggaacagtctgccctgacaaactaatgagcacagacgaaggcaaaaatgctttcccggaaactgttatgcttagaagaaattttctaaaaagtgagcaggaggacatcagtgatttctgtggactgggaatcccctcagctggtgcagaatatgccttggaaagtatgggagagcagggcaaagcttccccttcacagttttcactctgagctctcaaaagattccccgagctcacagtgtttggtaatactggttacatacttttcaattacccatgtgtctcatccttcatagccagcctaagcagagggcaaactgagtgctggcaaagtgggtggtagaccctaacaatcatcatggcattggagaaggcagaggctcagaatagcttctgtttggatacattttaggctatgcagtgtttctgaactcgtgcacttgagaggacttttacaaatatggcagatttcatcatttggaggaagagacaaaattggaggacattataataaagtaaatgtgtttgggggaagtatggtgcatttctttctccttcccataaataagatatttcaacaaaataaattagaattttgtgatactttgttccatttttaatcaaaatctttagaaaatgtctagttttaattttaattgattcatcattggttgtcttttcttttgagaagaggaatcttgagatatgatatagttcagtagtgcctgttattccatattttagattatcattcagttttcttcaacttcttattgacagtttgtctttgtgaacaatttgaagaagaatgctaagtcaggatttattatatagagtctataattcacgttagggcatttccaatttagtagcagtttattgagcagcactaaggaactatgaatacatctgtacttatggtgccaggatttttaggacgtattcttcttaggtacttaagtgaaactatggtttcagtgttatgtgataatctcagacttgctcaatttcattaccagtgtctggttaataaaatttgcagacaaggcaagaagaagcaactaaaattgcctcattcaccccttctccaaaaaaaaccctaacagttttttttgtgtgtgtactacttataatccacagaatgtgctgaccatatcataaagatttataattgttggctatgaaaatcttttcagaaatagatacaaagaggtatattaattccatgtgggcatattaggtcctgtactcagtagccaaaaataattaagtataatctttccttttctaatagcattatccaaaactactccatttgtttgaaagctcttct

SEQ ID NO: 97785 - DNA, 45855 bp, Homo sapiens
  misc_feature (1)...(45855): n = A,T,C or G
cactccactgttagcaatgattaaaaaaaaaaaacaaaaaactcttgacaatcgtccaaactgcctcttggggcagtaatgcccccctgagaaccactggtctgtggtaacatacagtcatgcattgcttaacgatggggatatgttctgattaatgtgttaagtgattttgtcgttgtgcaaacatcatagtgtgtacttacccaaccctagatggtataccctgctacacatgtaggctacatggtatagcctactgctcctaggctataaacctttacagcatgttattttgttgagtactgtaggcagcggtaacacaatggtaagtatttgtgtatctaaacatagaaaagttatggtaaaaatataaaagataaaaaatggtacaggtgtatagggcacttaacatgaatggagcttgtaggcccagaagttgctctgggtggtgttgagcggatgtgaaggcctgggacactactgtacactcctgtagactttatacatactatacagaggctacactaaattcataacaaattttccttcttcaatagtaaattaaccgtagcttaatgtaactgttttactttataaacttaattttaatctgactcttttgtaataacacttagcttaaaacacacattgtacagtagtacaaaaatattttttctttatatcctattctataaagcttttttatcaccttttttttaactttttaaacttttgttaacaactaagacacaaacatttacattagcctaggcctatacagggtcaggatcatcaatatcactgtcttgcacctccacatcttgttccactggaaggtcttcaggggtagtaacgtgcatggaactgtcacctcctatgataatgccttctggagtagctcctgaaggacctgcctcaggctgttttatagttaacgttttttaataagttgaaggagtacagtctaaaataatgattaaaagtatagtaagtacataaaacagtaacatagttgtttattatcaaatgttatgtattatatataattgtatgtgctatacagttatacaactggcagtgcagtaggtttatttacaccatcatcaccccaaacacgtaatatgttacaacggcaacgatgttgctaggcagtaggaaattttcagctctattataattataatcttatgggatctctgtcatacatgtggtctgtcattgatggaaacatcattatgcgttgcacgactgtactaatgcatgtgtgcatctgcctatccatttctctgtgtgtatacatccaactgcatgtttataactatggcaagtacattgataatatgaaggcttttacaaatctgactggctatttttcttggttttatttatgaaatctgagtggtgatcccatttggatacttccagtcaacgcttccccgtagttcaaacaaaaagagtttaggtcagcatgaaacagtttatcctgtggatggactccactgctcctctccactagttcaaatgaaagggaaagagtttctccagcagtgtatgtatggagggaaaaacatttatttttttttatcatcttgcagagattagtgtttaaaaaacaatgcagctatagttagccctctgtatcctctgggattcaaccaactgtggatcgaaaatatttgtgggaaaaaataatacaaatttaaaaacccatacagtacaacaactacttgcatatcatttacattgtattaggtattataagaaatctagagatagtataaggtatacaggaggatgtgtgtaggtatatgcaaatactgtgtatgctattttatttatttatgtatgctattttatataagggacttgagcatctgtggattttggtatcctcaggggttctagaaccagtccccaaaggatactgagggatgactgtatatccagttgtatgttggtggttatcttgtttgaaatagaagacacacagagttaaactttaccttgcatgtatatacagaaaatggaaatagaaaaattgctaaaaaaaatgctagagaacttgaacaacagaaaatcattatattggctatatagaaatgtaaaagcatgtgaaatcctacataaaacctagcgtagcagatcttgatgatatatagtcgacccttgaacaacacaggtttgaactgcatgggtccacttatacatggattttttttaaataaatatattggaaatatttttggatatttgcatcaatttgaagaaacttgcagacaaactgcatgacctagaaatatatatatatataaaaagaaagtatgtcatgaatgcataaaatatatgtagatgctagtctatttttatcatttactaccataaaacatacacaaatctattgtaaaacgttagtatttatccaaatttgtgcacacagaccatatgtggcaccattcaaaatcaaaagaaacgtaaatgtaaagatgcggtattaaaacttaactgcataaaattaactataatacatactgtatcattgtaatcatttcatggccacctcctgttgctattgcagtgagttcaaatgtttcgagtatcctcttaaaacaccatgtgttgctaaacatctctgaggagttcatctccagtaaattgcacatcacagcaaaaagtgatctctcacagttctcctgtattttttgtcatgtttggtgcaataccaaaaaccttgaataacaccataggactcaaaggaagtgccactagtgaggccggaagtctcacaagcagagagaagccatgacattacaagaaaaagttgaattgcttgatatatagattcaggtctgcagctgcagttgccagccatttcagacagataattcatcttataaacagatgatgtaaactttgggtattagtaaatacagtacagtactgtaaatgtgttttctcttccttatgattttaatattttttctctattttattgtaaaaatacagtttatttatttatttatttatttgagctggagtcttgctctatcacccaggatggagtgcagtggtgcaatctctgctcactgcaagctctgcctcccaggttcacaccattctcctgcctcagcctcctgagtagcggggactacaggcgcccgccaccacgcccggctaattctgtatatttagtagagacggggttttgccgtgttagccaggatggtctcgatctcctgacctcatgatgtgcctgcctccgcctcccacagtgctgggattacaggcgtgagccaccacgcccagccaaaatacagtatataatacatttacaaaatatgtgctaatcaattatttttatctttttaaaaatagagatggggtctcgctatgttgcccaggctcaaactcctggtctcaagtggtcctcctgccttggcctcctaaaatgctggaattacaggtgtgagccaccatgccccaaccagaatacagtatataatacatataacatataaaatatgttaatcaacaatttctattatcagtaaggcttccagttaatggtaggctattagtagttaagtttttgggaatcaggttacatgtaggttttcattgtgtgggggttggcaccccaacacccgtattaagggtcaactgtatatggaaatatagcctgaaatctgtaatgaattacacttatttgaaaattgcttttggctggaagtatttcaggtaagtttctacttcaactttagtgtcattgtttacatattcaggatatattttataggtggatgatacttgacataaaaaatgatgtgtcagtgactgtgtattcttgttaacagctccaggtccagttcctgttccaggtcccaaaagccatccttctgcatccttgggcaaactgctgcttccacagtttgggatggtcatcattttaatcagtgtttctgctataaatctctttgttgctctgtagtttgatgcattgtttatctttcttattctttacttgaaataactatagggatacacaggagatcaaaaggaatgatgtattttttacgtgttggccaaagtcactggataaaatgagaattgtatatttgttattcattttgcaaattcagaaagttggtccagatatatgtcacagaacttttcacttgtatactactcttacaatggaaaaaaatcccgaaaactgtatacttctgattaaattcaataaaagattttgattagatatttcagaattgccagtatgctcaatactgttagtgtttaacatcaatttaatatctgaattagaactttaaggatagtctactcatctctttgtcttagtctgtttgggttgctgtaacagaccactgtagactaggtaacttgtaagcaacatttatttatttctcacagttccagaggctgggaagtccaagatcaaggtgccagcagacttagtttctggtgagtgtcctcttccttgtcctttcctcaccatctcacatggcagaagggacaagagagatagagcactaatcccattcatgaaggctccaccctcatcatgacctcccaaaagccatacctcctaaaatcaccatattgagtgttaggatttcaagatgaattttttgagaacacaaactactcagtctataacacttgcttcgataactgagtctagttatctcaccagttatatgctcaaggaccacaggcctgccttatatatgcagtcaccagtgggacagaaacccaacaggatgactgggcctgcctttttaaaaggctgaccttaggccctgtctggtatatttatctggttgaactagcaaccagcaatattagaacatgaaaaatcaaaggctagagaagcgaccatggtatgcatgatcagtgatccatccactagattatatagctcagtgagtaacaattctcatcaattagaccaacaactcttcctactataagggggtgtgcagagggacaaaaactcctatacttggctacatgggtaagaatgatggacatgcagatcttctgggccacggagaaaatgtggacaaggcaagaaattcctgtcccaacactgttggtattgcaatataatgggtaggaaagaatgatgagagggtagtagagtagtgtaacaaatttacacaccataaacttggcaaaagtagctgcatacttctggcagtcaatttggaaagaaacaatcagttttaaagttcctagtcttggccaggcatggaggttcaggcctgtaatcctagcactttggcaggccaaggtaggaggattgctggagtctaggagttcaagaccagcctgggcaacataacaagaccccatctctacacaaaataaaaaataatagccagttgtggtggtgcatgcctgtagtcccagctactcaagagtctgaggtgggaggactgcttaaacccaggaggtcaaggctgcagtgagtcgtgattgtgccactgtaccccagcctgggtgacagagagacttgtctcaaaaaaaaaaaaaaaaaaaaaaacccacaaaaaatcctagtctacacaactgtaacctatacaactgaggagaaatctcttcagtggattctcagaggatggactccagatagatatacagtgcatcacactcttcaccatccccatagtaaatacaatagcaagattcatgggcctgtttcttctaacacctgtcaatacaagccaaagcatcacagagaagtgcaaagttaaagcatctcaaaagcggccaacatgatgcagcccaaatatagtgtagtcagaaatactgtttaaaatgatccactggttaaagacccactatttaacactacttaatctgtttaactcagattttctagtatttcgaatactaatgacatattagggaattcttaatactagatgatatctgaagtaagttttacttgccataccctaatcaaaatataacagcactgacaaaaatccctaggaggcaaaaataagacwtaagactaaaattcctgacttgtgattatgaatttagtacctatgtggacaaaaaatggtcattcctcaaaagccaaataaagcaccagacagaattatataaaagtaattacaaattaagaatttatttataagttttcatctttttaraaataaaaaggcttaaaaaacaaaatggwtgcaaaaatggttaagtarttttgttatatcctaattgcttaggtgtgctctgtaaattccaaataagtaaaataatataaaaatacattttcatatctttatagaacaaaaacaaaacattaaatgcttttggattttctttactcctcccacagatgagttcacaaatacaaaaactggtgtacatttatactcaagtacaaatctccaacagccaagtaattayagtttsttctgttatgtgcaaagtagattatttcatatttacttggtatggaaagcagagtacaggctcaatggacaataatcattaaacacagattatgtttaagaaaatgctgttgtaaaaatgtacaatagtacatacaattttggtaattatgcacttcttttaaagtaaatacagcttttagatataaatctttcaaaggttttctttgaagagctgtgaggtgactatttcagatttgatraacagtaatttgtcagtaaacttctcaaaaaaccaatccaagaaagaattgttttctttttccctccatgtggtcggtttcattcttaaggaaggtctgatgcagtaagaagatgcatttcacaaacctttacacaagtttgtgaactgtcaactaaagacaccacctctgatgtggatggtttcattcaatccatgttcgaccagctttatatcttctagatcgtctttaatgatgctaatcaaatggctaaggccttcctgttgttgtttcaaatgctagaacaaattaagaaacaacatattaatgtattaatttcttaaaactgcaagctagtcacaggaaaaaagactccactttgactattttactagcaacacagtacctagtaagtgctctaaatatagagggcatgcatatttaaacatttgtactacatcttttgctaacagtgaaagacaaactctaaagaacaataaaatcaaacaaatatataatgaacaatatcttccaacaaaaatgttttttagatagctattccttttaccaacttttgataaaggcatgataataaaacagaactcaaaggaggtattcaaatatagatgactagcaaaataacattctgaaaactgagaataktcatgttttgaagtacaaagtacatagtgataayggtggtgatgactacagatgctaacatttttttaagactcctcctcatgggttaaggtgctgttttaacagtactggtattcactcacttaactcatttaaaatccttttgagccccctttggggtaccattatcatctcgacagttaaagaaactacaggtaaataacctgcccaaggtcataaagtagatggtgaaccatgattcaatcccaaaacaatacactgctcataattttaaaaaagacaggtgtttaaattattcccagttttattgcatatatcaactctatttaatacaactatttatttcaatatactggaacctgttaatttattgcaaatacttaaaacaatggaatataattggttatgtgtgtaatatccaagaacctggaagccaaagtagtttttggttgcataaaaccagccatatccattctaacataataaaattggatttgttgatgacatttataatctttatctaaaatcctcagggccatgccaacagtcattagctacctagtatgttccacaaagttcatcatcttcatatattttctttagatacaactgttcattttcattaaaccaatctgcatttatactaatgaaaataagccaaagcagtgtttcccaactttttcacacaatgtgaaaaccctagaaaagtggttggaggttctggccacctcaacctacctccatccagatctcctgagagcttaggggacagatcaataaccaaatgtttataacttacatgcgacatataggcagggaaggtattatctagagcagttgcttctcaaactttaaagtgcatacaaatcattctatgatcttgataaaatgcagattgagtacgtctggagtaaggactgaaattttgcatttctaatgaccttccaggtgcggctactacctacactttaaggagcaaggtctaggaaactttagtgtctctactacctctaaattcatctttttggcgaggagagggataattcacttttttaaacagtggcaaaacaggcataccataaaattttgcctgtaactatttttaagtatacagttcagtggcattaggtacatttatgctgttgtgcaataatcaacactatccactttgtttagaacttttcatcttctcaagttgaaattctgtaccagttaagttcctcccatcccctcctcccctcacaccctggcaaccacctttctactctctattaattggactactaggtacttttcataagtgaaatcataaatatttcccttttatgagtggcttatttcatgaagcataacttcttcaaggtcaaattgcattgtagcatgtgtcagaatttcattcttttttcaaggctgaataatattccattgtgtgtmtatatactacattttgtttctctattctttgattgattcttgggttatctccacattttgactattgtgaataaagatgctatgaacatgggtgtacaaatatgttttgagtccctgcttccaaygtacttgggtatatatccagaagtagacctgctagatcatatcgtaattctatctttaattttttgagtaaacactacactgttttccatasaggctgaaccattttacattcccccaacagtgcaagaaagttccaatttctccacattctcactaacacttttcttattaggataatagccatcctaataggtgtgaagtggtgagctcacactttaaataatgcagcctcatgcaacacttacctgcttgatttctcgtaacagatctgcatctatgtaatacctttcttcagatctgactgctccaaaatgattctgcatcctgatttgagacatcaattcatttagtcggccctaaaagttaagactgagtcaaattacaactgccgacgaagacttgwaaaagacaatgttttcttctgaaaggatggtttcaaaaccatctattaaaaatttctatttctctctctgtacattatattygaaacactaatactagccaaaagaaccatgactgagtttactttagaaaggaagttctaattggagataagaaacacaagtatacaaaattcctgcttgaagattacataactttttstctgcagatccacctgaawcaaattttagaattatggtcttagaagtggttaccttgaactgagtaggtgcatttagttcaccctgaatcgtatccagctgaactcgcaactgctcttcatcagcctgaatggcataaccactcttcctttgaatttcctgtttgattaggacctatrcaaataaaaaccaccaataacaacagaatcatctctttttagttatgcaagtagtagtagtacaattagttactgaaagaaatcagctgaaaatcaaacaacagtagggttcaacagttcaggatttgaattatgtttctgtccattttaactaggcaaaagttatcacataaatacaatgatatagacttaattgttttttttgagacagggtcttgctctgtctcccaggctgaagtgcagtggcgtaaacacagctcactccttgacctctgtggctcaagtgatcctcctgcctcagctcctgagtagctgggaccacaggtgtgcaccaccgcacctggttacattttttaatttttttgtggcggggtggggggggtgtctcactatgtggcccaggctggtcttgaactcctgggcttaattaagtgatcctccagccttggcctcccagagtgctgggtttacaggtgtgagccactttgccaagccaacaattttaaaactatggtatggcttggccgggcgcggtggctcacacctgtaatcccagcactttgggaggacaaggcgggtggatcaagaggtcaggagattgagaccatcctggctaacatgatgaaaccccgtctctactaaaaatacaaaaaattagccggacgttgatggtgcacgcctgtagtcccagctactcgggaggctgaggcaggagaatggcggaaaacccgggaggcagagcttgcagtgagcctagatcgcgccactgcactccagcctgggcaacagagcgagactctgtctcaaaaaacagacaaacawaaactatggtatggcttaaaagcagtacaaaaaaatagacaacataataccagtttcagacatttactcacagcctttccaaataaagtgttctttaaagatgagtttataatatttaggtctaaaaattatttcttggattttttttgagattacaaaagcaaaatgtacttgttaagaaacaatacgagaatgtaaaagacaaattttctctcatacccccaagacaaatagtgctaactgatgttcattcccctgtacctttctccttrctcatcatacagagagagcacacacacacagatccaaaataaaactaaactgtatatatcactctgtgacatggttcctttttttggttgttgtttttgtttttctgagacgaccttgctttcttgcccaggctggagggcagctcaatgcagcatcgatctcctaggctcaagcaatcctcccacctcagcctcccaagtagctggaattacaggtgctcaccaccatgcctggctaattttttttcttttttttttttttagtagagatgaggtctcccgatgttgcccaggctggtctcaaactcctaaactcaaatgatccttctgcctcggcctcttaaagtgctgggattacaggcgtgggccactgtgccaggccgcttctctttctttccaatttaacaatgcatcgggggaaagggtctaaagcagtggcctctaaaggcagactcttggtttgctgctactctccaagcccagcttactctgttaaaaacagtgcaaatccttccatactctcatccatgctcctataaccatatctttttcataaacacacacatagaccgactgctttttactcatctaagtttttaaaaatggattatataaaattaacaaaattttattatcaatattaaccattaaattttataattaaaataattttattatcaaaatctcatgaaatgccttaagaagtatagctctaatttgttatttttaatggctgtatgctttttaaatgttattaaccaataatcaataattattgtcttgatggatatacattttgtttttacactacaatgccataataaacatttttgtagctttgactctataaacaatgctgtaataaattttgtagctttgacactayaatgctataataaacattttggtgcatatatctatttaactggtatagatctttaacaatgaggctgagttttaaagtatgtacgttttcagttctaaagctgctagattgctttttcaaaatatcctaatgatttagattcataggccacacatcagaataccctttccccacattcctgtcaagaacaggtggtggttgtttaaatttttcccaaccgcatgagtgtaaagggatctctttttttttttttttttttccccagatggagttgcactctgtcacccaagctggagtgcagtgccgtgatcttggctcacggcaacctccacctcccaggttcaagcaattctctgcctcagcctcccaagtagctgggattacaggcacctgccaccatgcccagctaatttttgtatttttagtagagtcggggtttcaccatcttcgccaggctggtcttgaactcctgacctcgtgatccacccrcctcggcctcccagagtgctgggattacaggcgtgagccactgcgcccggccaggatctcattttttttctttaatctgcaattcccagattcctagtaaattaaagggaccatcttttaatgactaagaactattttgcatttgctttttctatgaactgcctttacacatcttttgcccaaatttcaattgggttttactgtcaaattataggatctctttgtataatatgaatatgaacactaaatctaaaatgaatgctgtttgcaaaatttccttttcctaaactctatcacatgactattgacaaatggcttctggtatcttttgctacacaattttttatgtggccaatgttggtttatagtttctagctttttgatcaatgtctctcaaatcccaggctgtacatacagctttgaaagtttcttaaagtctttagtccactttatttttatacaatgcaatggtctaattttcttttcttccttatggatagttatactccagcattatttattaaataaacccactgaattgaaataccacctttctcatatattaaattttcagcacacttgcatctatttgtaaattccctactctgttccatgcattgttctgtccaatcccatgcagacactatattgattcaattataagaggtttaaaataggttctgaaatctggtaaagaagtccccttcactatttcttttttgttcctgaacaagctagtctcaaacacttatccttctttataaacttaaagaaattttaatcaaaatttttttagagacagggtctccctatgttgcccaggcaacagagtgcagtggctattcataggcacaatcatagctcactagagcctcaaactcctgggctcaggtgcttctcctgcctcagccttctgagtagctgtgactataggtgccatgtcatcacacccagcttaatctatttttaaaaagctgtaattcatttttaattttgtaaagtgggtattaagtattctcatctaagaatatagtttatctatttgtaaatacctatactttcctcagaaatatattcctattttacagttttgtcaccatagtgaatggaacattttcctatttccagatagtaaaaaggaaagttgatttttgtacttttatatctagccagcttactacattaattctatggtttattcccttgggttttccagatatacaatcatatcagcaaaaatagatcacttaatcatcttcccaatgtttatattatttctttgcttgttttatttatgaaaacctccaagatagcaacaaataatgatgataatattgggtgtccgttgtctagtttctaaatgcgattttagtgttttgccttttggagtatttgctattcatttttggttacagttyctattatatattttcctttaatgtgttgctataataagtcatgttgatagatgtcctgttattaaaaccaaccttgcattcctgaaataaactttacttggtcatagtatattttttaagaaattgataaatagctggattctctttgcttatacttcatttagaatgtggttttttggtccgatttgaggtatactctacatatgacaattcacctgttttaggtgttcagttctatgaatctggcaaatacatacagtcgtgtaaccaccacagtgattaagatacagaatatttccatcaccccaagccccttgtagtcacacttctctcttcatctacagtccctggcaactactaatctgttatctgtccctaattttcttttgtataatgttatataaatagaatcatgccttacacagcctttaagtctggcttttttcacttagcataatttgcatctctttaaaatagctgtttataatttctttttttgagatgctacaaacagaaatgtaaaatggtacagttgctttggaaaacagtttacgtagttcctcaaaaagttaaacatagtgtgcatatgacacagcaatttcactcctaggtttatacccaagagaaatagaagtatatgtccaaacaaacacttgtaaataaattttaatagcaatattattcataayagccaaaraggagaaccaccaaaatgtccatcaattgagtaaaaygtggtatagccatatgatggaatattcagcaataaatgaataataatcatttattagtacctgaagtactattacatggtacaacacagttgaactttgaaaacattatgctaagtaaaagccagtcacaaaagaccatatatcgttatgattccatttatatgaggtttccagaacaggcaaacccatataggcaaaactggttgcataggactgacagatttgcagtgaaacggggaagtgactgacaatgggtacgggatttgtctgtagggtgayagaaatgttctaaaattgattgtggtaataacggttatacaagtctctgaatatactaaaagccattgaattgtacactttaaatgagtaaatagtatggtatgcaaattatcttaagctgtgaaaaaagaacaaatgaagctgtataaattattcctcaattgtctagaataatcaaaataacactggattagctcttttgtggttagacaaaatttggcaatgaaactatctgtccctaaggcctttttcatgtttcrtctttcatttttccaactgtttctgtggtatttgttttcttacttctctgtagattttggtaattttcattttcatagaaaaatcaaaataaaacttcctctgagttccaaatctgttaccctaaagtacatgcagcatcttcttttttttttctccttttttctgagatggagtcttgctctgtagcctaggctggagtgcagtggcgtgatctcggctcactgcaacctccgcctcccaggttcaagcaattctcgtgcctcagcctcccaagtaactggaactacaggcrcaagcaaccatgcctggctgatttttttgtattttagtagagatggggtttcaccgtgttgcccaggctggtcttgaactcctgagctcaggcaatccactcacctcggcctcccaaagttctaggattacaagagtgagacacygtgcccggcccatgcagtatcttcttattctgttttgtatatctacgrtgatgcctcttttcccactactaattttgtatattttactctgtttttcccttcttccagctgatgagatgcttagtaattttaacggtcttttcaaagaaacagttttttaatttattctttccactattacattttttagtctttcactaatttcacatttatctttctttctttttagtttcttttggcttatcttgatattccttttctaatttaacatgagtactaagttcctttatttttcacatttgatttttttaaatgagaattttttatggctgtaagttttcctctgagtacagattttgctgtttcccactggttctggtatgtaatatttctgttttcatgatagtttataatttcagttgttattattcttttaattcctcctgttaatttggaaattctattgtttttcgaccattatggtkacactcctttttctagcactcaaaaaattttctgaactattttatgaaactattttatgaaatttatgagacatcaataatctcacagaagcttcccttgcactaagatgctttatttcttcactgctttccctcaaactgtcactaaaataygaactttaggatatttttattctcctcactcaaacctatgagacttgttttccaatttcaaagttttactgaaagaattcggtacttgtaatttcacattattctttcattttagtatttttttttctattttwaaaatctatatttagtacattatttcacacacatagtcttataaacactgggggggaaaatccaaattactacctgtaaagttctatgggaaagatccatgagtttcctcttgtattgtgcaattttggctacagatgtagtttgattcttttgtagctcactaatatcttcagatatgatctgtttaaaaaaaaattgggggggggagggttaatcaaatatcacaactatttatcagttacacctgtatggaaattctaatcttgggataagcctgagattcatctctcaaaatataaactctttccctataaatctgtgctttatatttcttccctttttacatacctaaaatttttttaaaagaatcatgcaaagatatctttagagctctaggaaatttagcaatgaggcaatacatagaaaaaataagctgggcgtggtggctcacacctgtaatcccaccactttgggaggacgaggcaggcaaattacttaaggtcaggagttcaagaccagcctggccaacatagtgaaaccccgtctctactaaaaatacaaagaagtagctgggtgtggtggcatgcacctgtaatcccagctacttggaaggctgatgcaggagaatcacttaaacctgggggatggagccgagatcgtgccactgcactccagcctgggcaacagagtgaaactccatctcacagaaacaaaaaacaaaaaacagagtgagactccatcacacacacacacacacacacacacacacacacacggctgggmacagtgggtcactcctgtaatcctagcactttgggaggccaaggcaagaggagtgcttgagaccaggattttgagacaagcttgggcaaaatggcaagaccttgtctctacaaaaaatataaaaaattaaccaggtgtagtgctacatgcctgtaatcccagctccttaggaggctgaggtgggaggatcacttgagcccaagagtttgaggttgcagtgagccgtgatcatgnnnnnnnnnnnnnnnnnnnnnnnnnnnnnnnnnnnnnnnnnnnnnnnnnnnnnnnnnnnnnnnnnnnnnnnnnnnnnnnnnnnnnnnnnnnnnnnnnnnnnnnnnnnnnnnnnnnnnnnnnnnnnnnnnnnnnnnnnnnnnnnnnnnnnnnnnnnnnnnnnnnnnnnnnnnnnnnnnnnnnnnnnnnnnnnnnnnnnnnnnnnnnnnnnnnnnnnnnnnnnnnnnnnnnnnnggagggagagagagagagagagagccagagagagagggagagacctatctcaaaaggaaaaaaagaaaacacatacttcagaaataaggaatctgaagtaacatggaatacagccaacaaccaggtctgagtggaaaaagttaagatgtgtaagatgatatctagggggtgtcttaatagacaattagccctgtatctaactactgacagcaagtacagtacatttcaacattaactgttacagaatacttggagggagtaatcagagtgcagaggaaaaggaatgatattaattatgcagcaggatacatttttatgcctctggatctttgacttgctgttttacctgactgaaatcccactattctgccttaggaagtcttaaccttacagggtaggttaaaatctcactattttattaaagcatcccaatcagaattaatcccataattgtctctatcataattaatcattctatgccactggcttacattwacatgttacaagaaagaggttaagattgtgcaagacatattttagcacatccacctgcacacatcaccttttacagaaactttccaatgccaggccatgctgaaaggacaaaattaggtggccatgttttatattacaaaacctaggcaatctccccatcccaattttgaaaaatcaccagggtttttagatacaagagtacttacaacattattttctaccagtaataactaaaaaaattagacatgttatcagccacagtatttattaacaaatactaaaaccatctaggaattgatccaagaaagccatctaggaattgatccaagaaagaacgcatgagattttaaaagggaatattttaaaattattttaaaggacataaaagactrcaaggattaaagagacayaccacattcatggatgaaatgatttaatattaaaattcaattcccacaaattagtctttgcatttaatgcaattccaaccataattctagcattctgacaaattgattctaaagtttttatggaagaataaagacccataaagacccagaaaactttgaaaagaagaaccaagattagagattcatgctactagatattaagatacactacaaagccataagactaaaaaaatgtggaatgggtgggtataagaacagaccaactggccaatgaaacataagagagggtctagaaatagatcacatatatatatgcaaacagtgtaatttaaattctttgataatcattgaggaatatcatatttttataggcaatattaaaaatatagggcygggcgcagtggctcacgcctgtaatcccagcactttgggaggccaagacrggtggatcacgaggtcaggagatcgagaccatcctggctaacacggtgaaaccccatttctactaaaaatacaaaaaattagccaggcgtggtggtgggcgcctgtagtcctagctacttgggaggctgaggcagaacaatggcgtgaacccaggaggcggagcttgcagtgagccgagaytgcgccactgcactccagcctgggcgacagaacgagacccccatctcaaaaaaaaaaaaaaaaaaaaaatggacccactatttagagaaaaataaatctgagttcataccacatactttatataaaggtaaacttcatgatgacaacaaaagactcaaaygtgaaaggttaaactctaaattttttttaatgtaggatactctcagactttggggtgaaaaattatttaagcaaattcccaaaaagaaaatacaaggcaaacatttaatggatatcattacattaaaattaaggatttctcttcaactacagacaccaaagacagaattaacaaagagatgagaaactagaagatatttacaacgttataaacagagactacaatctagagtaaatgattactgaagttcaataaagaaaaaataggaagcccagtggaaacactggccaaagatatgaatgatttcagttctrgacaagatggactaagcatatacaaccccaatctctcccatttaatatagctataaaacttggatggaatacacggggcagctatttgggaactctggcaggaagatcaggtaagataggaatttaaagtaccaataaacttgtggtgagtttacccatttttcccctcaggcgtccctagtctggtttcaacccagcctcaaacctggaaatgagcataaatgctgaaagggagctccaagggaagtctgctagttatagtgggaggagatacatcgtattacctagagaaaggtttctcaacttcagcactattaatcttgggtaattccttgttgtgggagtactgttctgtacactgcagaatgtgtgcagcatctgggcctctacacattagacgcctgtagtactccccaaccaagagtctccagacattgccaaatgtgctctgggagacaaaatcaccaccaccaccacaagccactactaagaagtactgctctaagacttgaaataatagattaaaaggaaatgctgaaaaaaaaaaaaaaaagtccaaataactcaaaagaaagcagaaaagtagaaacaggaatgaaaaacagaggctacaaacacaaaacaaataaatggtaggactaaatccaaactttttgctgtctacaagaatctcrcttcaaatataacaatataggtaggttaaaagcaaaaagatggacaaaggtatgccatacaaacactttttatcaaaagaaaggtagcgtggctatgttaacaccagacaaagacttctgagtgtcttgagtaagtgtccatgaacagatgaatggataaagaaaacatggtgtgtatgtgtacacatatatacacacacaatagaatactatttaatcatgaaaaagaatgaagtgctaccatttgcagcaacatagatgaacttggaagacattttgttaagtgaaataagccacgtgcagaaagataaattctgcatgttctcactcatatgtggaagctaaaaaaagttgatttagtagaagaaaagagtagaatagtggctactagaggtggagaaagagtaggagtaggaaactgccaaaggttgcttaacagatacaaaagtacagctggataggaggattaagttccagtgttctatagcactataggtaactataattcacaaccatttattgtgtttcaaatagctataggagtgaatttcccatgataccaacaaatgataaatgtatggggtaatggatatgctaattactttattygatcattacacactatatccatgtattgaattatcacactatgccccataaatatgtagttatgtatcgattaaaaacaataaaagaaaaggccattagagaagatttaaaacttaccgaggattaagagggatatgatataataataaaaggtaaatttgccaagaaaacacaacaatcctatataacaacagcccttcaaactattaatacatgaagcaaaaactgagaaatgaaaggagaaaaacacaaatccgtaagtgttgctgtagatttcaaatctcttctcaaactagcagacagaaaaaacaacaagaatacagaactgagcaatactatcaaccaactggatctcactgacattaatagaaaacttcacccaaggactgcagaatacacattattttcataggctcctgggttataaaacctcagcaaagttggccgggcgcagtggctcacgcctgtaaccctagcactttcgggaggccgagatgggtggatcacgaggtcaggagatcgagaccatcctgrttaacacggtgaaaccccgtctctactaaaaatacaaaaaattagccgggcgtggtggcaggcgcctgtagtcccagctactccggaggctgaggaaggagaatggcgtgaactcaggaggtggagcttgcagcgagcctagatcgcgccactgtgctccagcctgggcgacagagcgagagacgtctcaaaaaaaaaaaaaaaaaaaaaaagttaaaagaattgaaatcatagaaatttctctgacctttaagaatctttaagtatttaattatgaaagttttttttttttttttttttttttgaggagtctaactctgtcgcccaggctggagtgcggtggcacgatttctgttcactgcaacctctgcctcccgggttcaaacaattctcatgcctcagcctcccaagttgctggcattacaggcgtgcaccacgacacccagctaatttttgaattttttagtacagaccaggttttgccaagtcggccaggcttgtcttgaactcctgatctcaagtgatccacccaccctggtctcctaaaaaagtctactttatgaaataaaatattaagtatatttaagcattaattttatcaacatacaataatataccaagacaattatatgtcaacataaaataatcattactataaccttcattttcataaggccccataaataataatatgcaatccctggctgaaactggaaatgacagtctaattaatccactaagacaagaattctaaattcattattatatcaaatcagattcatgtgatttggggacttcwatcataaagaagktagttgtataaaactattaaattgcagtgtatgctacattktttcctgattaagataaaacagtagcacatatactaaaaagaattaaatgtctataatccctttccctacttccagggccagggaataaaaagctaaatgcttacatctaatctggtttgatgctgcttagtcatctgatcttgaaccttcagtcttcggagaagttccttaaaacccaccattggtacaggaattaacctgaagaaacgcagtgaacaattttcagaccttaagcctattactacaaaatacaagaagtgaaggttttagtaacactcatgtaattttacatcaactttctagggctctaaggcagatctatgactatgagataaccatgttataccaaagagattttattcaacctccctattttacaaatgaggaaatacagttcagtcaaaacattacattattaaatgaaaacgcaaatagaattttccgctcctagttagttctcactatgctatgctgccttaccataatctttttttttcttatttttttctttttggtttggctgaagctttagctggacaataatcaatattttttaaaggccaggaaaatgaaaataaacttgtctcatatgtaagaattataattaatagctcccatgtttgctttcctagtagcaaatattagttcttaaatgaaacaagatgaagacatacttacttttcagaatcagggttatctaccttggcctgttcccagataataggatcaacacctaccacaaataaaaaatattttttctaaaacaattttctatttttataatatgtgtatgacaaaggctttcctaaagcaagaccctatacccagaagctataatgaaaagtgactgtcaaatataatcatggtaaaaatacaaatttttgcagaataaataaagttcaaaaaaagcacagattgaaaggaactatctataacctataggataatagattaacctccagaatatagaaagagttcctatacatcaaaaaggaagacaaaaaaatctagaaaatgggcaaaggacacaaataggtaactcacaaaaaatataaatgtagctaataaacatattaaaaataagtattaatttttaaattaattattttgccatcagtggccagaaaaaataacattcctgttatgaatataaacggtagaactttccctggagggcaatttggcaatatctaacatacataatattgactcaaaaatttcattaccagagatctattctaaagaaatatataccaatgtgttctaagacatgtttacaaggatattgttaattactgtacagtttataatagtaaaaagaaaacaacttagaggtgttaagtaaaggtgtatccatggaatactatgcaatgtttaaatacagtaagatttatcttcatgtattgacatgaaaagtgctaaggaatactgtaaaaaggcaagctgaaggtgtatatggagaatccttttttaaaagatctacatgtaaatatgcttrcatttcaaatcacagataaaggattaaacatagtaccataaattgacagtagttacttccggggaaaggaactaaaggtaatctatcacatagtcaatctagttatgccatccagaatattttacagttagaatacattcaggttttacttgaatattcagttaaaatgagataagctagaaaaaaataagccaaaattttactagtaaattacctttgggtagatggattatggactatttttcttcagttcactatttctcaaaatttctattttaacatatacatattagctatataataaaaaactaaatgaatacaaatattcaaaactatttcccaaataagtagatatatgataagatgatactaattttattagcattaataaccaaccaacacctctgaaatacggggagtgtttagttctaaatctttctttttttttgaactctgtgattctagaaacataccagcaggaggattctgtaaaagctgtttgatctgtgcaggagaaagttctgttctagtcatagaaagggttacaccaagttgctgcaattgtgtttttatattggcttgttcaaaatgggcatatagcgttgtagctggaactcttcttgaagtaccatttggcgaacgctcaacaacataaataacaacttctgtcctgaaggaagaataaccaatttataaaatatggagcacaaaactcatagcgacaaacctcagcatatcatagcatgtgatttcagaagggtttaagttgaattcagaaatggttgttttaggaggcaattaaaatgtttcctttttttttttttttgagcaaggtttgctctgttgcccaggctggagtgcagtggtatcatcactgcagcctcaatgtcccaggcttaagcaattctcccacctcagcctccaagtaactgagagtacagctgcacacccgctacgtttagcttacgtgtgtgtgtgtatacataaatatatatgatatatatatatatatttttaaatttttttgagagacggacactcgctatgttgcctaggctagtctcaaactcctggtctcaagcaatcctcccaccttgacctcccaaagttctgggattacaggtatgatgagctgctgtgcccaactgttttcttcttaaatcttggaaaataagaaagttttacttcatgtaatgttcatttacaaatcaacctaaatgataaagttaaaaagaaccaggtaaataagatagtatttgtttttttttttgagacggagtctctctctgtccctcaggctggagttcagtggcgcaatcttggctcactgcaagctccgcctcctgggttcatgccactctcctgcctcagcctccctcgtagctgggactacaggcacctgccaccacgcccggctgattttttttgtatttttagtagagacagggtttcaccgtgtcagccaggatggcctcgatctcctgacctcatgatccgcccgtctcggcctcccaaagtgctgggattacaggcgtgagccaccgtgcccggccaataagataatatttataaaagggtttgcttagttgcaaaatcctatgtaaatgttatttactataggaaattctgttgaaatttatgggctgcttctctgcaattacaaccacaagtaaaatctgttcaattattgcatctcattaataatcattcctccaaatatcctaaaataaatgtcttgccactaacactgagaattatacttaggtcaagggaagtaaagcaataatatttattcatgaatgaacatgaacagtaatgagttaataacattttccaataacatctttatggccctcaatttgcacgcatctatgacaaatggtcccttcctggcctgaatgaaaatctagaaaattattagcatctagtaagttaaaaaatccaaaattttaaaaaaacttttaaataaatgtttttatcaatactgaataatcactagctgagaaaaggcattctgctctgagagttaatttgtgctttagcaacaaaaacattattgatcactcccttaggaccagaaataaatacacagaaataaacagtatatttatgtatacttactgatcatctggcaatgttttagtgccctctacatttacagtaagggtctggtttcctcccaaaactttatgcaatgattctaccaactgttgttgttggcttcgaatctctgtttcttttttgttgaaaactaaaaccactagcccrtcttcatctttattactgggcatgcaactataacctactgcctgtggaatgacaaaataaacaatataaaaaatatgtacagatcttaaatcaggtgtttmatattaatagcttaatatctgctaaaatgggaaaaacaacttaatgtctggtaattaagggaataatgattcttcccaccattttgtgccctaggaggtcacaaaattataaagaaaaactattttacccaggaataacattaacctatagagtaagattaacatttcctctttgagagagtaactaaacagctttctcccctaaaaaattttgatattcattattgttggttgtttctgaaccatctgcatgtcattataaaagtgactgcaaaaatcaccaactaattataatttatttcactatacagattgttctcaacttatgatttttccattttatagggtgtgaaagcaatacgcattcatatatacatacatgtaaaccatacatggaattctgatcttttagtttttattataaaattattattattataagatggacttgatgttagattattctgcccaattgtacactaatgtaagtgttctgagcatgtttaaagtaggctaggctaggctatgatgcttggtaggttaggtgtattaaatgcatttctgaattacaatattttcaattatgatgggtttattgggmtgtaacccataataagttgaggagtatctgtatatctgattcatggaatcttaaactaagttttaaatatataaagaagtaatttacaaataaatacttttaaatcacagtaatgacagtcaacttacaaatactataaagaatgtctgtatcactttattggtttatataatacaaaactttatgaaacagggttgttgtttttttacatattaatatgaccaattatacttttctaaataattgctcttttagatagaagccttttatcccttttcaccactcacctgcaacttttaaaaaagaatttaaattaactcaagtgtacattatgcattttaccatgttatacaccaactttattgttatattcaacttatgtctattattgaatacctcttagcgactaaatacatgtatcaaaatttcaactatatgcactcaatatactttttgttagtgatgacacaaagagatgttctgtaataagacaggctgaccactttattcaaggatctgatcctcagccttacagctccaaacacagggttatgtacgtattgattaggtttaagagaccaacgtaggccaatataactcctaagaggctgaggtataaactggattgcaatacataatttgttatggaaaatgcattaccaaatggacctaaatactctcactggctgataaagagattttctgaagagacaaatgagaaggttgtttgrtaggcagggaataagaacacagaaaatgggcaatattgttttaatagctttggggttatacatgccaaggggaatttctgtctgctggttagggtatactctcctggccaatgttaaatgaataccactaaattgtagtttggtgtctcccctttacaggtgccaggcaaaccattctcctgtttacattttttttcttcagttataaatcacattccagtcacaccttccttcattcatattctggtcaccttcaaccacacatatgtatgaaatcacttcaattttataatttctatattttcaaaataaaagtataatcataccatgttcaaggagtaaagatccaagcaattgttatcttgatattaatctaaatatattttctgttatacaaaatcttcaactgaagataaaaatagtattaataataccttaaatcggcaaaagggattttcttgtgtgaattccactggcggaatattattgttgaaatacccttttcctgttccccaaaaggcctgcagttgattccattttgccaaaatagcatctctctcatctcccaacagcgttggagcagaaagagcactcgcagtatttatcagctggttggactgggtaggagcttgtgtaggctgactgaagagaccacctaatgctaaaaatgtacccaaaattagtatttaaaaacaaaacaaaacaaaacttaatccagatcctaggcgtggtaggcaaaataatggccccctccaagatgcccatatcctaatctacagaacctataaatatgttatcttacatagcaaaagggcctttgtagatgtgattaaattaagcatgctgagatagagggttatcctggattatcaggagggactcaacgtaatcataagatcctcaaaagtggaagagtgmgctcagagtcaaacagatctgaagatgctatgctgttggcatatggcaagatggaagagccgcgagccaagaaatgcaggaakactctaaaaactggaaaatgcaagagaatggattctcccttagtgcctctagaagtaacgcagtactgccaggaccttcattttagcacagtgaaacccacttctggacttctaatctccagaaactataaaataataaaattttattgtcttaagccactaagtttgtggtaatttggtatggcagcaataggaaactaacacactaggccaaaccttataacgttaaatttgtttttctaataatatttttttgagacagggtcttactttgttgcctagactggagtgcagtggcaagatcatggctcactgcagcctcaaccttctgggctcaagcaatacccctgcttcatcatcctgagtcgctgggactacaggagtgcaccaatgtgcacctggttaattttttaaaattattttttgtagagacagggtcttactatgtttcccatgctggtctcaaaacttctgagctcaagcgactctcctgcctcagcttcccaaagtgctgggattataggcatgagcaactgtgcccagccctaatgatgttatccaaattaattccattaccagaacacagattgggtccacaatattaaacctacacatgaaagaatggagggagggaggaagggatgcatgtggataaaaaaaagtttgtaaagatgtaggattttttaaaataacctttattgctgttatatttatataataaatacaaattgggggatacaaagtctaaaaatcattgttatatcaaataccagcttactaaacattttcctttctctcattattaaaaaatatatatagtaataacaaatggattaaccatcagtattctaggctaaaactttagatggctgtgtaactttgggcaaatcaacctctctgggataccaatttctctaatggaaaaagggccaagttcttagggcagataaatatgccccaaagtgtgagataagtatgtcatctttcaacaaagcgaggagcaagtctaaggctcagagcttaaggcaaagttatctacctagaatttatttacactatattttctttgtacttaatttcaattaccttttccttagagcaaatgatactaattttccacttatagcagcaataaattttactttaaaataactgtatttcgtgtttcaaagtaaactgatttaaagaaaattcttaaatagtaatacaaatggtatgtagataaggagaaaacgtgaataccaaaatgacctgagttttaaaacactgtattagatattgtttaagttctctttcagctctaaacattgaaagtaccacaaggtccatggagcttctacagagctagagagaggctcttttactctccagaaaagtattaattcccaaattagtatatataaacattggcaagaactggactagaactcagaacacttgaatcctggtttattataaggtcgctttctatccttgagcaagaaattcctgggctttatcttcctcaacttttamatgagatgaatcaactgtgatctctataccgagacatatgcagtcagcctcccatgctgttgattattcctttggcccccaaagaaaatcttyaccttctgttgaatacacatcctccttgaaagcccttctcccttaaatttcctgacaacacagtctctcttggttttttataaacacattcattcattcattcaccattaattcatacaacaaatatttactgagtacctactaagtgctcagagccaaatactaaagatacagtggtaaacaaggtagacaaggtgcattaaacaaactgaacacatcaaacaaatattaacaattgtgataagtccttcagagaagtacagaggttctgggagtactaaataagggagctgatcaagcctgagagaggggtcaagagaagacagttccattagcacttcagttagggcctaaaggaaggagtcagctaagccatggggtagaggtaaaggccaacagtatgtgtaacatctctgtagagacagagagaggaagatgagtggacaaaagcaataaggaggactaacaatgaggtaggaaaaaactagactggagtgtcacagaagttaaggtctcccactggccaaatgcaacaactgaaacatatttattaaagcccatgcattcaaaatrgtaattttataaagtaaagatcaaattttttttaaatcctaactccttggataccattagaaataatgagaccgccaactcctttttacaaaaattgtccattaaaaagaaaaaaaattatcttgcctttactatacaaactgtacatcagggtgatcaagcagtcttggaggatgaagaaaaagttccttttacagaagaaatttcagtgtgatagggaggaaattagaaaatcaccattttgcaactcctaataagataactgattgaggcaatgatcatcaaggaatgaaaccattaggttaaagtagtaagataaagatacgctgtcaccatctgaacctactgatcaatcttagcatcaccaaaagtgagatagcctctcaacgtgacgtgatatgaagcacacagcaccacttgcaaaatgttcttaccaaaaaagcaaacgtcaagtccctaaagcaaactttatttaccacaattatgagagataaagttaaataatattacaaggaagcagaagaagaaaaatacagaatggggggcatttaacaagacaactggaaaattcatgagggaaaaaacagaatggggaattctctacactaaaaagaacttaagggacatgacaagaaaatgaatgtgtggtccttgtttggatcatgattcaaacaaaccaaataagaaaacgcttttgagacaaatagggaactctggttatagatggggtattagatagtaccaaggaattattgtgggttggaatgaggtacacatttttaaasagagaagtatagtaaagtaagcatgaaatgacacgcttgggatttgctctcaaatacatcagtgatttaaaaaaaggaaaaaggagatggacaataacaagttctgacttttgatgactccagctggtagggttcacatcacttctttttttctttgttagcatttttcataaagaacagtaagtgttcactggatttactgagatgattaatgaccttaacttatttgataaaataaagaaaacagaaaccagattggcgaatagtttgtaaaggggaggagagtggtagctgaagtgaaatgtgggattaaagtagttttgttgttgttgttattactgtttcaagaaaaaataaactttgagttacttaaatgtggatgagaaggtgaagactggggaacggagtacagctagaataatcaacagcacatgcgccctgaaaaggcaggaggttataagatcctgagtcaggtaaaaagaggaaaaggtggatagagggagaaaaaaaatagatttggtggagggaagttgaaggaattgcaataagggattttattttctctttggttttttttttttttttttgagacagagtcttgctctgtcacccaggctggagtccagtggtgcgatctcagctcactrcaacctctgcctatggggttcaagcaattctcatgtctcagcctcccgagtaactgggactacaggtgtgcactaccacgcccatctaatttttgtatttttagtggagatgggtttcaccatgttggccaggctggtctctgacctcaggtgatccgcccacctcagcctcccaaagtgctgggattacagatgtgagccactgcgctcagcccttttttgtcttggaagtagcagtcaaggccatctgctaaaagtaagaacagataaatttgagatttgaagagaataaaggtttaaaattactgctatagaaagcrggagaataagttgaaagtagaaatttcacaggattaccaggcaacattgagacctgaggttggtgatcaagaatttagagaggtattatcccctcttccataatgtgtgatctttctcaagcaatatctacacagacagttgggcttacaaaggcttggggttttttcaggcaaatgtgacacaaaaacaaggaagtttagcatattggcaagagatatagaaatggaaggccatggaatctaagctagttagagtagtgaagacagaaagagctaacagagcagaaagtatcagttgtcgaaagatccaacagtcttctgaaggatcctcaataatccatgctttggcttggaaaggacttctggcggttgtcacaaagtcaaatgtgacttttccccttgattcacaggtattgccaactgagataggaatagctgtgattagtaaaagggagctaataagtawgaggaatacatggacgggcatctctatactgagataggacaagcagtggtcctaacaatgctgctcgctaatttatggtcaaaatcctacttggcttggggrtaggagatggcagcatttaagtgttagtgtttctaagagttttgttctagtactctcctcttactctggaatcaggtctcctaaattacatcatccatatctaccactttaaatactacttacgttctgatggctttcataaatayatacaactacccaagggacacctcaaactcattatctacccacaaacatctgctcttgctttagtattctggatcttagtgaagagcaagggatccttcagttacgccacccagaagcccaagatacctttatccagtcattcgcttttattgattctacaagttaaatctctctcaaattcacatcctgttttttctctccattcttaactgtcactgccttaattcaggtcttcactatatcttgctcagattttggcaacagcttcaccagatctctgcctccattccaacccacctataatctatctttgtatttctctaagagatacttctaaaaatctgattattttcctgtctacttaatcctacaacagtttagaattgcttaaaggacagctccttagtaaaacatataaggcacgctaataatccaattcatatctatctctccaactctcaccactgaccctgaggtcatttatgcattaaaaaaactgcactgatctagttatactggtcccaaaggcattatactctgccataaaccatgccatgttatttcctctgcgtggataccctagaatctccttgactatgagcaaggattgtggtcttcaaccttgtacacccaatgcctgacatacgatatatacaataaatggatattacataacaaaatgagcccctttcaattttaaaatagcaccagattcaaattcccattttcctaaaaaaaccaaatgtaactacagttactcatagttggagagactttatttcaagaaacaaaggaaacacttcacttttgctgttctttccttaactacttaaatatttcatcaaattttgtatttttgcaggattgtagaaaagacgaatgactggaatacttgaaagaataattctgagaatactattctattatcttcatcctactgttaggcaatccttgaaattcatgtttaataagttaataactaatcttcaatgactgagtaggatgaattttagctagtcaatcaagttacttaaaaaaatgaaacagaagtaattttaagaggcatcagattggaaaagtgaaaagagcactagaatgagtagttgaatttrcatccctgtacttcttctagagaggtatacaggtaagtcacaatctctcaggttcctctcttcacccataaaatggggataacaaaagtattatttcacagggttcttgtgagaataagttaatccatacagaacaacccctggaacctactgccataccacctagtaaggatggttagtaaggaagccatcaaagactaataaccagactgtctcaaagggacttgggagccaacttgaaaaggcttgcactggccaaagatgtaacaatttaagcatcaataagaatggtaactgcaatggattaaaaaatagtaactagtttaaaggctgcagtttctgacattaaaaaaaaattggtcatctttggagaatgctagataaccaactctttattctgaaaaccagtaataaagagaaagaatcaaccaaacagatgaagtcaagtttctcctcacagaagtatttcaacaaataaatgaatccaggtggaatggcactatttgtaacccctaatgaattaatggatctaggtaatgatcaccaatggctcaatggctgaacactcaaaaaaaaaagatattatatgtcttctgataaaaaataggcctataaaatagtcttgcaaacaaacaacaaaacaacaaaatatatatatgtacgccccagatctaacccaatcatcaagaaatacagagaacmaaggaatgtgttaaactataccataggcgtgcaatcagaaaagtcttgactaaaaaactctataggataaatgatctgttttcttcaacaaattaaaaaataaaaaagagaggccaggcgcggtggcgcacacctgtaatcccagcactttgggaggccgaggcaggcagatcacgaggtcaggagttccagaccagcctggccaatatggtaaaactccgtctctactaaaaatacaaaaattagctgggcgtggtggtgtgcgcctgtagtcccagctactcaggaggctgaggcagaagtatcgcttgaacctgggaggcggaggttgcagtgagccgaggtcgtgccactgcactccagcctgggcgacagagcaagactccgtctcaaaaaataaaaaataaataaaaaagagagataaaagaggagcctatggagatttaagacaggcaaaaccaaatactgtttacatacttgaatgacaaaatataaagtaagaaaatgatcaccataaaagccaagactgcaggtcctctgatggggaagcaattggtagggaaatgtggtaggcttctgaactggctggccaggaaccatctcctgacatgggcagtgattacaagggtgttaacctttgtaaacttatatataattcattaagctgtacttttgtgcagtttctctatttgttatttttaacaacaaaaatttaaatggaatgatcctaaacacagggaccttataatcctaactgtgccaatcagtgttctccccagttgctatcatatttaaacatgaaaagtaacattcctaatcctttggaatatattaataattcttataaaaagtccactraagtattctgaatgcactcaataatgtcagctagtatcatyacggttttgtatttgaagctgaaaacctcatacttactagtttgctgctgctgckgtgtattaaatcctccaaatcccagtccagttcccaaaccagtacctaaaccagtactagttcccgttgttgtgccaaaaccagtaccaaatccaaaacctttgttctgagtaccaccaaagagtcctttgaatgaaaaattggaacttcgtaagttaaaaaaaaaaaaatctgacctctacttcatttacttctaygaatgacttaagatggcctcttaccagtagtgcctgtgttagttggggcagaaaagctgaaygcagaacctgcagttgtagatgttgtcccaaatcctccaaacccacctaattaaaaaagaacaaaaatagaaaggaagaatcttttgtatatataaaggcaacttctttttaaaattattttataattgctacatataaaatcaaaatatattgatctaatttttcctttccctactttcaagatcaattttttwaaaaactatactaccaatcaagaagtcaaaatgttacaagaaatgaactaagcatttaaaatagaaatatcacaatgtaatatatacccttcaattaaaggggtggttaacagttacagctgagaaaacacattaagcctattgccataattctaaaatgactatgtatgtacttttagaggaggtgttgcaaattcatatgcctagaagatttagactgataacagtaaagagtaaagtagactatgtgtttactgataggtggaactgtttaaaatgaatagttttttagatcagcagttcctaaattccagcagatacaagaaaggtagtttagcagtgtcacatattcccattttttaccccaagagaaacaggaaatctggattttctatgtaaaatttattggtttttggctgggcgcggtggctcatgcctgtaatcccagcactttgggaggccgaggggggtggatcacaaggtcaggagatcgagaccatcctggctaacacggtgaaaccccgtgtctactaaaaatacaaaaaattagccgggtgtggtggcgggcgcctgtagtcccagctactcaggaggctgaggcaggagaatggtgtggacccgggaggtggagcttgcagtgagccaagatcttgccactgtactccagcctgggcgacagggtgagactccgtctcaaaaaaaaaaaaaaaaaaatttattggtttttaaaccctaattcaactacttttttttgcaaggaattcaaatgttttgaaaacagcatgccaaacatatcacattggcagacctgttgccagttagcaaccttggttttggtgaattaatttatgtctaaattaacttatatttctacttagtctctgtcaagactaagtaacttttcaaaggaagcataccaatatacttacctccaaacaacaagaatgtgtttcttgaaggaagagatttgacagataaatggaatgctagccaatctaaaattgttttgttatttttgtaacttattgtcagtcttcagctgattaccaatgtggtatcaaaaagcctttcaagacaaatgtttgaaccattagtgtcgaattatattgcagattttttggaatcttcctttaatctcatttatttctggtatacaacacagattcatcaatattgcaatatagaaaatacaagaagaaaaacatgcaaccattttatattaatcacctcattctgatttggaaaactactcaagagtaagctgcatgttgcatgcaggcacaactaaatattctatttacttgtaggttctactgcagtactgcaaactataaacattttcataaaagtcaccyacagtactaagcactgttgtaatttcttttcattattcttcacttccatagaataactatgatataatctgaattggctacgcaatagaaacactagtcagtttctcatcatgctccacaacatcaaaaatgttttagtaatagcagatctgcaagtatacaaaataaaaagtaaacaagaaagtctatcagccctttgctgaaggttaacacatataaaagtagttaaaacatrttacattatcataactcaaarcttaacagtgataactccaaatgaacatgaaatcaagcaaatacyaacaagtttatttattgttgttgaattatgagctgggtggctttattcagaaacacaaatttcaaagtaagatttctgttttacccagtgccaattttaagcaaacaaggaaaagtaaacacatcaaaggacagtgatatgtgattacttcgaatacatcttaattaaaatgcatcatcttgtctttgaagttttcaaatattcttcgaactgttttcaactcagatgctagggtgataatcacattgcagtaaccagtgaatgaacaaaataacaaacttcccaattaacttttagggagtaaataatgtttatcaaatgcatataattggcatgggcacaagaggcataacgtaagagactatggacgataaattcatatacgagcagctgaagaacaagtttttttctacagtgtcactatgtaaagtacacataaacctattttaaatgtatatatcattattgttttgcaaaatttctaatgagctgcaaacaacccacgtgcatatgaaaatcttcataattatctttttgaatgcaaagacgtctagcttaccttttagaattcgatgctatatsacataaaactaaactgctctctttgagcatttcccaaaattccagcaaagaactggggattctttctataattacaaatcttatagaaattacacatcttatagtatcctaatctgctgagttgaccaaagaaatacattattatcattataacacaagttaaaaaacaaaacaggttactgctgttcgtataagacttgtttctctttggaaacacaaggacaataaaatgaaatctcaatgaaagatgcagaaaaaatgaaaaatgactgcaggagtccaagaatcccaggatgggcttgactggtggtgagtttatactttggaagtcytacctaataattttaaagatctattcaaaattayaatccaaatgcttatcatttggaagataagtgcacatttaataaaggaacaytgtaacttgcaaaactttcctaaaccacatcttttaaggcagtaaaaacttgatacagatgtttttgattcgagataaggaaataaatttcctttccctattagacaagtaactgttctttcccaaactccaggaaccacaatattcttggactccagctcccaacactggttacacatacaacccgcagtatctacctgcacttgccagactgttaccaaaattgaacggagtcgccgaggtagtagaaacaccgaaattcccaatattaaagttcactgcaggattagcagttaatccgaaacccccaaaattaaacccactggcggtggagttggcagtctcaagcccaccaaatcctgataggcgtgtaggcaaagaaacaaaattttaaaaagggggagagggaaaaagaaaagaaagcaagataaggattagaagaatcagcaggaggtttcacagaagtgaacaaacctggttttgctccaaacagtttaagaaagcagagtgggggtggggtggggcagatggaagaagcatgacggataaaccccacagcgaggaccacagggggccgggggtggaactaagggagtcaatgggcagtgccggtggatccccagccctatcctcgccgagtccggcagcgggaaccacgcaagcgttcccgcccatccaggaggctgaggtgcagaggggagggaggttctcgggcaaggggagagggaagcaacctccaatttctctgagtaggactccccggcagcgggaagcgaaccgctcaagccagggccctgtggaaactcacgcgcggcaagcgagcttctagtgggaccccgagtacccccgtggcctcctcgggtgccgcctcggcccactctgccgccgcccgcccttttccaatgcctctaaagtctccgcgtcggcgggagattccaggatccccaggtcggagagtctcggacagagggggcggaccagacccttccccttcttcccgggtgaaggtctagggggatcactcacccgcgggggccgcrgtggctgcagcggtaccggaggtgcccgagggagccccaaaattgaaggccatgtcgcgaaagcaggagaccaagtaggttactcctgcgacgcgcagcgcgctccccttctcagtccggccgggaaaccgccagtcagatcaccgagttccgcctcctttctgacctagcctaagaggccggaaggcgccaagggcgtaggaggtgggtggttgtgagggaacgcccccagccagctcacttccggtgggcttcacatgctgtggggtgtcactgttaaggtaaaatgctgggacgctcgcgagggtgtgccgcctgagagtcctttaaaaactgccgtagggaggttctttgggaaaggtgtgcagaggctgaagttgttactgtagggatacgcggtagacagctagaatttgtatgtggtagggttgaagttgctgcctcatcaactagcgggcctgggaggtcgggcagcagggctggggttgagaacccccccaacacccacgaggaggtggtatttgaacccagtgctgaaggatgagtagacggagcagaagcagtaaagaggatgcacgttggaagaaatgaaagcgaatggaattgtagcaaacacgttgcgtttactatgtgccaggcactcttctagacattttacataatttaatcagctatcttatgaggtgggttgctgctatctccaatttataaaagaggaaacaggtaccaaagggtcaggctgtttacagagtaaatactcctaaccacagctctaaggggagcactgaaaaagaggggaagagtgggccccctctgttgtacttgtaatataatttaatcctcagaataaataaatagagaagattctgtaactgtattttgcaggtgagatgagagaattgaggtttggagttgttaagcagcttgcccaaagtcaccttgcaggtaggttctggagtctggttttggactcatgtttctccactccagagtcccaatttgtaaaaattaccattatattatattgccttgtaaattatggtaaggatttcagactatttcttgagggtaatgggaaacctttaaggggttttaggcagaggactagtatgactagaattttgtttttagaagatccctctggctgccataaggagaatggattggaaggagccagaatgcctgaggaagatagagcttttaggagtctgttgtagttgcacaggtaggagatgataatgacttggattacatctggcagtggaattaggagaataaatttgagagatacttaagaaatagcatatatgagactcgtagtatttggacgtgggaagtaaggattcaaggacaacctcctgctttctggcttgggcaagttggtgaatggtggacccgtgtctgactcctacaaactgagtatgctctcatacccactgccctgccttctttcactgtttgtcacagataatttatcaatctaatttttccttacaatagtatatattccataagtgcaagaaccatgtccctcttgttccatgcccatcacaagtgcctggcatataacagggggaaataaataatgaatgaatgacagataggtggaaaccagatcttgaaagaccttccttagcatgttaaggagctttgatttaccagcagtttgtccagctgcggcccacaggccacatgtggctcatggcttaggatggctttgaatgcagcccaacacaaattcgtaaactttattgaaacattgtgaggttttttgcgattttttttaaagctcatcagctattgttagtgtattttatgtgtggcccaagacaattcttcttcttccagtgtggcccaaggaagccaaaagattggacacccctgatttagcacatagcctaacgcttaagtacttagcttaccttaaaaaaacaaacaaccattcttcttcttccagcgtggcccagggaagccaaaagattggacacccctgatttagcacattgtctaatggctaagtactcagcttaccttaaaaaaacaaacagccctcccagtctagcagaaaggaaaaccaatgattaatttatggaatctgccagaagctcaggaattggagatatcacgtatcttcataagttggggtaaagggaagttaaaatgagaggaactggttgaaagtctatttaagaagcagttagagctccccaaatcctcttctgacctcgtgcagccaagtgaatgcttcttccccactctagaaaaataatggaggattcttctctacagtgattaaaatagtatttgccaggcacagtggcaccagcctatagtcccatctactcggaaagctgatgtgggaggattgcttgagcctaggagttcagccagcctgggcaacacagtggggactcccccccaccccccgtcagtgtaaaaaaaaaaaaaatagtagtgtctctggacttgggggcaccagacattattgagagtgggtagtgccctactgaatggtggaagactgagtggaaatgcatgcctatacacaccttcccctactgctcccagaacattggcagccaggccttcgccctccaggaagatataggagaattttttatgggtgaaatgaccagtatcaaagaaaagacaatcatctgacatcagaaatctctaaataaatgatttagccacatgacattatagcagtggttctcaactggtgccaattttctacttctcccatcccctggcacatctggcagtgtctacagacagttttggtggttgcaattgggaagatcttacaggcatctattgagtagaagttgaagatgctgcaaaatactctaggacagactcccttcctacccaaacaaaaaattacctggccccaaataccactattacagagtttgagaaatcctgctttataataaagctcacactttgcaagcctcactaaggcactcagaacttccattcagcttttaagtcccactcttatatatgagtagaccagcaaggattaccaagctgaggagagcctttaacacaatgtatagaggtcaaaacaaatagagcagcaaaagcagcttggaggaaactaactgcaaggagaataaaacttttaaaaagtgaacatatccgcagagagataggaagagatattgtaaccatgaaataatatcaggatgttattattttcaaagaaaggtattcttagcagaacaaaagagagctattggaattttaaagctattaccagaaatgaaaaacccagtagaagtgtcggaagataaaggtgaagaaatctctcagaaagaaaaacaaaaagaccaaggatggaaaattgaggagaaactaaaactagaggactagttcaaaaagccctctatcacacacactgttatatcatgcacactaatacaataatttcagaaagagtatagagaaaaatctgtcctttaaagtccttcaagatttggtctcttcctattattcgttcattcagagtttattgagtcctactatgtacttggtactattctgagtgctaaacaaaaaaggtatggtttgtgcctttgagaacttacagttgagtgagggaaaaccagatattgagttaatagtacacttgtgggccaagtgcagtggctcatacttgtaatcccagcactttgggggaccaaggcggcagagtcactgagctggggagattgagaccagcctgggtaatatagggagaccccatctctacaaaaaaaaaaaaaaatagaccaaattagccaggtgtggcacacgccaatagccccagaggttgacgctgcagtgagcagccatcatgccactgcactccagcctgggtgacggagtgaaacattgtctcaaaaataaagaaaaaaaaaatagtatacttgtgactgttcaagaaggcagcacagctgaggaaattattaaataattcaagaaaatttatcataattgaaagacactgctgggttgaaaatggttcaccaaatgctcattacaattaatcaaaatagactcacactaaggcacattccaaaataacagaaccatgatggcaaagaagtttccagagagtaaaagaggtcacacacacaaaaacaagaatcaaaatggcatcagacttctcaatggtaacactagctagaaggcagttgagaaatgcctttgaatttctgaatacaaattatttccagctacaattctattcccagccaacttatagatcaactatgaagggagaataatagcatttttagacaaaaaaaaaactattaaaaaacaaaatacctcctatttcttaggcagttagttactagaggatgtttgccaccaagatggagccaatgctgaaagaggaagacattaggagctccaacacagatggcaggaatcctcaggatgacttggagagcaaccagtccagactgtagcaagtcaggttctggggaaggctacttcataaggatgagcaatttgagagagacttagacaatcagcaacaaggttggggttgaattggtaataaatacatgaaaactaagccagtgggacaattaatattagatgagaaaggaaaagtgttgaaatgttactacatggctcaattgtgcagtttccacatcatcccaataatgtgaattgaatattgagctagacaaaattatggcataactatactggaaagatgggggaatgaaaagaatatttatgtgcatagaaaagagctaagccctcatcctccatggtggggagtcagtgggtaatgctgaaacaaaattcaccaagcagcgtatcatttatctggagacaagggggtaaatttaaaaaaaaaaaaggctaaaagaggtgcctgcaagcactctgagagtagtatctgcttttcttatcttttttaaaaataacaattgtagaattgtttgattgttagtatgtgcttatatgtataactttaataaaaatgaaaacaaacaataacaaaaagcctttgtacttattaaaattactaatgtcgtttgacccagcaatgctacttctaggaatttatcttataaatgatttggcaaaataatggaatacaaggtaattcattacaacactatctataataatgattggaaacaaaccagggtttgggtaaataaattgttgcttttatacaaaggaatactattccgctatgaactgggaacaaaaaagccctttatgtactgaaaagaaagacctcaaagataaattacatgtggaatgttcatccttggagttgaaaaaacaaaattacatgaaaaatgcacaattcagaacactgtatgtatgctacaatttgggttttaaaaaaaagagggctagaatatataaatacacataatttgtacaaaatattcctggaaaaatacatttgaaaaaccaaataatattggttgcatgtgggaagatgtattgggtggctaggaaatgggtagaggaagacttttaccctaaacccgttttatgcattctgaaaatgtagaagggttacttatttaaaaaactaagtaatgctggctaatatggtgaaaccctgtctctactaaaaatacaaaaaattagccaggcgtagtggcacgcgcctgtagtcccagctacttgggaggctgaggcaggagaatcgcttgaactcgggaggtggaggttgcagtgagccgagatcgcgccactatagcctggtgacagactctgtctcaaaaaacaaaacacacatacaaaaaaccctaagtaatgctaattgtttcgggaagtcagggaccccaaacggagggaccggctgaagccatggcagaagaatgtggattgtgaagattttatggacatttattagttccccaaattaatacttttataatttcttatgcctgtctttactgcaatctctaaacataaactgtaaagatttcatggacacttatcacttccccagtcaatacccttgtgatttcctatgcctgtctttactttaatctcttaatcctgtcagctgaggaggatgtatgtcacctcaggaccctgtaataattgcattaactgcacaaattgtacagcatgtgtgtttgagcaatatgaga

SEQ ID NO: 97786 - DNA, 78212 bp, Homo sapiens
  misc_feature (1)...(78212): n = A,T,C or G
ttgaaacctccttcgtgagtggagaacttttaagaaatgaggcatcactaagacttttattttttctttcagagactgggtcttgctctgtcacctaggccagagtgcagtggtgtaatcagaacccactgcagccttgaactcctgggctccagagatcctccacaggcccaggccagaatgcctagctattaatcattttttaaaatttatttttaatagagacagggtctcgcgatgttgcccaggttggtctcaaatttctgacctcaggtgatcctcccaccttggcctcccaaagtgcagggattacaggtgggagccactatgtctggccagcactaagattctttttttttcttttttttttttttttgagacggagtctcactctgtcacccaggctggaatgcagtgacacgatctcgggtcactgggattacaggcgcacaccaccatgcccggctaattttttgtatttttagtagagacggtttcaccatgttggccaggctagtctcgaactcctgaccacctctagtgatccaccgtcctcggcctcccaaagtgctgggattacaggtgtgagccaccacatccagccaagattcttaatggcacagaaaagtagtgtggtgtggaaaaacatgggtatctgtagtcaaatggtgattcaggagaatctaattcagaatgcaaagaagcttaagcaatagcttaatttatttcactttttaaaaacatagaagagtagatatgtgattttcaaataattttgacaaaaaacttaagaaaactctttcaatacatacacatttttaaattctagtaagacagcgtatcatagtttaaatggcagtgaatttttcttcaagatacataaaataatggtgcttcgtataactacaatttcataaataaaatatgcatatgaaagtagttgctaggtttgggtgatgggaatataactgattggattttttcctttacatttaaaaaaatttttttacagctcatggccatgaactcctttacattttaaatattttgtaatgttgcttatcaaacatttctactaaaaatttttttaatctaaaatacttctagttccatcttcgtaagatccaattttgttgtacttgctattcctaatatctatgttaccatcagaggtgtttttaaaagaaatttggccaaggaggaaaagaaaattaagaacaaaatggaaaccctaattctgggaaatgttacaaaaggggaagttcaaaagaattacatggaaactaagaataaatgatgttcaacagaacatcttgttttaaggatacttaaatctttttaaatcttttaaacattttatcattttgtgatttttaaaaaacatacatatagaaaataatgaaacttgttcatctccaagttttattcagtgttaatattttgcttttttaaaaacttaaaaactagaacattaagagtataattatgtctcagccatttccccgcctcttctcagggataacccttatctagaagttgatgaacattaagagtataactatgtcccactcagccatttcccacccccttctcagggataatccttatccagaggttgatgcctatcattcctgcagttttttctttcccttgtatatttgtatgtatatataaatttttacataagcagtatcctataaattcttttgctatgtaactcaacattagattcttgatagatggagattcattttaattgttgtatagtttccattgtttattcatacatccacaatttatcattctaccaaaaagcagttagaaaaagttttccactttttttgctatttaaaaaccttgcaggctgggcacagtggctcacgcctatatcccaacactttgggaggctgaggcaggcagatcacctgaggtcaagagtttgagatcagcctggccaacatggtgagaccctgctctactaagaaatacaaaaattaactaggcatggtggcacatcccagatacttgggaggctgaggcaggagaatcacttgaaggcaggagggggaggttgcagtgagctgagatcacaccactgcactccagcctgggtgacagagtgagactccctctcaaaaaaagtaactaactaattaatttaattaaaaccttgctgcagtaagcatctttgaacatgtcttctagggttcatggtcttagagttttttctttaaacaaagtttagatagaaaactgaaaatgggctgggcacagtggctcacgcctgtaatcccagcactttgggaggccaaggcaggcggatcacttgagatcaggagtttgagaccagcctggccaacatggtgaaaccctgtctctactaaaaatgcaaaaaaattagccaggtgtggtggtgcgcatctgtaatcccagctactcaggaggctgaggcaggagaattgcttgaacttgggaggcagaggttgagtgagctgagatcacgctacggcactccagcctgggcgacagagcaagattttgtctcaaaaaaagaaaaaagaaatccagaaaactgaaaatgaaatcactgggtttgtagggtctgcaattcttcaactttactaggcaatactgaattaacactatattctcgtcagtaactcatgtaagtttgtatcttactacatccatgtcaacaagatgttattagactttgaaacttaagacaaccctttgtttatgaaatggtatcatggtttaatttgcatttcattgattactagagaggttgaaataacttcacatttttatgttcatttgggttttcctctttttatagccttttgttttccttttttttttttagtaataaaaacataggagatctttacgcattctagatactaattctttatcaattacctatgttgcagatatctccacagataaacaatgcgatatctatgataaactaagttctcatgtatactttgggcctaggattttcaaaaccatttctggatcctttttaacagtccttgctctagcttctctctttcctctcatatttgactataagcagcaagaagccaggtagcaacttcaacattttgcttggagatctagctagagtacctagttccttaggtacatttttctgtgttctgcattcctctaggtgatcatgttaaacattctggcactacataacaaaggaacctcttacttccagtttccaataacattctcacttctgaagtggctagtgctggcagtctccttcaagaccatcagactgtttctttcttaggatggtttgtttctcaagggatttctactaatcatcagacttctactaatcatcagtctgttaggaactttaggctctcactaacattctgctcaaaattattacaatttctccctactaccagttccaaagcaatacatttttaggcatgtgttatggtagcactacagttacgttcccaaacaaatctatattaatgatctgtttgtcacataccaaattacctcaaaacttagtggcataaagtgataaacattatttcacagtttcttttttttggggggggggacagtctcactgtcacccaggctggagtacagtggtgcgatctgggctcactgcaacctccatctcctgggttcaagcaattctcctgcctcagcctcccgagtagctaggattacaggcacccgccaccacgcccagctaatttttatatttttagtagagacggagtttcaccatgttggtcaggctggtctcaaactcctgacctccagtgatctgcccgcctcggcctcccaaagtgctgggattacagatgtgagacaccatgcccggcctgcttcacagtttctatgggttaggaatttgggggtggcttagctgaggcaggaaggtccacttccaccatggctcactcagatgacttgacaagaagcctcagttcctctctggctcttggtagaagctcagttcctcaacaaagggactttcttttttcttttttttcaattttatttacttcttttttggagacagggtctcactttgtcatttaggctggagtacagtggcgtgatcatagttcactgcagcctcaaattcctgggctcaagtaatcctcctacctcagcctaccaagtagctgggactaaagatacatgcccccatgcccggctaatttatttttatttgtttgtagagatggggtctcactgttgcccaggctggtctccaattcctgggctcaagcagtcctcctgcctgactctccaagtgctgagatttgtgtccagccacaaagggacattttcatagggcttcctcaggacatgacaatgggcttcctatagtgagcaattcaagagagcaaggagaaacccacagtgtcttttgtgacctagtcttggaagtcaaccaccagcaattctgattctattcattaaaccaagtgacctcagatgatcagccagccaacgtgctgggatgacaggcatgaaccaccatgtctggcaagaaattttgtaattcctttaagtgttatccttaaaaacaagtgattgattataaaagttgtatttcttcatcctaaaattggtaaaaaataaaaaaaaaatgtgtttagtttctactatgcatttaggttttttttttttttttttttttttttttgagacaaagttttgctcttgtcactcaggctagagtgcattggcacaatctcggctcactgcaacctctgcctcccaggttcaagaggttctcctgttcagcctcccaagtagctgggattacaccaccacgcccggctaatttttgtatttttagtagagacagggtttcaccatgttggccaggctggtctcaaacttctgacctcaggtgatccacccgcctcagccccccaaactgctgggattacaagcctaagccaccatgcccggccctttcatttagtttctactattcatgtacacatgtaccctgttttacccacagacaactgtgctaaccgttaagaatgtcccagccttactaagattttcctaagtttgtctcccagacattgggaactcaaaggtgaagaaacttaggtgtgaaggtggattgtggattcagacctccttacttggaggccagtgcagagacacaccagcagagtaacctcgggtacatggcttcacctctccaagcctcacactcctcatcagtaaagcgaggattagtggaacctacctgttggcttgttttgatgattaaatgagataatgtccgcgaaaaatatttagcagataaatgttcactaaattttgagctttaaaaaaatgttttaccagccaggcgcggtggctcacgcctgtaatcccagcactttgggaggctgaggccggtggatcaccttaggtcaggaattcgagactagtctggccaacatggtgaaaccctgtccctaccaaaaatacaaaaattagccaggtatggtggtggacgcctgtaatcccagctacttgagaggctgaggcaggagaatcgcttgaacccaggaggcggagttggcagtgagcggatatctcgccgccgcactccagcctgggcaatagagtgagactacatctcaaacaaacaaacaaacaagcaaacaaagtttaactgaaaagtctttcctgacaccttttcgctactgaaaatcttacagcccctcccggccgcagcctacactccttcggcccaagcaggtgcgctggaaccggcagttggtgagaagccggctgccggcagccccaacccttagcggccccgcggtcagggacctccaggcccgatggagagtcggggcgggctagtggatgcgcggcggggacgggaggtgtcgccgctccggcttgccggtgacaggggcgggcgggtcgtgcgcgggccccacctccagcgatcgcagcccagccccagctcctcctcctccacggcttacccgggctccgacagcggctgcaggtctccaagttgcggccgctggagcccgagccatgcggaccgcggaccgggaggcgcgcccggggcttccgtccctgctgctgctgctgctggccggggccgggctgtcagccgcctcgcccccagcagcgccgcgcttcaacgtgagcctggactcggtccccgagctgcgctggctgcccgtgctgcggcactacgacttggacttggtgcgcgccgcgatggcgcaagtcatcgggtgagctggggccctggacggggtctgcggggacaccrgccctgcgggtcggagtcaaacgcgcgctgctcagagtgctttaaacggggacgctttactccccgccacccttggagaactggttttggctgccgccctgagcagcgtccgggttggggagaatccagcgcggcaggttcrgctttcaagttcggtgtcacccgtggcacgccagtccttgagccattccgggtcagcgtggcgcgcgagttgtcgcccgggctgcatagctaccaaggaggggcaacccgcgccttccttgcgggcctcgcgggccttccaagcttgcccctttgggaccagcctcactcgccctccccattcggagttttcttacccgccgccttccccccgcccccttccccccactcccgggaggctgcagattgagtgacgccgcgcctgggcggtccactgactggggagcagtggccctgagacctcacgccctaaggatgtagccccgctcgcagtgcacacgcagtcgcacgccgccgacctctgagcgggtcagacgcccttgtgctttttgtttctagggacagagtccccaagtgggtgcacgtgttaatcggaaaagtggtcctggagctggagcgcttcctgccccagcccttcaccggcgagatccgcggcatgtgtgacttcatgaamctcagcctggcggactgccttctggtcaacctggcctacgagtcctccgtgtgagtgccccaagccsgcgcggagtaacgcggggcttgcgggggcccccgacacagactagcgggaggagacatattttccgtgtgataaaaacagggcggtgcctgcttgcctrgaaacctccagcgcttcctctttgcctctctgggtaaatctgagctgcacatcgtaggcttcgagagggaaagcagattctccgattcaacactaaactttccctctacgtgtagccccgggttttctcttccccaatccaggtagcgtacttttaaaattctgctcaaaggccgggcgcgttggctcacacctgtaatcccagcactttgggaggccaaggtgggcagatcacgaggttaggagttcgagatcagcctggccaacatagtgaaaccccgtctctacgaaaaacacaaaaaattagccaggcgtggtggtgggcgcctgtaatcccagctacttaggaggttgaggcaggagaatcacttgaacccgggaggcggaggttgcagcgagccgcgatcgcgccactgcacaccagccctggcgacagtgcgagactctgtctcaaaaaaaaaaaaaaaaaaattctgctcaaaacgtacttttccaggaagtttttgaaactaagcctcctctcatctggaccctttagttaactcagtggccttccagctctatactggcagtggctcatctctgcccttatttgtcgccctgcatttatcctttcatgtgtgtcgtggctgaagtgtctgtgtccaccagggctggggcgacagggaacactgctctaatagggccagccagtgtttggaccgggaagtgggcatgataaaatgtgcatccaggctgggcgcggtggctcacgcctgtaatcccagcactttgggaggccgaggcgggtgaatcacctgaggtcaggagttcaagaccagcctggccaacatggtgaaaccccgtctctactaataatacaaaaaaattaccagggcctggtggcgggcacctgtgaatcccagctacttgggaggccgaggcaggagaatcacttgaacccaggaggcagaggttgcagtgagccaagatggcaccattgcactctgcagcctgggcgacaaagcgagattccatatcaaagaaaaaaagtgcacccagaagtgaaagcaacatggagtgtgtggttgatcccaggcaaagtgcaggggaccactaaaggtttatgggctcagtaataggccctggaataaagagaggttttgacttggtttcttccttcaatacttattgttttgccagcagactagcttcatctcgtaacctcttgtacatacttagagcttcttgctgcctaaagatgatgggggtagaaaagatcttggaataatgaaactttactggcccaggcattttcccagaacacctaggcagagtaagctaaaaagcactgcgactgccttcctcttcaggaaatgctttcaggcacagaaaagacacaggcctgctaaataacatgcttttcagttgaactaagttattawaattttaccacctccctctcctacctccaactttttcctatttttaacttacagctttctcaatgaaaaatcacgaatcatttttaccctcatctgttggagtcaccatattcaaacacattaaagcaaaagttctagtaaaaacattctaacttttggatttgatactaaggtatttattgaattgcctaatagcaccattcaattcactagcattaacaaaggaaatgctttcttctcatgttggaagtaagccttcttgaattagaataatactagctaccctttattgagcctactgggtgccaggcacttcatgaacacagtcccgtggggaagatggtatcatctgttttgtgatgtggaaaccaagcctcagtggggccaccttgctggaagtcaggtggctggtgagtgctaaaagcatgggaatctccagttcgctgcagtgcctttcaaagcagagcctgtttcctcatttgtctcccatgcttgtgcactgctgcatcacactacaacatttgggcctgagatggaagtattgttatcttgccaattttgaaaaatcgcctctgagagagatcccacaaactttgctttagtacttcccatgtcttaccagtcccctccctgacctgaactctttgaagttaagctcagaaaccttggagggtggccggccacagtggctcacgcctgcattgccagcattttgggaggctgaggtggatggatctcttgagcccaggagttcgagaccagcctgggcaacatggtaaaaccttgtctctacaaaaaataccacaaaattagccggatgtggaggcttgcgcctgtggtcccagatactcaggaggctgaagtgggaggatcgcttcagcccgggaagtcacggctgcagtgagccgacattgcaccactgcactccagcctgggtgacagagactcaaaataaataaataaataaataaataacagaaaccttggagggaattaaaactgaccaagtttccgtctttattttattttatttatttatgtttgagacggagtctcactctgttactcaggctggagtgtagtggcacgatcttggctcatcgcaacctccgcctccctggttcaagcgattttcctgcctcagccccccagatagctgggacaacaggtgtgcgccaccatgcccggctaatttttgtatttttagtagagatgaggtttcactatgttggccaggctggtctcaaactcctgacctcatgattcacccaccttggcctcccaaagtgctgggattacaggcatgagccactgtgcccttgcccagcccaagtttccatcttwaaacaaacaaacaaaaagtaacacttttttccccaattataaaagtaacatgtaatcrttgtagaaaatcagtaaatgtagaaaagtaaaaaaacaaagctaaccaccatcctgttattaaaaaatgaccagaaaaacccttcaggatattttctctcagttttgttcatgtggatatacatatttttccctctggtattggacatactgtatataaatattttttcatgtacagttaaatattctcagagaatatggatagatacttaacaagcctcctcctctttttctcacaatacttctgttcatagagattcccccttttttaaaattatgatctctgtgcaaggagctggagagagaaaggaaaagtgccaagtcccttaagagccagccattttcccaaggggacaaaatgaaacatttgtgaaacaatggtttagtgttactttatttgctctgaggaattcatatatggagaggtgagcttgagctggctttgaatcatgtgttaaatagaatacatgctgccatgcagaggaaaaagcagagttcagaggtgtcctgagcccaggatgggttagtttcacttcagatttagactgaggatgaaattctcacttactatgcttatgatgccctccatgtgtgctaagggtaaagatcctagaaacactgaatgaacacagatgagttgtatccagttgtgtttttcatcttgaattgttaatctatattcttatacaagcattatagcacatatatcagttataaggaagaaaaacttttactttgaggatttgttttacaaatgaaaaactccttttccttttttttcttatttgtcttattcattcatgttggacttttcccttytctcagrttctgcaccagtattgtggctcaagactccagaggccacatttaccatggtcggaatttggattatccttttgggaatrtcttacgcaagctgacagtggatgtgcaattcttaaagaatgggcaggtataatccgtaccatataagataaaaaatcagaaagatttgcaaactcaagttagcagtcatttggatggcctgctaacttaagtgtgttatcagtgtaagacacaaaaaaatcacacccctggaaaaacaaagccagaagagaggtttgcatcaattatgcttataggaaggacggtcatttattatttattattcagtgtctacttaaagaggtcacccagttttccatagggaaatctcttttagagagtgatcaatcatccacttatgcagagtcagctctttcctctgctttcccatgcccaggctgcttctggaatatggaggggctgggtagtgcaataactagaaacacccaactttgggatctgacagtcccaggtttaaatcttgattctatcaattactgtacttcctttgtgaacctgagaaattactcattccctaattttgcagactacagctcatggaggctcataactactttactgcgatagttataaatgttaaatgaagtagtctatgtaaagttgtagccaaataataaatggtccttcattctgcaagtgtgattgacccacaccactttcttgtgtatgatctttaaaaaattatacttagatyttttgtttatagcatggtccctttaaaactataatctagtgtgtgctgttgtcaactgtgtaaacttttagagagacagaattaatcaatgttcattgagtacgcaaagcatgttttgctgtaaaacagaatacagagtgcaaaagccagattttggctgtaaggacaaggactatattccctttgttctttgcwtttaggggttgattcacaaatactaaaaactcatttactaactactcagtcatctgcttttacaaacactttttttcataaaaarttcaaacagtacagaaatatttaaagtaaaagtttctcctttccagtcccatttctttactttgccactattaacaatttgatttctagctgaattactttaaaaatgattttaartggtaacgataatataaatgcataataaattctcaaaggaaatctgctaaatattaagttattactgaatgaaggataatattatttattatttattcatgttttttctccattgttctataatgagctaatactcttaataaagagacaaaggaataaatgcaatgaaaataaattatttcagctgctctgaaactcactctaatagttgttgcttcatttgtttttgtttttcctggagttcccatgaaataatctatagagaaatagtctgtagaggtagttttactctcagtactcaggtgactgttactgaatatagacagtttacacttgggtattgcttttctatggaggactcawggccaagaaattgttttatgaaattaagaacaggttatccacaaaataattcatctctcattcttgtctagtgtttgtaatcttaaaagtatttttggctgggcgcrgtggctcacgcctgtaatcccaacactttgggaggccgaggcaggcgaatcacgaggtcaggagttcaagaccagcctggccaatgtggtgaaaccccgtctctactaaaactacaaaaaaaaaaaaaaaaaattagctgggcrtgtgggtgggtgtctgtaatcccagctacttgggaggctgaggcaggggaatcgcttgaacctgggaggcggaggttgcagtgagctgagatcgcaccactgcactctagcccagtgacagagtgagactccatctcaacaacaacaacaaaagtattatcatacacaggacctcattcgatccccccagcagccctgtgaagcaggcataagtcaacattttaatctttactttctagatgagggggcccagcttcacagagactgacttgccccgaatcacaaggcctctagagacatggcagaggtagggccagaacccaggcgttaggcctactgatagtttttgtttacagccttaattaggctgtaaattattattattattattattattattattattattattattattactactactattgtttttatttttgagacagagtctcgctctatcacccaggctggagtgcagtggcgcgatctcggctcactgcaacctctgcctcccatgttcaagcaattctcctgcctcagcctcccaagtagctgggactataggagggtgccaccacacccggctaatttttgtatttttagcagagatggggtttcactatgttggctggtcttgaactcctgagctcagataatccacccgcctcggcctcccaaagtgctgggattacaggtttgagccaccgcaccaggcaccaggctgtaacttaaaattccctgctaagggtttgtttatgttaactgactaggcagaaacaactgggaagtacaaacagaagtaaagacagattttcagagctgcaagataaaatatcttacaaattatatctcaaaattatttataattatgtatcgtaattgaaaactacgatgtgannnnnnnnnnnnnnnnnnnnnnnnnnnnnnnnnnnnnnnnnnnnnnnnnnnnnnnnnnnnnnnnnnnnnnnnnnnnnnnnnnnnnnnnnnnnnnnnnnnnnnnnnnnnnnnnnnnnnnnnnnnnnnnnnnnnnnnnnnnnnnnnnnnnnnnnnnnnnnnnnnnnnnnnnnnnnnnnnnnnnnnnnnnnnnnnnnnnnnnnnnnnnnnnnnnnnnnnnnnnnnnnnnnnnnnnnnnnnnnnnnnnnnnnnnnnnnnnnnnnnnnnnnnnnnnnnnnnnnnnnnnnnnnnnnnnnnnnnnnnnnnnnnnnnnnnnnnnnnnnnnnnnnnnnnnnnnnnnnnnnnnnnnnnnnnnnnnnnnnnnnnnnnnnnnnnnnnnnnnnnnnnnnnnnnnnnnnnnnnnnnnnnnnnnnnnnnnnnnnnnnnnnnnnnnnnnnnnnnnnnnnnnnnnnnnnnnnnnnnnnnnnnnnnnnnnnnnnnnnnnnnnnnnnnnnnnnnnnnnnnnnnnnnnnnnnnnnnnnnnnnnnnnnnnnnnnnnnnnnnnnnnnnnnnnnnnnnnnnnnnnnnnnnnnnnnnnnnnnnnnnnnnnnnnnnnnnnnnnnnnnnnnnnnnnnnnnnnnnnnnnnnnnnnnnnnnnnnnnnnnnnnnnnnnnnnnnnnnnnnnnnnnnnnnnnnnnnnnnnnnnnnnnnnnnnnnnnnnnnnnnncctgccttggcctcccaaagtgctgggattacaggtgtgagccaccatgccttgccaaagtacttctttgaaaaataaaatttggtatcagaaataactgataaaggctagctgtggtggatcacacctgtaatcccagcactttgagaagccaagacagaaggattgcttgagcccaggagtttgagacgagcctgggccacatagggagaccctgtctttaggaaaagcaaaaaaaaattatgtatatatttatatatcagtcaggtttggtggcatgcacctgtggtcccagctacttggaaaactgaggtgggaggattgcttgagcccaggagttcgaggctgcagtgagtcgtgattgcaccattgcactccagcctcggtgacatacagagtttgatttttctcctgcaggttacatagtggtatcttgcaatcactggagcttgtgaccttaatttaaagtaggagtgatgcctataattcatgggatagttgtgaggattaaatgaaagagctttgttaaaggatttttaaatatttaaaatttaaatgtgattattattggtgaacagtcccactttgatattctaacttcacagagcttataaaatatgtgatattcatctcttataatcaaatcaaaacaagttttattttattttattttatttttgagacagagtttcgctcttgttgcccaggctggagtgtgatggcgctatctcggttcaccgcaacctccgcctcccgggttcaagtgattctcctgcctcagcctccmtagtagctgggattacaggcatgtgccaccacgcccggctaattttgtatttttagtagaatccaggtttctccacgttggtcaggctggtcttgaactcccgacctcaggtgttctgcccaccttggcctcccaaagtgctaggattacaggcgtgagccactgctcctggcttcaaaacaagttttaaagtaagactccacttgctacttctaggatggggcttcttaacctgctttgtgcacccctttggtgaatactgttttataaatacataaaataaaatacgtaggattacaaaaaaaatcagttgtgttgaaaacagccatttcaatgttatactttttcttaacacattaaatagtaaggtttagcagggggtctaataactaccatgatttcaaagtagtaaattatggatagtgtttcaaaatawctgcagccaacattgtgtatgtgaaaatatctgtgatttctactagtggcaaaattataggcaccactatgattgtgtgatttgttgcatgcattcattatagaaggagttaaatttcagttagaggttagtgaaaataaagatgcatctttttttttcccatccaaggtcacaaatctactaaaatctatctatggaccacacccccacccaccccagcttaaggttaagaacctctgtcttagaagactatktcagagttttattctattgtgttggaatttataagaaaaaaaatccagaaaattgtggggcagaacaggtgatttcagtgtatttgattggaatggtgaaatgatccatgttatctcttgatttcagattgcattcacaggaactacttttattggctatgtaggattatggactggccagagcccacacaagtttacagtttctggtgatgaacgaggtaatcaaaacaaacccctgtgtaattttagctacattattgttcagttctatccaagcacttccttcactcacccaacagaatatacagaacacccactatgtggcagggacttccatcctagggggagaaagtggacagtatgcatggaagcaatgaagatttcaggtagcaataagtgctgcaaagaaagcaaaataggaagctgtgatagagagtgaaggaggaggtggggtggttagtacaggtcagagggtcagagaaggcctgacccatgtgatccgggagctagttctgcagaagccaggggaagaccatttctggtggtcttaccgcaaggatgaaggccgtaggtagtaataataagcttggtggatttcagaagccaaagaaagtcagtgtggttatggcatgggagtaagtgggtagtgacattagaagtgaagaagaggctgaggccatggtgcagggccacaatgaagagtttggtttttaagcataatggaagctgtagggggattgtaggccagggagtgaacagatgtgatttatatttttaactattacttttgctgctctgtagagattgggttgttttaggttaagatggaagcagaagaccatttggaaactactgtgataatctaggggatatatgatgctgttatacaagccacatttgtaaagcactttctggtttaccatgtacatcctcacatgtcttcttcttagaccctcacaacagtcctgttaggcagggctgttatttttaactccattcgttaggcagagaaagaaataggctgtgagatgaaatgacagctagtagtgggagaggaagttctcagattgctctcctgggtcctgacccaattgctctgttcattgacatccccactgccattccccagatctcaggggaacaccatttagttccacagtatgtgggaaatctagaaataagtgagctctgtgtctgtcctcagcgtgcagctgaatcaaggagaaggatatatacaaggagtatcttgaagtttagtgttgctcgtctgatgaaccctgattgacttcatggtgttgtttttttggggtttttgttttgttttgtttgtttgtttttgtttttttgagacagtctcgccctgttgcccaggctagagtgcagtgggcgatctcagcttactgcaacctctgcctcccgggctcagccgattctcatgcctcagcttcctgagtagctgggattacaggaggtgccaccacacccggctaatttttgtatttttggtagagatgggttttcaccatgttggccaggctggtctcgaactccgaacctcaggtgatccacccacctcggcctcccaaagtgctgggattacaggcgtgaaccaccatgcccggccagtgttattgtttattcttatctttttacataargctttaccaggaagatggtgattgagtatatatcagtgtccacagtaagcagttctttatcctaatgtatttcttccacattttctcatatgtcagctatgtatagtactggttctcaacctgtggtacccaaaccacagcatgacaattactaargtttttaatagaatgcctataattacatgtatatttattaaaaatgactggctttcattttgcaactcaagttgtttaccaaacttgattagtagaatctaaggtatgagcagttaaaaataaccaagttagtctacaacatatgcatttaatgaaatactgtcaaactgcttttagccaggcatggtggcacctgcctgtagtcccagctacgtgggaggctgaaatgggaggatggcttgggcccaggagttacaggctgcaatgagctgtgatattaagtctctggacattatggggggtgccagcaatgcctcaaagccaccctaggaaaggataaagatatgaggaggactaatgaatgccacagggcatggggaggcttaacaaaacacctggtgggtaacacctgaagactccagggccagtctgcctgggtttaaatcttattgctgtagctgggtgaccacgatcaaggagtttaacctgtcggtgcttcagtttcctcatctcgaaagcagggatgggccgggcgcggtggatcatgcctgtaatcccagcactttgggaggccgaggcgggtggatcacgaggtcaggagattgagaccatcctggctaacacagtgaaaccccgtctctactaaaaaaaaaaaacacaaatttagccgggcgtggtggcgggtgcctgtagtcccagctaggcgtgaggctgaggcaggagaatggtgtgaacccgggaggtggagcttgcagtgagccgagatcgcgccactgcactccagcatgggcgacagagcgagactccatctcaaaaaaaaagaaaaaaaaaaagcagggatgataatagctgctatgaggatgaaatgaattaacgaatatgaaatacagcagtccctggcacagagcaagggccacagaagtgtttttgttgttgttgcatctccaggcctggcctcctctgagtcctagactggagcatccagccatcttctcagcatctccactctgacgtctactaggcatcttacacttgcctaagcagatctcttgcttttttcttttccctattttctacccaactctgcctctactcaaatctgtccctctcctcgtttcccatgtctcagaaaatggcacctctacccaaccaattgctaccagaaatcatcactgacccctcactccctaagtcttatcagctctgacagcagaactagactgtacctgtccattctacctccactgctgagctagcccccatcacacctgtactgcctgattagtccacctgatctccttgctactatttttactttcttataattccttccctacccagcaactagaatggtcaggttgttcccctgcttaaaacctactgtgacagatattgcatgatttcacttatatgtggaatctccaagtttgaactcatagaagcagagagtagaatggtggttgctatgcactgaggaaaaagggaaatggtcaaagggtacaaagtttcaattagacaggaggaataaggtctggtgatccacacagcaaggtgagtacagttaacaatcatgtattatgtatttcaaaattgctagagtgggtttttaaaaattaattttgttattgatacacattacatgtgcatattttgggagcacatgtgatgtgttacattcatataatcacatcagagaaatgcaaatcacatttttatttctcttaatgattaatgatatggagtatcttttcatgtgcttactgcccatttgtatatcttctttggagaaatatctattcaagtcctttgcccatttttttttgwttgttttgagacagagtctttctgtctcaaatcacacattcataaatgcacgatcatgtgygcacaatctaattgtgatatgttaccttaaatatttgtcttttctttacactagaaacattcaaattctrgctattttttttggcgggggkggggggcattaaaaatttttttttaatttttttttttagtagaaacaaggtctcactatattacccaggctggtctcaaactcctgagctcacgcagtcctcctgcctcggcttcttcccaaagtgctgggattacaggagtgagccactgcacaaggcctgttttttttctttttctcttctttctgttttcttaagacagagtcttactctattgcccaggctggagtacagtggcgggatcttggctcactgcagcctcaatctcctaggctcaagttatcctcctacctcagccttctgagtagctgggactacaggcatgtgccatcatgcctggctaacttttgtagaggtagggttttgccatgttgcccaggctggtctaaaactcctgggcacaagtgatccacccactttggtctcccaaagtgctgggattacaggcatgagccactatacctggccaatagtagccatcttaatgggtgtgaggtggcatctcattgtagttttgatttgcatttctctaatgattaatgatatggaatatcttttcatrtgcttactggccatttgtatatcttctttggagaaatgtctattcaggtcctttgcccattttttttttgttttgagacagagtctcactctgtcactcaggctggagtgcagtgactcaatcacagctcactgcagccttgaccaacagcgctcaagcaatcctcttgcctcagcctccccagaagctgggactacaggcatgtgccactatgcctggtagtttttaaattttttgtagagatggggtttcactattttccccaggctgatctaaaactcctgggctcaagcactcctcccacctgggcctcccaaagtgttgggattacaggcttgagccagcacatctggccctttgcccatttttaaattggaatgtttgttttgttgttgttgagttttaggagttctctgaatactctggatattaatctcttattaatgcaaatattttctctcaatctgtgaattgccttttactctgttgataccgtcttttttttttttttttttttgagacagagtctctctctgtcacccaggttggagtgcagtggcctgatcttggctcactgcaacctccgcctcccaggttcaagcaattctcctccctcagcctcccaagtagctgggattacaggtgcccgccaccatgctcagctaatttttatatttttaatagagacagggtttcaccatgttggsgaggctagtgtcgaactcctgacctcaggggatccgcccacctcggcctcccaaagtgctgggattacaggcatgagtcaccacacctggctaatactgtcttttaatgcgcagaattttaaaaatttttgtgaaattcaatttgtccatttttttcttatattgccattacttagccttgaatgaaaacttttgtttggcaatgaatcccctaacagacttttaaaagttgtccaaaagtaattttgggaaatgattgcaaatttgtatttttttaaaatgtgagcacaaatcacaggtgtggaagaytcaagttctstatgttcttcctaatatttattaagacacttcccttgatggctacataattttrttttgcctggcataattaatagaattatttcctttgacataactatcattgtatcctggtacaaaagattctgctttcaaaacttgagtgaatatctctctatatttccttgctaaaataacatatctgtttcatgtgtgtacatatatacacacacatatataacatatatactcaacttggcagataaaggctggtggtgggagaatgctatcgctgccctgtttcggagacacattcccgtcagctggctgatccgcgctgtgagtatatttaatgtggagccctccttaactccacctccaccttctaaactgttctgtgtcatttaacaatgttgcttttaatgtaaggagctccttaaaagaataagcatctaaatgtctgcaaagtgcrtataaatctttttgataaatgtcaaagataaagccagacactagttaaagtggtaaggacagattgtaatcagtatatrctattggagtaaggaagagtccagtgtgaactgagctcaacttcggtttgtgcagaggtgatgggtattttaaaaggtgagggaacaaggagcttaggatagtcagagaagtgaaaagtggaaaggcgggatcggttcatgtgaaaccaatttgagtttgcgaactggaacttagaagttatgctccaggcagggcgcagtggctcacgcctgtaatcccagcactttgggaggccaaggagggtggatctcgaggtcaggagattgagaccatcctggctaacacagtgaaaccctgtctctacttaaaatacaaaaaattagctgggtgtggtggcatgtgcctgtaatcccagctactcgcgaggctaaggcaggagaatggcgtgaacccgggaggcggagccggaggctgaggtaggagaatggtgtgaacctgggaggcggagcttgcattgagccgagatggtgccactgaactccagcctggtcaataagagcaaaactccgtctcaaaaaaaaaaaatgaagttatgctcytaccctcctacagagacagggagacaggggccctaccttcaggtattggctggaacaaatggcaaattcttttgacagcctggagttttctcagacaggcactttaagggggactagtcatctgagagacgtggccttgagctgttagaaactattagtatttgttcgagtctttataagccagggtcaaggtctaatagagaagaggtctcagaggagcctggctagagtttggttaaggagagaatctttgtcataggctagagttttccacaatagctgattgagataggagataatattatgctcttctacagagacagatgtactccccttttaaaatctccatttgcaaatatccaaactagcaaagcaaacacattagaagccagctgtgcacacaacaaaaggaacatctgctctacaagaacctattaaaatgtgctgggttccaggccacatctacagtagtctccccttattcttggtttctgttacycacagtcaactgtggtccagaaatatgaaatggaaaattccagaaataattcatcggttttaaattgcacaatattctgaatagtgggatgaaatcagtcacctagtaactgtctcaattatcagactgttacgcatctcagtgcttgtgttcaaggaacgcttatcgtacttaataatttgccacaaagtgcaagaatagagatgccagcaacttgggtatgacaaaaagaagctgtaaggtgtttcctttaagtgaaaatgaaacggcctcatttgtctggggtgataccttagatttgttgtctcagggccacagaaaactagaatgcggacacaccagtgtgaggttaagagtggaagtttaacaggcgaaagaaagagaagagcaaagaggagtcccaaaaaaatgagttgctgcttctgtggtgaaatgaaggaggttttatggatgagcttgaggaggtggtaactgatttacatagggcagcaaagattggttggaccaggtgtaccatttgcatagggcatgaaaagctgtctgcccccaccctaatcttttattatgctgatggattctctacctggctggtgccatgttgcctgcttctttactgtacacatggtgacaaagaaaagggaagatgggccgggcgcggtggctcacacctgtaatcccagcactttgggaggccgaggcagagaagtgaggaggtcaggagttcgagactagcctggccaacatggtgaaaccccatctctactaaaaatacaaaaattagtcaggtgtagtggcgggtgtctgtaatcccagccccttgggtggctgaggcaggagaatcacttgaattcagaaggcagaggttgcagtgagccgagatcacaccactgcactccagcctgggagacacagcaagactctgtctcaaaaaaaaaaaaagaaaaaagaagggaagatggagcctccgttttgaacatacctggctcccaggtagcccttttctgttggcacagctgctggcattcacccgtgcaagcttccagcttgcttgtctatgtttgcagctcgatttttcaggctgctctttgttagaaaagaataacttcttgggctactttttgttagaaaggaagccttgccaaggactcttctaccctcactatctgcctaatttctttctatctcctgtatcaaaaaggtgaaagttcttgatttgataaggaaagaaaaaaaatccatatgctgaggttgctatgttctctggtaaggacgaatctgctgggtgtgatggtgctcgcctgcagtcccagacactcaggaggctgaggcgggaggatcccttctgcccaggagttcaggtccaacagacaacattgagaccccatgtctggaaagaagtaaataaatgaaataacaaaagaaactctgggacctagactaaaaaaaaaaaaggaagaagaaagaaactccatgtctattagcagtcactgcccatttcctccatttcctgagatagatgcatttgcactccctgactttgtcgcctgggtaaaataagtcaccagtgccttcagtattttttatggatgttcttttgctttgctgtcacaggttagagaaaatgaatttgatagtagttgggggatggtataggcaacataagcaaacaaatatttcatcactcctattacctctgcaaaggccaagggaaaatttcttctttgccctctgatggttcactgaaaagtcaactcacaaaaggcagattaattggagaaaaggcatacaaatttatttaacatgtacatgacataggagtcttcagaatgaagacccaaagatacaggggacattgtccatttttatgcttaggtttaacaaagtatggaatgccatgtagaaatatgattgaacaaaaaggtagatccagtgctaatagatggagtggggaaacccagctaggcctgtgtgtctagattcttcttggcctctctgaccatacattcccttcttccaggtacagggcaggatcctctctggaaaggggatcatatgacctacagtcaaacaagttaggacagatcatttctttttttttttttttttgagacagggtctcactctgtcacccaggctggagtgcagtggcatgatctcggctcactgcaaccttcatctcctgggttcaagcaattctcccacctcagcctccctgcatagctaagtataaggcaggaaaactctacaaagccctgccatgggttttgtagagttttcttgccttatggttattgctgttaaggtttatggtgctgaatgacggagcctttgcagacaccaataccttgaattgttcttttgtttgaccctatcaccacctccacccttgacaatgtgccctggcaatatccaggatgggtgagcatacagtgtacttcctttaaaacatggcagcagagtggttgtgaaggtggagacaggaagagcaggccctccaccgaaggatattcttgagcagatcagctctaggaaggagcccatatggaatctgaagatttggggagtgatccccttaagtatccttgccacaggcctttggaagtcatcatgcgccctcggggtgtctgaacaccagttaagctcagggcgctaatgtagcgcatgctctttcatccccaagcctttgccagtctagtccatcgaactagaaccctcctccccactgccactcctcaccctgcaaccaccactttcaccactcacttgtgtttgtctctttagcttcaattcatgcgatgcttcccagcagtacctcctccactgcccttggtgaggatgggacccctactgtgacgtccatagcatcttattctcctatgtgaactctcattacactgtgtcaccattggttgttgacttttctgtcttcctcagaggcttggggagaataggaccaggcgactcattcactgctctatcccccaccagcacagtgcctggcacagtgtagatattcaagaaaaccctgtttaaataataaatgaatgaagaagcacaaaaagtcctttgtgagggcgatctgcctggagagcacacagccsgtgtttgctgagccaggcctagggcttgtcaacagttctctcctcctgtcagaatttcctgctgctcctggctccgctttgaagctgaaatttcttccatcttaggagccctgataacaagaggataaggtcagagcagatcaaggtgatagtcatgacataacatatcaggagaatgtgctttggatcatttttgcatcatctggtgtggacccaactgcaggtggggttgctcacgcaagttcatcctttygttcagaycctgartgagtcggaaaacttcgaagcagctgttggcaagttggccaagactccccttattgctgatgtttattacattgttggtggcacgtccccccgggagggggtggtcatcacraggaacagagatggcccagcagacatttggcctctagatcctttgaatggagcrtaagtagaattgaaagctctggtcattttgtatcagataatcattttttttaatcggtgaaatgaggggtattttaaatttgttcatatgtctcctctgctatgtcgtaaattgccttggataagacaagatgatgtgctctgttgtaggtggttccgagttgagacaaattacgaccactggaagccagcacccaaggaagatgaccggaggtaggctgctacgtgctttctggtttgcagtgttttcttatggtcaggagaatatgcccattctgtcacaggaactggcaagacctatgggtgctatcctctcccagaaaatgtacctgagccccttcgccagtgccttggcygggaagggagtgttgtgtggaggagagcagtgggcagagcctctcagcagctgggcgggtgttgggaggctgtcagggtcaggagccctagagcccaccaccagctctgctagtgactcactgggtggctctcgggcctctgtttaccagtctgtaaaatgaaagcaaagggccaggttcatggtcttctaggcaagatatttttagaaggaaattatttcccttatttaaacaataaataaaccagtcaagggtttttattgtcccttcaagttgtaaacattctataattataagtcagcacagttccaaagtgcaggtagctatatacgttgccttggctttactaccccacaagtttggccactgttcagttctgcagccacacattttcatcatcccagctttctggagcagatggtgccaaccgtcccagctgctggatgaattccactgtggtgggctgggcctcagcaggaaacaggcttggggccagaatctgttttggagaaagggagataatgagactggagcttgcattctgcctcccaaaaatgacagctgatgggcttcagtgcttgttgaaatgccaagtgacyttcgacctttgtccttacagaacatctgccatcaaggcccttaatgctacaggacaagcaaacctcagcctggaggcacttttccaggtaacttgtgtcacagtgtcctgcatacctaggatgtttggtgttttgttaatagtgaatatgaaaaactccgtgaaatcttctggtagatgaaaacgttagggtaaaagttttatttggttgaaatcatgtattaaaagtggtggctcacacctgtaatcccagcactttgggaggcctaggcaggcagatcacgaggtcaggagattgagacaatcctggctaacacagtgaaaccctgtctctactaaaaatacaaaaaattagccaggtgtagtggcgggtgcctgtagtccaagctactccrgaggctgaggcaggagaatggcgtgtacccggaaggcggagcttgcagtgagccgagattgcgccactgcactccagcctgacagagcgagactccgtctcaaaaaaaaaaaaaattatatgacattttctcaacttgcttttatataagttaaaatgtccatcttcaccaaagtttttctttatattaaaaagaaaaagtcatagttgtaatatatgttcattgtttaaaagaaaaaaagagaaagaattaaaaagtcaggccggatgtggtggctcacacctataatcccagcactttgggaggtcaaggcaggaggatcacttgaggtcaggacttcgagaccagcctggccaacatggtgaaaccccgtctctactaaaaatatataaattagccaggcttggtggtgtgtgcctataatcccaactacttgggatgccgaggcaggagaatcggttgaccctgggaggcggaggttgcaatgaaccaagatcatgccactgcattctagcccaggtgacacagcaagactgtctcaaaaaaaaaagtctatatcacctcaaggtacactaaagagtggttatgttctttctacagacattctttttttttcttttttagtaaagacagggtctctctatgttgcccaggctggtcttgaactcctgggcttgagtaatcctcccacgtcggcytcccaaagtkctgggattacaggcctgagccactgcacccggccctccatagatattctatgtgtatttcttctaccatgtaatcttctctataawatgactttttcctatgcagattttgtcggtggttccagtttataacaagtaagtggcttgttaaacatgtctgttcacacatcactccagaacagtgaactcactcacrtactgtttggctcagcaaggatctgagggctcctgtaaccaggctgtgggggcactcctgtgggggcactcctgtgggtacagctgcgagcaaaacaaagtctctgctctcatgggactaatakgggtggggtgggggtggtggtgataaacaaatataaatcaggtgagaagtccatgaagaaatccaaaggtaaaaagaatagagtgaccctgaaggaggctctgggaatttttttttttcttgagccagagtctcgctctgtcacccaggctggagtgcagtggcgcaatctcggctcactgcaagctctgcctcccaggttcacaccattctcctgcctcagcctcccaagtggctgggactacaggctcgtgccaccacgcccagctaattttttgtattttttaagtagggacagggtttcaccgttttagccaggatggccttgatctcctgacctcatgatctgcccacctcggcctcccaaattgctgggattacaggagtgagccactgcgccyggccagctctgggaatcttaaattcaaacttggccttccatagtgttgtcaaactagaaggaaaaacactttgactggctgacctcttgattcctacatttgaaatattctggcagtgaggtgttcatcctaactcagtcaggtagctgtggacagccttcacctgttaggagctccttagaaataaattctgaatacctttggttttcttttatcctccrgaggaatttccactatctccgaagctgttccttgttccactgacaattcgcttagttaatgttcttttttagcctgtacccttgatagcagcattctgtgagcaatggtttctctagtgtatagcctaggattttactcacattctttttaatttctttttcttttttttttttttttaagtgaaagcaggccaggtgcggtggctcacgcctgtaatcccagccctttgggaggccaaggcgggtggawcacttgaggtcaggagttcaagaccagcctggccaacatggtgaaacctcgtctctactaaaaatacaaaaatcaaccaggcatgacggtgcacgcctgttatcacagctacttgggaagcagcggctggagaattgcttgaacctgggaagtcgaggctgcaagtgagctgagatcatgccatggcagtctagcctgggcaacagagcgagactctgtttcaaaaaaaaaaagaaaagaaaactaattagtcagtattctgctactcaaacaaatgagctatttggataacaaagcatacccagtggtctgctagtaaaccagctctttgtgtgggaagggacaaatgaaaaaattcccaaatttgtagcatttgttgacttccatggtgtgaatactcccacatggctgatttcaggcttatagttggctcatacacttcctgcatatttaataattggccctcaccagactgtaggagctagctccaatgcactattgactgtacccttcatagcggggcacaatgttgcccttttaatagtcattttttaaatgggggttaataaactacttttgtgttcttatagtttttttaggtaattatagaagtgatgaatatatctggctgggcgcagtggctcacatctgtaatcctagtactttggaagccgaggcgggtggatcacttgaggtcrggagttcgagaccagcctggccaacatggtgaaacctcatctctactaaaaatacaaaaattagccaggcgtcatggtgcgtgcctgtartcccagctacttgggaggtggaggcaggaaaatcactcgaatccgggagacagaggttgcagtgagctgagattgcactccagcctgggcgacagagggagactccgtcttaaaaaaaaaaaaaaaaaaaaaaaaaagaagtgatgaatatatcttttaaaaattagtattataataaaatagttacatttattttaataaaacaaagcattttctctgctttgaacagccctcataattttacatggtggcagtggccagttggctgtattataattgagttaagcattctccagttgttagattttcctctattaaaactctgaaataaacatattcgtttgcctctcccctgcttactttcagattatttcccttggctgaattcccagaagtaggattactgagttaacagttatgaatgtttaaatggtttctgaaatggtttggtcaaaataaaattgttagaaattataaacagtttaccaagtagtgtttttctctgttgtatacttgaaaattcaagagaaactgcttttaagtgacaatcaccatggagccagaattaacacagacttctgactctcaggccctttacatgtaatgattaacctcaactgaggctgttcagttgtattaggttaatagaaataagtgtagctgtatctgaaaaaaagaaaaagaaacaacaaaaaagtagtctgaacaaaggcagttagctctatgctgcccctttgtgccatgctgcaaaattacacccacctgcaatacatctccatcctctgctgtggctcatcagtagagaaaatactaaaacagtaatggagagcagaactatgactaaagtaaacgagcaattaaggtcctgttcagggaacctccattacccttggacgagctctgcacttgcttacagtgctgtctttaactgggtgtatgatttagctgtggacccagtgctactaattctgcctgtttctgaacaacccagctccgatattttgcacatgcacctcaactggattccaagacaaatgtgtgtacatgtgggcacatgtgctcaagttgtttaggtctcttgttatacggaatgtgtaatcaatgacactatacttttcatccttagatctgggcaaggtggaggggcggggcaggtgccttgatcctggagctttagaggccctcctctggaattcctctagttgtgataccacccccccaaagcatggtgtaaggaatctgctggaccaagggcatttgcccacctggagtctgcccaagtacccaggaccctgtaattctcagcctgaacagccccacctccacttccagggtttgtgttttcctcttccctgggtgatattctcctgatggtggtgcatggccactgagagagagcacaggggcaggtgcttgctggggaatgtgaaggcggtgatgtcacatgtgtgcaagtaaggcccttgtgggtaggacagagccagggtgagggccaaggcttggtctcccccactgccttggggtagagctctgaggagtcttgagattttatttatttattttttatgagacagagtctcactctgttgcccaggctggagtgcagtggcgcaatctcagctcagtgcaacctctgcctcccaagtttaagcaattctcctgcctcagcctccctagtagctgggatttcaggcaccaccacacccagctaattaagtctgagaattttaagttccaacttggccttccacagtgttgtcaaaataggaggaaagtgcactttgacctcttgattcatagatttaaaatattctggcataaagggccttgtcccagatctcaagtgttagggaagcacttggtcattttcttccctttctggcatattagagaaaatgatgtgtacataaaatttcctcataattttcagcytcacaatttatactacggtaatgagcgccggtagcccagacaagtacatgactaggatcagaaacccgagtagaaagtaagtcagcagaagagcgagttcgcccgtgctgtgaaaggtttgttgttactgttttgtggagagggggtgaggtgggtgtgtgctggtatttcttacagagggtggtaacatccttaaaatgtatacatatataatattttctgacaagcatctggcattgtcatttgtgtcagattgtcatcattagatattttatttggaattgtttgtatgaaaaccaatcttcggcggggcgtgatggctcatgactgtaatttcagcactttgagaggcagaggcaggcagatcacttgaggtcaggagttcaagaccagcctggccaacatggtgaaaccccatctctactaaaactacaaaaaaactgttagccaggtgtggtggtgggtacccaaaatcccgrctactcaggagctgaggtaggagaatcacttgaactcgggaggtggagtttgtagtgagctgagatcacaccactgcactccagcctgggaaacagagtgagactccattaaaaaaaaaaaaaaaatcagtctttgaattaaatgcrtttttttcttcccttacagatgattttttaaaaaatgaaattcttgaagagctgcaccttaaaaaataagacaaagtgaaagtattgtattatgttacaaacaatgcaggctccttcctcatttaactttacaaccttgcgargtgkgtccaggagatttggagtttgtggtaaagccagtaatgggcattgtcctgcattcccttcccttcatggtttgcctcgatcctctctaagcttctatcctggcctgaataactcaaagataattggtctcagagatcaagccatatcctcaggccttatttccatcttctyatgattctgccatcatacctttgcttctccgctaatgaaatgagctggcaagacctctgttcattgtgaagtgcttctgaaagagcctaagaaaaaaggctcatctgaaagaaatggagaactctatttcgaaccaagcctgtttgaatgtgtgttagtctgatctttgatcatgtgtttccatgtaatgggagtctcgttttttataatgtttctaacgttttattgaaaaacctatggccctccttctttctcaatagctactttcttactgctttttgaaaataatatgcaaccaaattatttcttaatgtcacataattaagtaataaaatgtcaaaagaaatgttggcaaggagaataaaaaaatttccaagaaacttagcgttatgctctccctgctttctttacctccgaagtcttatggttctgaackgctgtcctgagaaagcaactctcttagttgtgatgttatttaagtgtcagcattcaagggaatgaacagctgcttggtagagtttgatttttcacatgtgcatgaaagaaatgtccttgaggatgaagtcagaaaaggttaaaagtgtaaacgaaaatgtgcctgaagcagcactcagtccatgagagrgttattttgccaaggctaaggaygtgcccgggaaaaagaaacaccagtcacaggaggacctgtcctgtgcttttcccaaagagggtttgaggaacttcggtatttaaaggggaaagagcaagcaggagcgggggataaaaagagggtagacagtgaggcaaatggttacattcttgtgagctcttattattggtgctcagtgaatctacatttagcacatgaaaacaagggaatggagggaaagtcaatgatgcatttatctcgtgctcagtaaatctacattttacataarataaagcaaccgtgtgaaattacagctatgtttgggaacaaaaggaaggcagttttggagtgtctcrgttcccaggcttaacttttcctttggcatagtgagtagaatgtctagaaggaagtgttatccaggtacagaacatcgctcccctgacatactgcagacgtctctagtggcccagaatattcgtgtttcttcttggacagtgtcgtataaataccgtttaattttcatcatccaatgcccttttaaaaatcaaatatgagaagtagtttactcatgccagctgtatcacacatcacacagccattgaaactagaaatttctactcattagtctttttttttttgagacagggtcttgttccaccacccaaactggagtgcagtggtgcaatctcggcccactgcaaactctgcctccagggttcaagcgattcttgtgtctcagcctcctgagtagctgagattaccggcatgtgccactatgcccagcttattctgtatttttagtagaaatgggcttttgccatgttggccaggctaaatttctttttttttttttttttccagacagagtctccctctgtcacccaggctggagtgcgatggcacgatctcggctcactgcaacctccgcctcctgggttcaagcgattctactgcctcagcctcccgagtagctgggattacaggcgtgtgccaccatgcccggctaatttttggtgtttttagtagagacagggtttcaccacgttggtcaggctggtctcgaactcctgacctcatgatctgccctccttggcctcccaaagtgctgggattacaggcgtgagccaccgcgcccagcctggccaggctaaatttctacttattagtcttattccatttttgttttcttgaaaatatgccatgatcttcggaaatttggggaataccctaattttaaccaggcaaagcgaaggcattgagggctgttcctcaggaaaatgatttaagtaatccaacactctagttgcttttcagatatttgtcctttttgttgaaaccgcctttgcaaagatgatgacagtgagagaagtctagcatggctgactccatcttccttctagcctcacaggctggctgtccttgctcgttcctgggcacagaccaagctaatcgtgggaggaatttagtttagagtttaactttaaagaaaggatgataataaccccaccctcagactaacctctgccctgctagggagtaaagccacctttgtaaaactaatggaaggctatgagattaggattatgggaagaacccgaattctgctaaatgtaggcgtagtttctataatcccttactgctcaggagtcatgtggctagaagtcaaagatttgtgacttccccaattgttcctgtagagaacatcactrctatagcacctaagattggtcttttgagatgtttttcagacttttgcattctggcaaccactggaccccaccaggacctgtgaccatgagtcaactagtcctgtggccctcacccaaagggcatactcagtgcataaagactgttttccatacccctgtaatttcatccccaatcagcaacccccttccttagcmcccagctcaccaaattatccattaaaaccctagcctctgagttcttggagagactgatttgagtaataacayccatgctcctgctaggactgttaattgaactctttctctactgcaatagtatgatctcagtgaattggttttgtctgtgcagtgagcaagaagaacccatcaggtgattgtcaggcctctgagcccaagctaagccatcatatgccctgtgacctgcacgtatacatccagatggcctgaagcaactgaagatccacaaaagaagagaaaatagccagttcctgccttaactgatgacatttcaccattgtgatttgttcctgccccaycctaactgatcaattgactttgtgacaagacacmctccccacccttgcaataatgtactttgtgatattcccccgcccttgtgaatgtactttgtacgatacaccctccccacccttgagaaggtactttgtaatatcctctccgcccttgagaatgtactttgtaagatccacttcctgcctgcaaaaaattgctccgaactccaccgtctatcccaaacctataagaactaatgataatcctaccaccctttgctgactccttttttggactcagcccacgtgcacccaggtgattaaaaagctttattgctcacatgaagcctatttggtggtctcttcacacagatgtgtgtgacagtgataacagtgtcacgtggtttaactacaatgtgtccagatattgaattttgtttaagcctgcttgggatttgttgtgctccccaaatttcaagtttgtgtcttttgttcaattttggaaaatagtcagctatctcagaattgctcacctacattctcttgtgtcttttctcctgaactttaagtatgctgaaggagctcagaacacactaccccaaatatgccactttggtataaggactattttgagctaaaggcacttacaaaaccagcagggaaaagaaattcactctgaccctccccattttcttcctgaaaacaagagataaaatctccatttggaagatgtccttccaatatcaggaggaaagtaacactcttatcaacaatctaaatgtccatctaggcatgaatggataaagaaaatgtggtatgtacacacagtggaatattattcatcctttaaaaagaagacagacaggcacagttgctcacatctgtaatcccagttactcgggaggctgaggagtgcttaagcccaggagtttgagactagcctggccaacatagcaagaccttgtctctaaaaaaaatgttgtttaaggctgggcgtggtggctcacgcctataatcccagcactttgggaggccgaggcaggtggatcacaaggtcagaagttcgagaccaacctggccaatatggtgaaaccctgtctctactaaaaatacaaaaattagctgggcacgcacctgtagtcccagctacttggaaggctgaggcaggagaattgcttgaaccaggaaggtggaggttgcagtgagctgagatcacgccactgcactccagcctgggtgacagagtgagactctgtctcaaaaaaaaaaaaaaatttgtttaaactttgctgggaatgggggtgtgcacctgtagtcccagctacatgggaggctgaggtgggaggatcacctgagcccaggagtttaaggctgcagtgagctatgatcatgccacggcactccagcctgagcaacagagtgagaacttgactctaaaaattaaaaaagatggtctcgctgtgggggaggaaaaatcaattcctctacccatcttacgttctcagctggggccttgtaaattagactgacaaaagacagattaacataacaacaaaaaagattaacaattgaaaaaacaaatagaagttgattaacatatgtacagaatacgcaatatggagtacccagagaagagtaactcaaaggtttgttttgaacttgtttttatatggcatcttagcaaaggaactataartttttagagaagtgacaagacaaaggaaaaggaccttgagtctctcggggcagcaaattgtgggaaggaaaacatatagtaacaaaagatagatgaaagttaattggctgggtgtggtggctcacacttgtaatcccaggactttgtggggctgaagcgggcagatcacctgaggtcaggagtttgataccagcctggctaacatggtgaaaccccatctcttctaaaaatacaaaaacattagctgggcgtggtggcggggacctgtaatcccagctacttgggaggctaaggcaggagaatcacttgaacctgggaggtggaggtgaaggtgagccgaggtcacaccattgcactccagcctgggcaacaagatcgagactctgtctcaaaaaaaaaaaaaaagttaattatatgaattgggtcattcttgtcatgaccaactaaaaaagtcaagaccaggtgcggtagctcagcgctttgggaggctgaggcaggaggattgcttgagactaggagcttgggcaatgtaaggagactcttgtctctacaaaaaacaaacaaaaaaattagccagtgtggtggatcatacttgtagtcccagctacttgagacaattgctagagcccaggaagtcaaggctgaagttaagctatgattgcaccactgcactccagcctgggygacaggatatcttgtctctaaaaawttttttttaattataaaagggcatttagaggacaggaagaaaaagcacacagggcacaaaacattgctccaagaatgcaattcttggcaagcttgactgctgaaaccgtcgttaaaacctgaaaccagttttatctagtagctactgaaacagctgctaagactgtaagattaattttacccactgcaaccactcaccaatcagagtttgcccccttcccaaaactttactagcgctgatgaacattctttcaaaacaatatgtaacatttctcctttttataaaacttccaaccttctctttgttctttgaacgtaccgaagatcaccctgtctctgtggacgacctggaattgcaattcttgcttcccccaaaaaatgttaaatttgtctctatattttatttgacttaaacagtagataaagsctagtttgtacagtttggtatgtagatttctctggtgccatgtccaggccaataaggatctagaattgtctctggggattagcctttgtccttcctgaaagaggaagaagaggagcaagactatcttcttttttatttttttaaagccgaggtctcactctgttgctcaggctggagtgcagtggcgtaatcatagctcactgcaacctcaaactcctgcactcaagcaatcctaccacctcagcctcccaagtagctgggactacagagtcttgctctgttgtccaggctggagtgcagtagagtctcgctctgttgcccaggctggagggcagtggcatgatctccactcaccacagactctgcctcctgggtttaagcaagtcttgtgcctcagcctcctgagtagctgggattataggcgtgtaccaccaggcctggctaatttttttttttttttgaatttttagtagagaccgggttttgccatgttggccaggatgttctcaaactcctgagctcaagaaatccacctgccttggcctcccaaatcactggtattataggcatgagccactgcatactgtttgctgcttttttttttctttttttgagacagagtctcgctcttgttgcccaggctggagtgcaatggcatgatctctgctcactgcaacctccacctcctgggttcaagcgattctcctgcctcagcctcccaagtagctgggattacaggttcccgccaccatgcccggctaatttttgtatatttagtagagacggggccttaccatattggccaggctagttttgaactcctgatgtcaggtgatccacccacctcggcctcccaaagtgctgggattacaggcgtgagccgccatgcccagcctgtttgctgctttttaattgcctttagctcaaaataatttttttttttttaagagacagagtctcgctctgttgcccaggctggagtgcagtggcgcgatctcggttcactgcaagctctgcctcccgggttcacgccattcttctgcctcagcctcccgagtagctgggactacaggcgcccaccaccacacccggctaattttttttatttttggtagagacagggttccaccatcttagccaggatggtctctatctccagacctcgtgatccgcccacctctgcctcccaaagtgctgggattacaggcatgagccactgcaccccgcctagctcaaaataattcttatttcaaagaggtgtattttggggtgacatattttggttttcttcactgcaatatgacaacctggaggacattatcttaaatgaaataagccaatcacagtgcttactggaataattccatttatgtgaggtatctaaaatagtcaaactcatagaagcaagaagtagagagtggttgtcaaaggctaaggggctggggaaataggaagttgccattcaactggtgtaaagtttcatttatacaaggtgaataacttctagagatctgtacgtcgtgcctattgtacacttaaaaatctgttaagaggccaggcrtggtgktttatcttataatcacagcactttargaggcggaggtgggggtgaaacaggagagttccctggctccccttgcaggacactcaacaggggtgttgatctctgttcagctgccacaagctcaaaccccttataggagcgggaggatacagacaggcaggtgcaggaaccagagtgagcgcttttgggctctggccccagggcagcttctaggggtggtgctttgactcctgaagccccagtaggcatgctacagtgctcttttaactctgccatccacagatggcttaagtgttaaccagctcagtgtccccttggtacccgggcccttgtccagcacccagaaagaatcaggttacacacagacttgaagagtggtgaatatgggggttttattgagtggtggaggtggctctcagcaggatggatggggagctggaacggggacggagtggaaagatgatcttcccttggagttcagcagtcctgtggcagaactcctctccaactgtccccagctggactcctctagatattcagatgctccttctctgccatgccgttcttcagttctttggctcttctgctcatctcctcatggacccagggattcggggtttatatgggtacaggatgtggggtgtggcgggccaagatgcaacatttgggcacgaaaacaggaatgcctgttcccatttggggcctcgggtttccaggcttgagggtggggcttttggcaggtaaataaatcaaacaaaataaataactttccagtatttccccgtctcctgttcatatcaggaagattgcctgggtctatgagtttgagaccagcttgggcaacatagtgagacctctgtctctacaaaaataaaaatattagctgggagtggtgatgtgtgcctgtagtcccaagtacttaagaggcagaggtgggaggatcacttgagcctgggaggtcgaggctgcaatgaactgtggtcatgccattgcattctaccctgggtgacagagtgggatcctgtctcaaaaaaagaagaaaatctgtwaaaagggtagatttcatgttgtgttcttaccaaaataaaataaattttaaaaacaagaggcaataaaattttttaattaaaaagttaaaatttatttttttattttgagacagcatctcactcagttgcccaggccagagtgcagtggtgtgatctcagctcactgcaatagctgggactacagacacacaccaccatcccctgctaattttttgtattttttgtagagacaggcttttgccgtgttggcctggctggtcttgaattcctgacctcaagtgatccacccacctcggcctttcacgtgctgagattacaagcatgagccaccacgcctggcctaaaataaataaataaataaataaaattgaaaattttatttaaaaaattttggctgggcgcagcagctcacacctgtaatcccagcactttgggaggccgagacaggtggattgcatgagctcaagaccagcctagacaacatagcaaaaccccatctctacaaaaaatacaaaaattaggtgggtatggtggcacatgcctgtggtcccagctacttgggaggctgaggcaagaggattgcctgagtccgggaaggtcaaggcagcagtgagctgtgattgtgccactgcaaataccagcctgggcaagtaagacccgttctcaaaaaatatatatatatttttaaataaaaatggcttggcctacagagctttcatggcagatggagagagctggttttcaaaatattctgtttttaaaaagtacacaagtgactgggcatcaccatgctcacgcctgtaataccagcactttgggaggctgaggctggcgggtcacctgaggtcaggagttcaagaccagcctgaccaacatggagaaaccctgtgtccactaaaaataaaaaattagccaggtatggtggcacatgcctgtaatcccagctactcaggaagctgaggcaggagaatcgcttgaacccaggaagcagaggttgcagtaagccgagattgcgccattgcactccagcctgggcaacaagagcgaaactctgtctcaaaaaaaaaataataakaakaakaagaacacaagtaacagatttctaatataaaaataaatcaaacagtacataatgtgatcctctgcctctcttccccacttgtggatggcactctccccatgagtacccctagtgataactgccatctgtactcattaagacatttaaaaatgcataaacgttttaaaatgtagattctatttttattcaggtatgataaggccaacagatcaggggacaattgccatttaaaagatagcttattactcctcgttcccaagaggagaggtcacacctgcacagccaygggagagaacactgaggttggtcacaggcagaggacaggagaactgtggttttcgagggaaggaatgggtgaggcagggtaaggcggctaagcaggtggaggactagctagttggaatagtgtcagctgactcctgactgtagactgcactgagttgtctgatatatgatgtcagggtgattagggtagagagataacggccttgagtatgaaagtccaaaaaaggagggatttggtggtagggctctagattggttagtttgcatctcagggatcagctaatcccaggaggtgtagtctctccctggtcaacaaggccccaaaatgtcaaagcatcaatatggaaactagaaaatatgggtaataccacataaaaaaatatcttaggttattttccaacttttcctaatcacaaattatacagtaataaaaatcyttatatagatttttgcatgggtgtataattctgtaagatacttagaagtataatttctagattaaaggatttacatattttaagtatgtaatttaataaattacaattaaaatttaatttaattcccccaaaatgaaacattttaacgatcccagcaatagtatatggagagggtcctttttctcatactctcagtaatacaggattttatcagtcttttagtcaacttggagaaagaatgttagcagtcagccactaacaaaaactaagctaatgtgaaaatgttaatatcagacaaaagagaatcaaatgcaaaaagaattttaaaaggcagagtgatatttaatttttatgtcaccctctaccaagacagttaaatgacaatacggcttcatgtgtaattacacagttgccgatggcaattttacatggtttaaatttaatatctaattatatagcttcaaaacgtgtaatgcaaagactcaaatacaaggagaatttgctaaatctgtacttgtcatagaaatcttcaaaatacctctttcaaagatggtcagatcaggaagaataaacaaagataaagaggatctgaattaatataattaacaaatttaggccgggtgtggaggctcacacctgtaatcccagcactttgggaggctgaggtgggcagatcacttgaggccaggagttggagaccagcctggccaacatggagaaaccctgtctctactaaaaatagaaagattagctggccatggcagcgggggtgcctgtaatcccagctactcgggatgctgaggcatgagaattgcctgaacccaggaggcagaggttacagtgagctgagattgtgccactgcactccagtctgggcgacagagcaagactgtctcaaaataataataataataataataataataawgaacaaacttgacctactagatatagacaaacagaatatcactttctttgagaatttccatggtgcatttagtacctaccagaacacacacacgagcatcttagattaactgaaaaagtaagttgtccaagaatagtgattaaccacagattaggttatatcctaaggaaagtgtccatagaaagggcaggatatttcaagcaggctttgcaaacagaaaagccagccccaacaaagaatgcctcctatgtgtcttctgctgaggactccccttggactccagagcccctaggcccctgtgtcttgtcagcactctgctatttcagggctaaggagctcaggcttctcagatgtggcctgggaaacacagtcttctaatccaggagagtaagaagatttaggactgacgtgggtgctgttagagaaacccatctccttgggtatatgggagataccccgactatgcagtcgcccccttcaaatcttccttgggggcctgatctgactgacgtcagggggtgcctactccttcgaggcaagaagcctgaactttccttcctgtcactgtgaatacttggccagggctgtgaatgtcaccattgcttttcaggaagaagacatggcagactagggctgcaccttctttatgggctctgtaggtctgaaagaaatcagatcagcctgggatccctcagccaactctgaagacaggatggggatcacgcctgcatgttaaagagatttctgccttgttgtgtctcatggtaaataaaaaacccagcaaagaaggtaagaactttctgtctagcctaaagtagaaatgggtgagaacaggagggcgacacttatgtttttacctaggaaataaatacagagttgttttgagacaaaggtcaaagacagctcctctgttatctatcaactcatccagatggggtctttgctayctgtgtgatgagatcttcaagtgctgggtgaccattctgccctggatttcttgggctcacttagtggacagataaacactttttttttccrcctaagagacagagtctcactatgttgcccagactggagtgcagtggctgttcataagtgcaatcatagcacactacagcctcgaactcctgggctcaagcagtcttctcacttcagcctcctgagtagctggaaccacaggcatgctgcactaccacccctagctaatttttgtttttcatgataatgtgaggcattgatgatgctaagtcaaattctagaaggagaaggggtctcacccacgttgggtggatgtactcatcacctggagagatggctcagcttgggaaatcatcagggggagaagacagctggtgattaccaaaggtgctgattcaacaatctcgggctccctcaagctcgttttctgtggctgaccttatgamgttttcacatttttagtttttcccttgagaattattctacttcccctttctgttcatttcctttttttttttttgaggtggagtctcgctctgtcacccaggctggagtgtagtggcgaaatcttggctcactacaacttccacctcccaggttcaagcgattctcctgcctcagcctcccaaatagtgtagctggtattataggcatgtgccaccatgcccagctaatttttgtatttttagtagagataggatttcaccatcttggctaggctggtctcgaactcctgagctcaggggatccaaccgcctcagcctcccaaagtgctgggattacaggcatgagccacggcacccagccatttttcttattgatttctagaatgttctctgcttgtccgtagatgactccatcttcttctcttaagcagccatatgggatacctatttagtcagagccactttctaatttttcttatgtgtaaaaattttagaaaaatatcatttattgatttttaattacaaaagctgtaatagaagtatataagttaaaaatggaaatctctcacccaacctctttctccagaggtaattactgttaatagcttggtgtatagtctttcatttttatatacttactgactttttttatatagatgatatcacactaggcgtgctcttctggaatttgcttttcttcatgtaacaatatatcttggggccgttttcatatgattacatatcgacttgccttgttctttgtcatggtggaatacattccattgtttttaaagcatcatgatgtattttgttgattctttactgataattatttaaggtgctttttatctgaggaggagaagaactttaagagatttttgaggatgtcatttaagaaaattccttatctatgtttttcatgacgatgacaaacatttgcaaagtactcctcatatataacctcacttcacactcctaacaaccctgtaatgacgttaccattatccataaataacagagaaacagatgagaccagggagccccaaggcagggatcacatgtgcctttgctgttataatggtagctaggtaccccttttccccttccacatgacataggaaaacatatcctttttgtccttggtgacaaaaggtcaccaagagttagttacaactacctaatgggagacttcatttctttcatctcttgtggttgttctaaatagtttattggcccatgatagatatcaacttccttactctaggcaatgctatatttctatctccaataaattctttgtaggtcatcttattctgccaccatttttgaatttataaattcatgagaaaaaaagttgcctaagggcaaaagaggatttatttaataaaaatctttgacccagcaataatcagtatccatcctgctgattcatgcagcattgaaatagtatgccttttactgcctccaagaacatatttttggttgttgatattttaaaataaatatgacatcagattcagtccatcaacatatattgaggttttattgtatagaaagcactttaaatatatcatttatgatccttgaagatacatagatgagaaaactgagtctctgagagcttaagtgcccaaaattgagtgagaaggtgaacaaaaattctcacccacatcaaacactcttaaatacacaacttggctatgcaggcaagttaccaatgtatcaaagcaacttgtgagtcattgacaagcagaatcattgctgaagtcccttctagttctaaaactgtgcaaatatttaggagcagttttgtyrgtttggacatgatggcttctcactttaccccaaactcagattctggtatcatgacatctcatagaactaggaaccattttgcacacaaaaagagatcacagtcttttttcctctggttgtttattcaaaataaactagccaacataagcaaggtaagactttaattttgattttcagagaaaaagacaacaactctttgataatccccagtatcacaaccttcaaaaatagcggaggagagtggggtagaaatgaggtagagaaaagagtaaaagaagtgggattcgctcttgatgttaagtcagtacatctcacattacctcctgaagaagaactagagaaagtgtcatctttgttgtataaaaagaaatatggcataatgatccagcaatcccactacactttgggtgtatatccaaaggaagcaaaatcagtattttgaagagacaattgcatactcatgtttattgtaacattattcacaatagccaagacatagaatcaacctgtatgcccatcagtggatgaatggatgaagaaaatgtagtatatatgtacagtggaatactattcagccataaaaaggatgaaatcctgttctgtgtgacaatatgggtgaacctggaggacattatgttaagtgaaataagccaggcacagaaagacaaatactgcgtgatctcactcatatgtgggagctaaaaaagttgagatcatggaagttgagcatagagtaatgattactagagactggggaaaatagaaggaagcaggagatgaggaaagttgattaacaggtacaatgttacagttagatagaaggaataagttctggcactccattgtacagtaccatgactatatctaacaataatgcattgtatatttcaaatagctagaagagagaattttgaatgtcctcataacaaagaaataataaatgtttaaggtgatggatatgccaattactatgctttgatcacacaatgtatacatgtatcagaatatcacattgtatcccataaatatgtataattattatgtgtcagcaaaaaataaataaggcataaagtttattcagttaatatttatggaatccctactacatgtcaggcactgtgctaaatcctggggataaaatgatgaatttgcttacagtctttctctgaaggaactcacagtctaatagtagagagatmcaagattaaagactgtaatatggtattgcagtgatggaaatgtgaacaggatattcaggagctcagaggaggagcaggtcaagctggcttctttaaggaaggtgatacttaaagtgagcctttagcaatgaataaagttagccagcttaagagaagtgggatagaaagaacattccaggtaagagcagaaacacagaggtcatggtagttaaagcacagagtttgaagaaaggaragaagagagacgartgttgggaacaagccccccaaaatctggccrtaaactggccccaaaactggccataaacaaaatctctgcagcactgtgacatgttcatcatggccataacgcccatgctggaaggtggtgggctttccagaatgagggcagggaacatctggcccgcccagggcagaaaaccgcttaaaggcattcttaggccacaaacaatagcatgagtgatctgtgccttaaggacatgctcctgctgcagttaactagcccaacttattcctttaattcggcccatcccttcgtttcccataagggatacttttagttaatcgaatatatacagaaacaatgctaatgactggcttgctgktaataaatacgtgggtaaatctctgttcagggctctcagctctgaaggctgtgagacacctgatttcccacttcgcacctctatatttctgtgtgygtgtctttaattcctctagcaccgctgggttagggtctccctgactgagctggtctcggcagacgaggcttttggggaagatttgttgttgttgttgttgttttaggcagagtcttgctctgtcgcccaggctggagtgcagtggttacacatcttggctcactgcaacctctgcctcccaggttcaagccattctcctgcctcagcctcccaagtagctgggattacaagtgtgcaccaccacacccagctaattcttttgtatttttaggagagatgaggtttcaccatgttggccaggctggtctcaagtgatcagcccaccttggcctcccaaagtgctgggattacagacatgagccactgcacatggcctggaagatgggttctgtttggagtctgagacaccccaatcaaagtgtttagcagggagctgaatatgtggggctgaagtttagggatcatctgggatggagacagagatctaagaggtaggaagtgatagctgaaaatgtgagagttaattaaaccagccagggagcatataccacgtgagatcaacagatatttgagactagaatgcaaataaaaatcaacatataagggacagacagaggaaaatgagctcaagaagcagagacagtaagtagtcaggaagatgggagcaaacataagagtttagtatcacagaagctcaaggtgtagaattgaaataaaggtgtggcctggccaggcgcagtggctcacgcctgtaatcccagcactttgggaggccgaggcaagcggatcacaaggtcaggagatagagaccatcctggctaacacagcgaaaccccgtctctactaaaaatgcaaaaacaaaattaaccgggaggctgagggggtgagaatggcgtgaacccaggaggcggagctcgcagggagccaagattgtgccactgcactactccagcctgggtgacagagaaagactctgtctcaaraaagaaagaaagaaagaaagaaaggtwggcctatggagacagatggccttgctgttctggcaaggtaaggactgaaaagatgaagacattagaggcatcaggaaaggctttgatcaatagtgaggatgaaaaaggtgattttgagaggaagtaaagagaaaactgtagtctacccttgagataaayctggatgagaagacaagagaggttgggtgacagttagaggaatataggaggtcaagggaggaggaggtggcggatgaattgctttgagaatgcaaaataagakatttcagtatgtttctagactgaaaggaaaaggcagtggaaaggttgaaaacgggagacctagggaatgacaaatggagggaactctcaggggaggaacatcttgtgcacttagactggagaggtggagaggatactctcacatgattcatagacaatttggcccacccgatttaatactctgcctgcatctcctattacagattctctcttcattttgtcagcaaacagctcactgtcctctggatctgctgcgtcctgcaggagcattgcgcttaaactatgggaagcggcacctccacccaacatcattttgctttccagaatgcagagagaggtacgtgtttcycactttccaaaccagctgtgggtaccacaaagcccatattgcatggagagggttgggggttctgagggtagaagcagaaaaacccttaaatttctcctcaggccagctcttagaggtcagcttctcctccttgtgacatgcccaccaaaatgtccagttgaagtatatttgacagaattaacattcgctcaggaagttagtgttgtccattggggttgatcccaaactacccaggtacaaatgaatgaaataaggttgggcaaagaggggatgaaacacattccaggcagagggtagagcacgtccaaaggtcatgaggtgggaagaaggaagcatgagctccctctagtggccaatctaacaattttttttttaaaacaataggccaggagttgtgggtcacacctgtaatcccagcactttagaaggctgagatgagagaatctcacctgggcccaggagtttgaaaccagcctggacgacagatcaaggatcctatctctacaaaaaaaaaattttttttttttgagacggagtcttgctctgtcgcccaggctggagtgcagtggcacgatctctactcactgcaaactcctcttcctgggttcaagcgattctcctgcctcagcctcccgagtagctgggatttcaggcgcccgcgaccacgcctggctaatttttgtgttttttgtagacactgggtttcaccatgttgaccaggcttgtcttgaactctcacttcaggtgatccgcctgcctcggcttcccaaagtgctgggattacaggcgtgagccaccgtgcccaacctaaaaaatttttttttgtttttgagaccgagtttccctctgtggcccaggctggattgcaatggcacaatctcggctcactgcaacctccgcctcctgggttcaagcgattctcctgcctcagcctcccaagtagctgggattacaggcgggtgccaccatgcccggctaattttttgaatttttagtagagacggggcttcaccatgttgaccaggctggtctcgaactcctgacctcaggtgatctgcccgcctcggcctcccaaagtgctgggattacagaagtgagccaccatgcccagcaaaaaaaaaaaaaaaaaaattaattagctgggtgtggtggcgagcacctctgtagtcctagacactcaggagcctgaggtgggaggattgcttgagcacaggagttcaagcctacagtgagctatgatcatgccactgccctccagcctgggtgacygagtgaaatcatttctaatatggtagggatatcaactgtgatataaattgcaaatattttttcccagtttgtcacttgtttggaccaattttggaattagcttcagctcagggtttccttatcttgtgaataacacgaattcaacccacacacgccacaggctgagactttctatctcactgagttctaggtcagctcagctcctgctaccacaggggccggtaggcagagatttattagatcacgcaaggtacagaaacttccccagctcctgccttttcacagacagtccagttaccactccctgccatgcacagaacccaggaactcactctcatccccatacaggtgttaaaccccagctcctgagacatgtgtctggttgagattcccctggggcctgcctgacttcagtgcctctaactgcctttggctatgggttccgtcttcatttctggcacccggagatctcccttcaatgcttttgatttcaactattggttaaaaagaaatttagcttattttatgcagcttttcttaatgtgttggagtgtgagggagtcctacatctgcttaagcatgccatttcttattggaagtcgatattaggctctctattttccttaaagggatgtcataattcattaagtttttattgcaccttttggcaagcttatacttccattacagaaaggtacttcttcctagaggcatcatttttttcctttaaatcagtgttgtatatagagacataaatattcttgacaaagataataaaaataagagggtaaccatcaaaaaaattctctgttctatctttcttaaataatttacctattctcccataccctactgtgcattgccttggttcacaattttctcacagtgttgttatatgtagagtttttacagcccaggtgtatttgtaacttgtaccctaataatttagtttacacatggcccaagtaagaggggcctatacatttttgcattgtgctattaaaaatacatgatgggataaaggatattaaaagatcctgcacttcccagagcccatctcaattgaaagcaagccagctccccaccacaccctaccagatagtcaaccgggaggaagaaaaaaagagggagaatgaaaggtgttgcccacttctgctgcctgagtagccaaagcaagactgaggatgtaatacgtatgtctcatcattggcagcactggccatagaatgctcagggcaaggtgttagcagacaacattgatgtccatgatcttcttcagtggtccttaaactttagcacaagtatraattatgtatggagcttgttaaaccttcagattccttcctggattccagcggtagagattctgatgttacaggtccagggtgaggtgtagcaacctgcatgtttaccaggaatctctaaagaatctgtagcaccagccctggacctttcattcactattctcttttgtgtgtgagtgtgtgtgtgtgtgtgtgtgtgtgtgtcagagtctctagcccaggctaaagtgcagtggtacgatctcggctcactgcaacctctgcctcccaggttcaaatgattctcctacctcaggctcccaagtagctgggattacagatgcctgccaccatgcccagctaatttttgtatttttagtagagatgaggtttcaccayattggccaggctggtctygaactcctcacctcaggtgatccaccagcctcagcctcccaaagtgttaggattataggtgtgagccaccacgcccagcctcattcactattctgaacatggttttacagaagtcagtcagtggggttcaacctcatcgcttactatttagtgagtgcctttgagaaatactagtagtatgaatttttttcataggaaatcaaatttatctttgtttaagttcctcccagcttctcttttcccatgtcaccatcatctttcctcttagggaaatcagcaagaattctattatctgtctaatgcaaacgaaacatattaaatcaatctgtctactctttatgaggttgacctgagtcagcctgcaggatttctaatccagcctgcaggatttctaatccagctttatccacaaatagtccattcatcaccagcagtgtatctaagccttggagcttaaaaagaatctagttatgtggacagctgttcccttctctggcaacaatacttgaccacacaggtcctaaaccttatataaagaatgaaactccacaccctaacctgccctacctggtcacctagcacaggtcctggcaaaaatgagaggcccagtggccatgtgggggactgcatggtcagtgctgtctatcttatgacgggggtgcttaaagcctgtagggatatcatggaactggggatggcaagcatgggagctgggacacagttgmtaccccctgacatcgtatgatgcattcatttgagtattcgtttattgtttgyttttcctagtcttcatctggccccgccccttttccagatgaggacattgaggccccagatgacttgtctgaaaccacagagcttgtcagggcagttctaggtctagatcccaggtgtcctgacatccagtctattgtcacaatatcaaaatgtccaccccacccccgcattataacctgtcagggatgctgcatccttgcaatctcatgagtttacatctccttctcggaatcctggcagtccaaccttttcatccctatacagaaatgttttcatcaatacatgggaattctaatcaacctacagtgatatgagtataaccatcaggcaggaatgaaggggaggggcaggaaatggggaaaagcactattgccagcagaaagggaaatacttcctatgggcgtcaatgggtagtgcttctgctccatcttgtcctcacatatacagtgggagagggctgagcagcttcctctccctacccccaaacccctggcccagggagtccgagctcacaggcttgcttctccatcggtgtcatagccttcaaggcagcagccctgatccagagatggtaccggcgctacgtggcccgcctggagatgaggcggcgttgcacctggagcatcttccagtctatagaatatgctgggcagcaagaccaagtcaaggtacaatgagatgtgggacggagccgcctcctgctctcccttgggcagcagggctcgggtgctcctaaagtgaggccaactggactacttgtgggttctcttttcgctcacctctaaagccacgtctccttgggttcttctgcagctccatgacttcttcagctatctcatggatcacttcatccccagcagccacaacgacagtgagtatgaactgccacatgtcatgtcctcctgtcgcaaggccatagattacacggtgaggtgggggatgcacagggagtgaaaccgtgaatctggtgacagccagggaataagcaaggggctgagcagtaaatggcagactggggttttatgccaggttctcctgaacacacacctggagacaagagtttggacgcaaggaattcatttattaagttcaagaaaccctgggggtgggagggagtggggaagggattcaggaaaggaatcgcagccagtccagcaactcagtgtgcctaggaaacagtgcaaaacgcaagcctcagaattataccccctgcaggcaaagggaactggagtttttctgtgtcaactccaggagtcattggttgaaagcggctggggaggtgggagagaagtataggaaggaggctttttcttttcttttcttttcttttttttttttgagacagagtctcgttctgtgacccaggctggagtgcagtggcatgatcttggctcactgcaacctctacctcccgggttcaagtgattgaacctcagayacccaagtagctgggattacaggtgtgcaccaacacacctggctgattttttatatgtttagtagagatgggctttcaccatgttaaccaggctggtcttgaactcctggcctcaagcgatccacctgcctcggcctcccaaagtgctggcattacaagcgtgaaccactgagccaagccaggaggttgttaattccatagcrtttctggcctgccatccggatccaggaaataagtcctcagtctggagatgccaatgctggcagctggaagctgctggaaggcactgccaggtctgatgcacctgttgcgctcactaaatgcaacataaatacctgtgatttttccacactggctttcccctttccttctgcttgcaaatccaggtccctaaatttctgtactctctaagtctgacaaatcttgatcttttagaataaaagtagaaagcatgactttttcctcctgcccatcctagactgttgtcactttctccttcctttttcctcttctgtgctggagctgaagctgaagccagattaaccatgtcctgcttcaatagtccagggaaggactttttttttttttttttgagacagggtctcrctctrtcgttcaggctggagtgcagtagtatcatctctgctcattgaaacctctgcatcccaggcttatgtgatcctcccatctcagcctcttgagtagctggaactacaggtgtgtgacaccatggctggctaaatttttaaattttttttgtagaggcaaggtttccctatgttgcctaggctgttctcaaactcctgggctcaagcaatcctccctccttggccccgcaaatttctgggattagagagccaccgtgcccagccaaggactattctatagtgcccacagactgcatgatcagatgatcataagctgatscaccttttctatctggactaggggacttcctgacccgcatattcactgaggacagatkcgcccaggactccgagatgaagaaatgcagtgactatgaatccatagaggtacccgacagttacacggggccahgcctctccttcccactcctgcctgaccatgcaactgccctggtagaagcattcagactgaaacaagtaagctcacctggggaacctgggtcactaccaactccatgaaatgtgtgaagggagacgaaacccagcacagaaagaatggccccagatttagggtgttcatgtcatgtgtccactagagagattctacccctgctgtgcttagccaggaccttgcagtcaatcagccrgttctgatgattgacagcttttcttcctaatcacataatctctcattgttcattcatcccacacataactactgagcactgctktgtgccccacattgctctgggcactgaggatacagcagtgaacaaaacagataaaatctctgcccttatggggcyggcattccatcggggaggcagacaatgaacaataaataacaataaataagacaattatgcagtatattagaaggcgatgagagctatggaaaagaataaactaagttatggatggaagaaatagcaattttatagagttgtctgggaaggtgatttctgagcaaagatctaaggtggtgaggaatgcgccggagaaagagcgttccaggtagagggaggaacacatggaaaagccctgaagcagaaacttgcctggactgttcacgaacctcgggaggccactgtggctggagaagagggagccaggggaagagtaatggaggtgagggggtggacttttattcttccaaaagagacagggagacagcagacataggaatgacataatctgacttgtttttttgttttgtttttttgagacagagtctcgctctgtcatccaggctggagtacagtggcgcgatctcggctcactgcaacatccgcttcctgggttcaagcgactctcctgcctcagcctcctgagtaactgccactgcaggcacccgccaccacacccggctaatttttttatatttttagtagagatggagtttcaccatgttagccaggatggtctcgatctcctgacctcatgatctgcctacctcggcctcccaaagtgctgggattacaggcgtgagccatcatacccagccctgacttgttttttaaaataatcattctggttgctgtgttaagacagtgtaggcggcaagggccaaagtagggtgaccagtcaagagactactgcaatcgtccaagcgaaagatgacagtggcttggaactctgatggtagggtagaggtagcgagatagtcagcttctggctctatatcagaattcaatccttcccctcttccacatgaatgtaactcattgcaggaggagctgagctgatatattccagtaatgacaggatcactaagtaccatcaacacacctgcacttagtcatactttactgaaacaatcacatggtcttcccatgctaaaggcaaggaagcatttaatagagtagaaaggaaagagaaaagtagctcaatatttgcagggggggcaagtgggaatgatgagaagcagaaacaagggcagaagttgagtgataaagaaagaatccgtgcatagtcccaggagcagtttactggggttacttttggggtcttaggtgatrggggttgttaagcagtaaaggtaaggaccattttccctcacgaatatcagtgttgttttcttccttccctcctcttcctcccagtagcagctccatgctcgctacgtcttgaaccttttgtatgaaaccaagaaacatctggtacagctgccaaacatcaaccgggtctcaacctgttacagyraggagatcacagtgtgtggtaagagctggtcagaaacggctttccatgctgcacacaaagaagaaygctctacctgtgtggggatgcaagaggagtggcgggctgcagggagatgtgatgataagccaaatttaaccccttcaggtccacaatttgcatattcactccacatttacctaaaaaagaggtggtggtgcagcgaaggggatcatggacctcagggcccagcctctgctttattttcccaagcaattcctactgactcaaactcatgttcttcattcaaaacaaaatctctgcaaataaccagrccctccttgttagaagatggtttatttaatggtacttgagaaagccccgatgactagcaaattattcctcccatccacacacattcctctcctggaaagaagtcctgttaatgactgttttccccatcttatgtttccagtgatttttaacatccactgtagacagacatcccacaccttaacctagtggaggctccagtgcaggagggattgtaactggccctgctagggtcacctgcagcctgcagatggtcttgcctgccttgcaatgttcataaagttttttttttttttttttgagacacagtcccgctctgtcgcccaggctggagggcagtggtgcaatctcggctcactgcaagctccgcctcccgggttcacacgattctcctgcctcagcctcccgagtagctgggactacaggcgcccgccaccacgcccggctaattttttgtatttttagtagagatggggtttcaccgtgttaggcgggatggtctttatctcctgacctcgtgatccgcccgtctcagcctcccaaagtgctgggattacaggcgtgagccacccgcccggcccataaacttttaaaaatggtatttcaacattggaaatttggaggattttatattatgatctagattttgctttaaaagtctcctgaaaaatcttttaacactggctyataagtgagtagctgctttctagtttaacgtgggcaaaatctctccagttctcatctaggtttgcaaccttgcactrttctatcgcatctttgcttcaataaaaatgtagctcatttactatttataataatccggcagaaaaaatattatgccttctgctttcaatactatctctgcaataaggagaaattaatatttatccttatcttacatatggaaaactttgtagggttttttctgtcagattcttctgggtattttctttcttataataaaaatcagaagcactggtaaggaacaatcagaaytgatattctttttctatctttgttaggagacttacatggccaattggatgacttaatctttatattttataaggtatgaatgttcaaattaagttgctttcttgctctgaagcttaatttagaagctcaaattcagtatcaattgaacaaatgcttaaatattacttgaagttttaaaatattattatttatttttatttttttgagatgggggtctcaatctgccacctaggctggagtgcagtggtgcgatctaggctcactgcaacctctgcctcccaggttcaagcaatcctcccacctcagcctcccgagtagctgggaccactagtgcatgccaacatgccctaatttctttatttttttcactttttctttttcaaacccttgtgtcgagggctgactttcagtagatcacagcgagggagctgctctgctcagtgcgaaatcctgacccagaagcaggtcatctacgaacagtttaatgtcaggttccccacgaacgtgccgttgcatgacgggtgaggggcggccgcctttccggccgcacccggtttcccaggaggagggactctccgcaccggcctcgggtacctgcgcgcttgctgagccgaactgcgggccggcggggatggcaggagactggctatcccaggccattgggagactggctatccgaggccaactgaggccctgcagcgctgccctgtggttcagcctgggcgggattctgacttagaggcattcagtcaaaatcccacagagggtagctttgtcccattggctccttagccaagcacatacaccgaatgtctgaacctgcgggttggtactgagcaggattaccatggcaacaacagatcatcagtagggtaaaactaacctgtctcataatggcctaatttttttttttyttaagacagagtttcgctcttctcgccgaggctggaatgcaatggcacgatctcggctcactgcaacctccgcgtcccaggttcaagtgattctcctgcctcggcctcccaagtagctgggactacaggcgtgcaccaccacgcccggctaatttttgtatttttagtagagacagggtttcaccatcttggccgggctggtctcgaacccctgacctcatgatccacctgcctcagcctcccaaagtgctgggattaccggtgtgagccactgcgcctggcctacgatggactaattttttatattttttatagagacggggtttggccatgttggccaggctggtcttgaacccctgagctcaagtgatccactcacctcagctcccaaagtgttggtattacaggcgtgagccactgtgcccagcctaagatattatttttaataatatttgctactctgttgcagcaaataaataatagaaaagtcagcattgcattatattctagtacatttttgcaaactatttaaccaacttaaaatgtttggttaataactagaaggggccaggtgcagtggctcatgcctgtaatcccagcatttgggaggctaaagtgggaggatcgttgaggccaggagtttgaggtcagcctgggcaacatagtgaggccctgtctcttaaaacataaataaataaataaatatttagcaattgattttctttctttcacataaagaaaactgattattatcaaaacaaccaaaagctattttcatatatattttagttataatgtgtagaacatatagcaagggagatgagtataatattttttaatggaatattactttctacacatactacatttcccaaagcattttcccatgcattatcttgtttaatcctgagaaatctatggcaagtattattatttctagttaaagatagtgtggccaggacttaaaactggcctttggatcacaagtttggtgccctttgctccacaccacatggcaacactcaggctttgtctaaaggagcatctcctaaccttagcctctctggaaaggaaatataagaccaatagaagatacttccatcatttactgacatttcaggcttggaggagacctagaaagcacagaattggtgttagacatgatgtgattgtcaaatgcctattgrttttaacctgatttcytatttccttcctcccattcattctttcactggtctccttgttgaaaagaatggcctcccrtcgccagaacggtcatatgtgttcaacggtgactttgtggatcgaggcaaggattcagtagagatcctgatgattctttttgccttcatgctggtttaccccaaagagttccatcttaacagaggaaaccatgaggaccatatggtgaacttacggtacaagtcaaaacatgcttgagtatttgatgtttgtttgttgtaattgtaaaacgttatttctccagaacttcttatttgttaaatgcctttaaaactagttttccaatttttttaaaaagcagaatacacagtatataacattcaaaaaaaaatttttttttttttttggagagagtctcactcggtcgcctaggctagagtgcaggtgcaatcttggctcactgcaacctctgcttcctgggtttaagtgattctcctgcctcagcttcccgagtagccgggattacaggcacgcaccaccatgcccagctaatttttgtattattagagacagggcttcaccatgttggccaggctggtctcaaactcctgacctcaagtgatctgcacccccttggcctcccaaagtgctgggatttacagacgtgagccaccgcacacagccagattttcttttttttgagatggagtttcactsttgttgcccaggctgtgcaatggcacaatcttggcacactgcaacctccacctcccagtttcaagcgattctcctgcctctgcctcccaagtagctgggattacaggcacctgccaccacgcccggctaatttttttttgtatttttagtagagacgggtttcaccatgttggccaggctggtctcgaacttctgacctcaggtgatacacccgtcccggcctcccgaagtgctgggataacaygcatgagccaccgtgtccagcctagattttttttttttttttttttttttttgtgacggagtctcgcttggtcacccaggctggagtgcagtggtgcgatcttggctcactgcaagctctgcctcctgggttcacaccattctcctgcctcagcatcctcagtagctgggactacaggagcctgccaccacactcggctaattttttgtatttgtagtagagacggggtttcaccgtgttagtcagggtggtctcgatctcctgacctggcgatctgcccatctcagcctcccaaagtgctgggactacaggcgtgagccaccatgcccagcccagactttttttttaatttacacattattttactattccaatgaaaccattgaatttgtttttgcatacacatactctatcatataaataatagagattcatgatagtaaagcaggaaatacagataagtaaaaggaagaaaattaaaatatcccataatttctctacccagggataatgatataattgtaaacattttggtgattattcctcagtctcttttctatgtatttaagtacatrtacccagaatatgcattcttctaaaaatgtgattatgccctgattattgtcacccagtttactctaatatctatttgtgcttctaaatctagatatggcttcaccaaggaagtgatgaataaatacaaggtgcgctgcctttaaagacaaaagtttctctcagttcagataagttgagtgaattatttgataacattttgtttatatcattttttccaggtacacgggaaggaaatactaagaaccctgcaagatgttttctgttggcttccactggccactctgatagatgagaaagttctaattcttcatggtggggtgtcagacataactgatctggagcttttggacaaaatagagaggagcaaggtagtggttaaygaaataatacaaatttcaccataatgcccagtttcattgccaatataaatgtcatcttacatgctgactgcagtcaactgattatggctgttaagagtgtggaggccattaagagtatggaggctgggcacagtgtctcacacctataaactcagcactttagaagacaggaagattgcttgagaccaggagtttgagaccagtctgggcaacatagcaaaactttgtctctataaaaaaattaaaaacttagctgggagtggtggcatgggcctgtagtcttatctacttgggaggctgcagtgagctctgattgccattgcactccatcttgcagggacacagtgagaacctgtttctaaaaaaaaaaaaaaaagattgagaatctgcagttgggatagggggcaagtgtgctgtagtcacttagtcatgtctaccatgtacatgccagtggggagtagcaaccagtgccgtgttatctgccattggatctagataattctaaatactacctctcaattattgccacctaaagagcctacgtttcccaaataattcatattaccttcaattaaagtcaagaaatatgtatttagtgcctactactacattcagagagcgtgctagttggcagaaaaaaaagatgaagatcaatttcagttaaactcaacaaatgtgctttgrgtgcttactatgtgcaaagaaagtgttacagagataaaaagatgaaacagagatggtgcytgccctaaaggaacacaaaataaccagaatgtgttggggttggaggtggaagagtatgagacagaatgtatgatttaccaataacaatagatttctattttccatttcattttggaaatggaaagctaggaagcaaaggttctattttcttacacctaactcttaaacttgactcatcccacacaggaaatgctgctacaacatccatgacaacattttcctgggaagttccaaagacagggaacaatcagtctacttcagctttgggcaattctaatggatatggatatgaaagtctatgtatatgagacatacatgaaatgaaagaatacggctttagagtgagacagacctgggtttgaaccctggaataggcaattgttggctgaaatggcagtttggttctatgaagttgtccagagacccaggtttcttgttactctgccacccctaatgtgtggtttctagacttagctaccatttagcaagtaaggatatgactccttgtggtttggtaactagaaattgctgtgtccctgtacayccaaactcagtgttttcacttacacatctgttatatctttttttgtttgtttgtttttgagacaaggtctcactctgtcatccagactggagtgtggtaccacgatcacggctcactgcagccttgacctcctgggctgaggcaatcctccagcctcagcctcccgagtagctgggactacagtcacacacaatcatgcttggctaatttttaaaaaattatttgtagagggccgggtgtgatggctcacacctgtaatcccagcactctgagagtcggaggccagcggatcatgaggtaaggagttcgagaccagcctgaccaacatggtgaaaccctttctctactaaaaatacaaaaattagccaggtgtggtggtgcacacctgtaatcccagctactcaggaggctgaggcaggagaatcgcttgaacccgggaggcagaggttttggtgagctgagatcgtgccactgcactccagcctgagccacacagcgagactccatgtcaaaaaaaaaaaaaaaattatgctggatgcggtggctcatgcctgtaatcccagcactttgggaggctgagatgggtggatcacgaggtcaggagatcaagaccatcctggccaacatggtgaaacccygtctctactaaaaatacaaaaaaattagccgggcatggcagcatgcgcctgtagtcccagctactcaggaggctgaggtaggaraatcacttgaacccaggagacagagactgcagtgagccaagattgtgccactgcactccagcctggcgacagagtgagactctgtctccaaaaaaaaaaaaaaaaagtatttatagggatggggtctcactatgttgcccaggctggtcttgaattcctgggctcaagtaattctcccactttggcctcccaaagtgttgggattgtaggcataagtgaccacacctagccatcagttgtatcttgattttctcacaaactttcaactcaaacattctgtccagcwgcatgtatgtctggaggcagagacagcaarccacagtagagcaaattatctcatgggaagaatcatatttaattatgtaaacatagaagaaggaactctgggaaagaatgctaacgaaaagtttattttctgtggcttagcaaaaaactaacttcccaatgtttggtttgcaaagctctggagagagggtgatgcagcaaatgatacagtccaaggactacttgagagagaagtacagagaggtatgggctccagagtcagactatctggattcagtcctggaagagtcttagtattttgtgcctcagttttcttatctgtactataaaagatgctatcttataggagtggtatggtggttaatcaactaatttatagaaaatgcccagaacagcgcctatttggaaaaggctcaatacatattaacactattaatctcctcaagttagggatgctgcttggagcagataacaacatcctyaaaataaaattacctgggccaggcacagtggctcacgcctgtaatcccagcattttgggaggccgaggcgggcggatcacgaggtcaagagatggagacaatcctggccaacatggtgaaacccccgtctctactaaaagtacaaaaattagctggacgtggtgacgcgcgcctatactcccagctacttgggaggctgaggcaggagaattgcttgaatctgggaggcagaggttgagcaagccgagatcgcaccactgcactccagcctaagtgagagtgagacccctatctcaaaaaaaaaaataaaagtaaataataacattttaaaaattcaagtaatatttaagcatttgttcaattgatactgaatttgagcttctaaattaagcctcagagcaagaaagcaacttaatttgaacattcataccttataaaatataaatattaagtcatccaattggccatgtaagtctcctaacaaagatagaaaaagaatatcagttctgattgttccttaccagtgcttctaatttttattataagaaagaaaatacccagaagaatccgacaaaaaaactctacarttactaagttttccatatgtaagataaggataaatgttaatttctccttattgcagagatagtattgaaagcagaaggcacaatattttttctgcctgattattataaatagtaaatgagctacatttttgttgaagcaaagatgggacagaacaatgccgggttgcaaacctmgatgagaactggacagattttgcccatgttaaagtaggaagcagctactcacttatragccagtattagaagatttttcaggagacttttaaagcaaaatctagaccttaayataaaatcctccaaatttcaaatgtcaaaataccattttaaaaattttatgaacattgcaaggcaagcaagacctatctgcaggctgcaggtgaccctagcagtgccagttacaatccctcgtgtactggagcctccctccactaggttaaggtgtgggacatcagtctacagtggatgttaaaaatcactggaaacataagatggggaaaacagtcattaataggacttcttaccaggagaggaatgtgtgtgaatgggaggaatcatttgctagtcatcagggctttctccagtaccattaaataaaccatcttctaacaaggagggtctgcttatttgcagagattttcttttgaattaagaacacgagtttgagtcgatatgaattgcttgggaatataaagcagaggttttggtgagctgagatcgcaccactgcactccagcctggtgacagagcgagactccatctaaaaaaatataataataaaatacctgagaatcggaagaggtgggactggtggactggccctcactgtgtgccaacaaggagcaagaaggttgttatgagttggtttacattttgtggctttgcactctctatgcccaagattggaactgcctagaaagtgattaacgcttgtccaatgtcagataataagctctgttctattctcttcactctggactgtccttcaaacatcagtcagctctgctgcccctctctgggtgtccttctttgttcttgccctaagccagtccaagctgggacgtggctttcttgtatcacagtccttagatctatttgcagaaagttctcgttctttgattatgtgctcacacagagttccttttgtgaacaagccctttattgtggatataccatggaagtcttccccctcggggttcaccatagcactgaggcacagcaggaatggctgctctctctttttgctcgctgctacaatctgctctgtggcctgacccctgatcagaattcgtgccacttatgtcctcagcccagtcccagtgccatgatgaccgcaagtgagagggwctctattcaattccctgtggcaaggagtgtctttctgattaggtccaggctgaaaagaggagctccctcccctcccctgtccttccccaacaggtaagataatgggtacaagagcacttcctctaaagtaccattaagtgctgcctcctctgcagcaagagtcaagtttttcctcttcctatttctcacctatatactttgattctttttctttgttttagcatctgtggaatgacaggaaagtcaatgaggactggcctgagacagrgttgccctttcctatccttgtctaaaaaartcactggtctcccagacagaaacgatgaactaggttagtgtttctcgaaattatatgtgaaggaccaggttttataaacttccaatttgttgcagatcaatactttcgtaaaatacaataaatatgaattattagaaaaatgatgaaataatatgtaaaacaaccccctgtgacatgtgtgtacctatgtaaaaaaccttcgcatatacccccaaacctaaaataaaagttaaaaaaaaaaaagaaaaaggaaatacaaacaaaagatacaagcccactgatcatgtgcttgactgtcatgacaatgtcatattgctgtcaatgtttctcagacttactctcaagggctgtacttaccttgtcccaggccaggaacagtgaaccgaccagcacttgtctgtgggcaccagtgtttaggactgacctgggtgtcaaagtggtactctcaaaggacctacagttccttccttccttccttcccttctttccttcctttctctctctttctttctttttcttcctcttcttctttctttctctttctttctctctctcttttttattgtttattttttttttgagatggagtttcactcttgttgcccaggctggagtgcaatggtgcaatcttggctcaccgcaacctccgcctcccgggttcaagcaattcccctgcctcagcctcccaagtagctgggattacaggcatgcaccaccacgtccagctaattttgtatttttaggagagatggggtttctccatgttggtcaggctggtctcgaactcccaattcaggcaggtgatcagcctgcctcgggctcccaatgtgctgggattacaggcgtgagccaccgcacctggcttctctgtttcttttctttctttctttctttctttctttctttctttctttctttctttctttctttctttctttctttctttctttctttctttctttctttctttcttttttcagggtctccctctgttgctcaggctggagtgcagtggttcaatctcagtttactgcagccttgaccttctgggctcaagtgatcctcccacctcagcctccctagtagctgggactacaggcatgtgccaccatgaccagctcatttttttgtattttttgtagagacacggtcttgccatgttgctcaagctggtcttgaactcycgggcttgagtgttctgctgggctcagtctcccaaagttctaggattacaggagtgggccaccacacctgtctgggcctacagtttcattccagcatctgtatctctttctggacgtgtttagatagtttccaccatgaggtgcaaaacgagacagaagagtgagaagcagatggaggagaagagaagagccaaccagaagagctctgcacagggacccatcccatggtttctccccgaaagccgctctcttccctcttcgccccttcggcttggctcctacaaggcccagaaaaccagcaggtcctccagcatcccctgcagcggttccctggacgggcgggagctctcccggcaggtgcggagctccstggaactggagctagagcggtgccggcagcaagcaggcctcctggtgaccggaragaaagaggagccctcccgctcagcctcagaagcagactctgaagccggagagctgcggaagcccactcaggaggagtggaggcaggtgagcgtggccaggcgctgcttcctagcatgtggctgccaacaggtcamaactctcccttccagggaaactcaggatatgttttgaggcccctctttctctctctttctggggtaacaacaccccagaaggacactagtatttgcctaatgactcatatgttttagagttttataaaagatggggatgtgtggctgttaggctctattgcctgatgatacttgggttagtgattgagcactagtagggtaagaagataagctaygatttgttggatgctattgtgtgctattttttttaatgtgtcagtaatatagctgccatagttcaaggccaaaagggctaggcagcagcttctttcctctgttaccaggcaagagctgtccccagatctctagaactgggtcacatggccacccctagctgcaggggagacttggagagtaagtagtatgcagcgaggcaccctgccaccccaaacccgcagttctgtcagtacggaagaaggaagaggagaatggacattgagtaggcgctaacattacttgccaaaatagatggcttaggcagccgacttcaccgatgatgactatggcagagagagccctgaaaaggctgttgtagccatccaggtgggagatgattattgtgagcttgttttgtttttgtttttktttttctttgagacaatgtcactccagttgcccaggctggagtacagtggcatgatcatgactcactgcagcctgtacttcccaggctcagatgatcctcctacctcagcctccccagtagctgggactaccggtgtgcaccaccatgcctggctaatttttgtattttttgaagagatagcatttcaccatgttgcccaggctggtcttgaacccctgaggctcaagcaatcacccaccttggcctcccaaagtgctgggattacagacgtgagccactgcacccagcctgagctgctgtgcctggcctgtagtagtgttaacagaattataggaacttgctggtattcaaccatttctgacccattagaatggcaatctcatacagttcacccaataaagaaatgaattcagccgggcgcagtggctcatgcctataatcccagcactttgggaggctgagacaggcggatcacgaggtcaggagatagagaccatccttggctaacacggtgaaaccccgtctctactaaaaatacaaaaaaaaattagccaggcatggtggtgggtgcctgtagtcccagctattcgggaggctgaggcaggagaatgtcacgcacccaggaggcagagcttgcagtgagccgagatcgtgccactgcacttcatcctgggcgacagagcgagactccgtctcaaaaaaaaaaaaaaaaagaaagaaagaaattcagaattatttaagagctaaaattagcagaacttgctgattgattggatggagggtagtgagaaagagaagttgcagctgactctgagtctagaagcctcggagaaagagatggtgagtttagttaatgttctgtcagttattgatctgggcttcaacaccaatttagaattgaaattataaagtataggtctttccttttgcaaactgactcagtgttaatgtcttgatctttacaaatcgaatgaagtttttcttttacaaaagtacttttagaaagcattaaatgttggctaagtgtggtggctcacgcctgtaatcccagcactttgggaggctgaggtgggaggatcatctgaggttaggaattcgagaacagactctggttaacatggtgaaatcctgtctctactaaaaaatacaaaaattagctgggcatggtggcacacgcctgtaatctcagctactcgagagactgaggcaggagaatcgcttgaacctgggaggcagaggttgcagtgagccgagattgcaccactgcactccagcctgggcaactgagtgagactctgtctcaaaaaaaaaaaacaaaagaaaagaaagtattaaatgacaataaccaaaattattcagttatttcatctgagtattgtatgactggcagttattgttttcctgagtattaataatagagtagaaactgaagtgctagaaaaattgctcaactcttctgcaattatttatttatttatttatttgtttgtttgtttgtttgtttgaggtggagtctcgctctgtcacccaggctggagtgcagtggcacgatctcggctcactgcaacttccctcttccgggttacagtgattctcctgcctcagcctcctgaatagttgggattacaggtgtgtgcctccatgcctggctcatttttttgtatttttagtaaagacgggatttcacatgttgaccaggctggtcttgaactcctgacctcaaatggtccacctacctcagcctcccaaactactgggattacaggtgttagccaccatgcctggcctcttctgcaatttgtaaaaaaaaaaaaaaattcttaaactactttaagaaataaaatgtcgattgcattttcccaggaccacgtctggggtcttgtgaatatgcaagagactctcttgccagtcccaggacttgcgccttctctttagggcaaatgtccagtagcctggagcattggcactgactgacaactactggccatgatcaaagcttctagcaggacaacttcatctgttttacatattgagctttcatatcagatttattttcaagaaagtgggtatatgcttgtcgacaaatatgtaggcacgcacacattcattttgtgagtaataagaaattctggaaccttagaggtccaaaatataaatgtatgtcaaatattgcttgcatggacatttattcacttatttttattcaaatattttcctcctcctcttcctttcatttgaatgactgtggatgaatatgtatctagtttttgggaaggaaatcatctcttggtcttctcaggttgtagatatcctgtggagtgatcccatggctcaagagggctgcaaggccaacactattcgaggaggaggctgttattttgggcctgatgtgacacaacagttgctacaaaaatacaacctgcaattcctgatccgttcacatgaatgcaaacctgaaggctatgaattctgtcacaaccgcaaggtgggtgctccctctgcagcagtacaggcttgtgtgtcaccaaagtagtccgaagggctcaggcctggatgagcaaaggctctcagtttctaacaacctacagaccttgtatttgttacctacttgctcaaagcaactaggtcctttacagtcatttatccttgactcttatgtcctctttaaaacccaaagtttgattaaggccactgtccaccaatgccctgactgacatggtcccattttatgaatggaaatatgaggccagtgttttctcagccacacctctattcttcaggtcgctccccaggcagggattcaggctcatttgtcttctcaggagcacaattaacatcctgactaatctttggacatctccaaatcctacaatatttgtctcacctaataccactggttatattgtacaagtttctttattgcaggacttctgagtacctttagtttcctaccactgtaaatcctcaggaagagatacagtatctagcatttcccaacgtattgactgtgaaaacttttttcatacaccatctgaggagccacaacattccgtagaaaactgctttaaggcaccacatcagctctcagaactcatcttcttgctcattgtaatggccatcctggtttatcagacccagcttgcctctaagttgaagcaaatatggtgttttctatgacccttgctattttcacttgggataaaaatgtgaagaagatacattgtgaaactatcggaattcaaatttctatgacttgagtcacaactcttgccctattagcattgatgcctttagaaaaaaagaaagaaagaaagaaagaaaaggattcccagatgagcactaggagaaacagcagcttctgcagttgagttgggccacataggattgagggtgaaggtttcttcagtgaatgtgaacacctgtctctcttctgttttgatgtaggtattaacaatcttttctgcctccaactactatgaagttggcagcaacagaggggcctatgtcaaactggggccagccctgaccccacatatcgtgcagtatcaagctaacaaggtgacccacacactcaccatgaggcaaaggcaagacttttcaatgagtgattttcagaaaaaaaaattatagtgttcatagaatctttgaatgaagtgtcaaacgttatatttattcaaattctacgtgagaattcagaatttggctatgtcagcatgaagttctattaatacaatagacattagagtaggagtctcttccttctcctccacacactcctaatagctctatctacccatcattaatgggagcaacaaatttgttttctgcagaaattattctcagtggggcacagtggctcatgcctataatcccagcagtctggcagactaaggcagaaggatagtttgagcccaggaattccagaccagcctgggcaacatggcaaaaccccatctctacaaaaaattcaaaaattagcctgatgtggtggcgtactcttgtagtcccagctacttgggaggctgaggtgggaggatggcttgagcttgggaggtagagtttgcagtgagccaagattgtgccactgccctccatcctgggtgacagagcaaggctgtctcaaaaaaacaagaaaaacaaaaagaagaggaagaaattattctccatggctgcgtcttgggtaaagtctgcttactaaaccactaagtctttctgaggttactcttctattttctctcatctttaacgggtttgtgttacccctacaagccacagccagaggttctttcactgtctggagattttgcaggtgaaattcagtgcacagatttgttaatgaggcccgtttctttctggaaggaagcatgtaatactattcgaatggtagattttggccgggcgcggtggctcacgcctgtaatcccagcactttgggaggccgaggcgggtggatcattggaggtcaggagtttgagactggcctggccaacatggtgaaaccctgtctctactaaaaatgcaaaaaaattagccaggcgtggtggtacacgcctgtaatcccagctacacgggaagctgaggcaggagaattgctggaacccaggaggtggaggttgcagtgacccgagatcgcaccactgcactccagcctgggcgacagagcaagcctccatctcaaaaataaaataaaataaagtaaaataaaaataaataaataaataaataaataaataaataaataaatggtagcttttgagatgattctgagttcttagttgagagattacaaccacaaaatgttataaagaatttatatgggtagcctcacagtaaatttatgcaacagatattgttattaatttcagttttgtagaagagattattaaagaaccgatgttaaatcatctgacctgtggtcacacagctagtccttgagtgaaggtagtccttgaccgaggcaattctatttcagaacccactcttttaatgtctatgcaatattgcctcctacaacgaagatggcctcagagtatataagatgctaacagatacagttttagtgctattgaacatgcttctttaagtattcagcctaacagagttagaaattaagatcggcaaagctagcataaatcaggtggatagagaacatgttagtatttagcatttacccttgtgtgagtgctgtaaaagtgcattattttaaatcattctcaagttattaaatataggccagcctcacttaaaaagaagaattatgtaaaaatataaacctaccaagtgaatgtcagacctactgtgcagcaaaatcatcttggagctttataaaaaatcagccatttgagcctcatccagccctaccaaattagaatctccaggggtgagccctggtacctggagtgcagaactatgatcccataggatttaggggttgtcactgcaaaaagagtcactctaggattccctacagtagtaatagtaatgtagtaatgtaatagtaatgtaggattccctacagtgaatagtgtgtttcaataagatagtcaaaaagcattcaactctttgaaaccttcattgattgcattaaataagtacaacatcacctgatttacccagaaatcacttatccagtgacttcaactgtatgaagcataatggagaacttagaaaaaaggagggaaatgtctctgagcagccataattgatgatgtctcaatgtccataaaccgaagataacatccttgtttttcttttctcttttttttttctttttgtgagacaggatctcgctgtgtcacccaggctgtagtacagtggcaggatgacagatcactgcagcctcgacctgctagtcttaagagatcctcccacttcagctacctcacacctggtactacaggcgtgcgccaccatgcccagctaattttttaaattttttgtagagacgtagtctcactattctgcccaggctggtctcaaactcctgagctcaagcgatcctcctgccttggcctcccaaagagctaggattacaggtgcgagccaccatgcctggcctgataacatgctcttcttagaggaatcctcagtcagagtccatttactttttgtttcaatccacttctcacaataatagagagccagcttggagccagcatagccagataggtatctggcctcactccttggtagctatgtgaccttgacctaattactatctctgtctgtaatgggcataatggacttcatgttatcgttctttcttcaatgagtgttgagggatttaatgagataatccatgtagagctctgcatttagtaagtgcttactaagtgttacttgacgtagggacaggaaagccttgtacatccagatagctttcaagggcattgccctactccatccctgcataactctccatgactacagattaccaggagcagcttaaatgctttgtctaactagtggttcttaaactttttaggagtcccatacttctgttagcctctgataaaacaacaaactgtctacaaaaaattcacatatgctcacatacctgtgaaatttggggtgagttttaggtggttcacactttcttttccttttgtagagacagggccttgctctgtcaccaaggccagggtatagtagcatgatcatagatagcttactgtaacctcgaactcctgggctca

SEQ ID NO: 97787 - DNA, 29318 bp, Homo sapiens
gatttaataatggttaagtattcatccagaaaaactggatttctggctcctcttgcaactcagaggattggacaagctgggccagcattcccgcatgggcacaaggagctggagctcagaggcactcccaactctggatgaggtgtggttttcacagctcagcactggcccagctcctccagttcccacttggccctgtgtttcctgcctggcccctgtagggaatgaacttgagattctgaggtgaaaacaggaatctcaaaacagccttggcagtggctcacacctgtaatcccagctctttgggaggctgtagcaggaggattgcttgagcccaggagtttgagaatagcttgggcaacacagtgagatctcatctctacaaaaaaattaaaaattagccaggcgtggtggtgcgtgcctgtagtcccaactacttgggaggctaaggtggaggatcacttgagcccaggtcgaggctacagtaagttatgattgtgccatggaactctagcctgggtaacaaaatgagaccctgactctaaaaaattaaaaaataaagaaaccaagttgggcgcggtggctcatgcctataatcccagcactttgggaggtcgaggcaggtggatcacgaggtcaggaggtcaagatcatccttgctaacacagtgaaaccccgtctctactaaaaatacaaaaaaacttagccgggcgtggtggcgggcgcctgtagttccagctacttggaggctgaggcagaagaatggcgtgaacccggaaggcggagcttgcagtgagccgagatcgcaccactgcactccagcctgggcaacagagcaagactctgtctcaaaaacaataaataaataaaaataaagaaaccagtcttggagctgtgtttcagagagcttcggcattttttcaggtgtcatctgccaccccgggcagggcagtacaaatgtagccacttctccaggaactccccattttccactcagaactccatgagaagacccacaggctccttttcctgcttcctgttccttccctgcagaaagatcctttctctgccaggcttacctgcccactccagcatgtcctcaatattctccgctgccccaggcacaacgcgagtctgatctgtgtcctctagcctcaggatgaagctcccctggtacttcttagcaaagatgtagttgtacaaggcagtgcggaggccacccaggtgcaagaagcctggagaagagaacagctcagataagacagggaagataagctaataggcctcagcaaggggcaagtaagcactactgtgacagaatgttgcaataaatttaaaagaccagcaggacacattggctcacgcctgtaatcctaccactttgggaggccaaggccggggggatcacttgagcccaggaggttcctgtaggttttttaagacaagagtctcactctgtcacccaagctggagtgcagtggcacagtcttggctcactgcaacctctgcctcttgtgtttaagcaattctcatgcccagcctcccgagtagctgggattacaggtgtgtgccaccacgtccagctacatgtttgtatttttggtagagacaggcattcgccatgttggcaaggctggtcttgaactcctggcctcaagtgatccccccagcctcggcctcccaagtgctgggatcacaggcaagagccatcacacctggccaatttttgtatttttagtaaagataggattttgccatggtggtcaggctgatctcgaactcctgacctcaagtgatccatctgccttggcttcccaaagtgctgggattacaagcgtgagccattgtgcttggcctgagtttgagatctgcctgggcaacatggtgagaccttgtcttagcaaaaaatataaaaatttagctgggcatggtggtacatgcctgtggtttcagttactgaggtgggaggatcacctgagcctggggacgctgaggctgcagcgagccatgatcacgcctctgcactccagcctgggcagcagtagagtgagactctgtctcaaacaaaaaaaattaaaaattaaaaaattttttttcaaagactaagaactagttacccctgtgccctgtctccagacacatttaatccctcatcctgaaaatggaaaccacccaggatttggagcatgtcattttattaaaaggctccaattttccccaactgcatccaccactctattttgatatttgtctcaaggccaagtttcgcctgaaagagaagcagagagttattcattgaggccatatcatgtacatttaacttacagaaattcaatgatgtgcgctgggaaaaaaattaattacaaacaaactagaaatttaaaatactgtacaatcatattgtgggccaggtgcagtagctcacacctctaatcccagcacttttggaggcagaggcacgaggatcacctgggtctctaaatttgagaccagcctgggcaacattgtgagatcctgtctctacaaagaaaaaaaaaatcggtggggcatggtggctcacacctttaatcccagcactttgggaggccgaggcgggtggatcacaaagtcaggagtttgaggccagcctggccaacatgttgaaaccccgtctctactaaaaataccacaaaaaaaattagctgggcatggtggtgggcgcctgtaatcccagctacttgggaggttgaggcaggagaactgcttgaacccaggagacagaggttgcagtgagccgagatcgcaccattgcactccagcctgggcgacagggcgagactccatctccaaaaaaaaaaaaaaaatcacattttgcatatgcagtctatgcagtgtgcatgactgtccacgtcgtacattttaaatttcatctacttgagatttttacttttttaaagaaacaaaattcatttttgaaatttgagatggggtctcactcttgcccaggctgaagtccagtggtacagtcacggctcactgcagcctcaaccacccaggctcaatcaatcctcccacgtcagcctcccaagtagctggaactacaagtgtacaccaccatgcccggctaatatttgttttttggttttttttttgcagaggcaaggtctcactatgttgcccaggctggtctcaaactcctgggctcaagcaatccttacacttcagcctcccaaagtgctgggattactggcatgagccaccatgccttgccaagattttcaccctaattgctggctttaaacactaaccaaaagtagtgtttgattccactgtatttctcttcatcagtttaaactcctaagatttgcctttttcatcattcctgtctgaaaactgaaagttaacagcttttccagagttgtcattacctcttaccgtaccttcttcggaccagcccacagccctaagtctccacaatgagctcatctacatttacaagtacaagaggcagcagaggagagaaaaagctcttctggggccaggccgaccctgcttcaacactgatgtgtgtaaccttcggatagttactgcaaggacaccagaaaaccagtggtattcagtggcactgagtcccacgagtccccaagacaaaagaggaacccagctgctgaaaacaaagcctcttacatcaagtacacctggattcaaattctgcatccaccatttattagttgctaccccttgagaaggaactctacttaacttttatgagcttctatttcctcatctgtcagagggattaagagcaaaaaaataagaaccttctttattatagggttgctctgaggtctaaatgctgaccaaagtaaaccctcaattaatttcagctactgtaatgatctgtgcctgataattcttttatctgtttatagtcaaaagcctttcccacatgggctttccccgcaaatgagcaaggaaatgagaagtacaatcatcataatagaggctgtgtattaagtgctttctgggtgtactagaccttactaagtggttcggctgcatgagcttaaccccataagacagatattattattagccccgttttgacaaatggtgaaactgaggctcagattcattaaataatttgcacatctaggccaggtgtgatggctcacacctataatcccagcactttcggaggccaaggcaggtggatcacttgagctcaggagttcaagatccgcccaggcaacatggcaaaaccccatctctacaagaaaatacaaaaattagctgggcgtagtggtcacacacttgtagtcccagctactcgggaggttgaggtgggaggatcacttgagccccggaggctgaggttgcagtgagccgagattgcaccactgcactccagcctggacgacagacagagccaaaccctgtctcaaaataacaataataatttgcacatctagtaagttacacatctaataagtggccacgacagaaatttggacccaggcaatcccaggctttggcattctacataagtgctcttcaaagcaaagtgtgcaatccagtgctggtctgaaaacagttgtcagttcacaatcaagtacagaaactgagagtaaaggtttagaaacttttgttgttgttttgagatggagtctcactctgtcacccgggctgcagtgcggtggcacgatctcggctcactgcaacctctttctcctgggttcaaacgattttcagcctcctgagtagctgggattacaggcctgggccacatgcccggctaatttttgtattttagtagagacaaggttttgccatattggccaggcgaaacttacatagcaatctggcagaatgattttacctctgctaacccaaataaaatgagattggtttgtattttggatgttttcaaaattttatttttctggtcattatattaattttgtgcaaatattgatacacaattgattggaaatttaaaaccagcacttccacaacagatggtttgaaaggcactgctctaggctatactgcctgccagaaagatcctgtcatgtatagctgggattttactacaaagatctttgtatgttcatcctgggatttgggatgagaggcatactccgtgtagagaacgtagaaggtagccttactggtgggaaccaaaaggccctgacgagatctccaacaggctatacaatgggcctctgtcaccctctagcttgctaagctcccaacagcactagcacagtgccttggtacctgcgatttcctctacccagaaggttccttcttttttgtttttgagacacagtttcgctcttgttgcccaggctggagtgcaatggcgcgatcttggctcaccgcaatctccacctcctgcgttcaagcgattctcctgcctcagcctcccaagtagctgggattacaggcatgcgccaccatgcccagataattttgtatttttagtagagacagggcttcaccatgttggtcagacggctctcaagtgatccacttgacctcaagtgatgcacccacctctgcctcccaaagtgctgggattacaagcgtgagccaccgcgcctggcctccagaaggttccttctataggcttcacatagcgtgctccttcttgtcatttggatctcagctcaaatgttacctgctcagtaaagccttctggagcgtccttcttaatccccagtctcctatcctgtttcacttcccgcatggcacatgtgactctaaaattacacttattttttataagtgtctgcggcagccactagaatgcagacttccacagagcaaggcccctacctttctcaatgatcactgtatcccagcgtctacaacacctgttacacaggttgtcatcaatgcacatgtatggaatgcatgaaaaaaagatcgaaagagatgggatggcacaaaaaacacaagaaactcctggcaatttgaattatttccgctcctgcacctcagtttccgcctctgtaaaatgggctcgcgctgccttaaccctcctccgcccgcccactctgacaccaccggaaaggattcattcgggaacaytcgtggggcggagacgggacagggggcctcggcctgtagcgtcacgtccgccagggttacctgtggggctgggagcgaaccgcactcgcaccgcaaccccggcatcagtgcccaggttggcctcgcgccgtcctacggggcggccagaggccgccgaaggcctctcgcgctgcagcagtctcctcaggagcgccgccatgtgggatggaatagcacacgtrggcttctccctgcgtcacttccggggactgcttccagccaatcggcctccgccacagccagcgcagccttgccccttaaagtcacaggccccckagcgcgaaatcccacgcycccctggacggctgcggccgcactcgccaccagggggcagaggccagagaaagggctatttcccggacccgcccccttcagcttgggaaagcgraagcgtggcaggggccggacctgggagcggaggaggcgggtctccatagaaacctccacctgtttccggccgggctgtgagagattaggggctgctgcgggggccaatctcagccagctcgcctcttcccagcggcctctgcgggagcggtgggtgttgtacacaatcatcatggcggcggccggggccccggatggtgagtgcggcgggggtggcgggcgccgggccggggctgaggttgcggtcgctcctctgggggatgcggcccggcccgggagggagaaccgcggctcgggaacggaggtccggcggcgcccggacagcgtccgttcccaagcccagcccgcggcgagcgcccaccccctaacccccttgcaggcatggaggaacctggcatggacacggaggccgagactgtggctactgaggctcccgcgcggcccgtcaactgcctggaggctgaagccgcggcgggggcggcggccgaggactccggcgccgcacgaggcagcctgcagccggccccggcccagccccctggggaccccgcagcccaggcctcggtcagcaacggcgaagacgcgggcggcggcgcgggcagggagctggtggacttgaagatcatctggaataagaccaagcatgacgtgaagttccccctggacagcacaggctccgagctgaaacagaagatccactcgattacaggtaattcctgtggcgctgacagccagtcttccccaccccgcctcctgatggcccttgcaccctactaggcacctggtggctttccttgcatcaggtccccccatccttacagcagtcttctgaaggatacttggatgcccattactcagctggggaaagagactcaagtttatrgagctagtaagttgcagagctgggattaaagccgaagtctgacgtttaggccccagtttctcattgatgttgctctaacatctctaattaaaaaatcacctaaggcgcttgttttacagcttctgggccytttcccaggagattctgattcagtgggtctgggatgtagccaggaatttatttttagcaaatatcttaggtaattcttctaagtgaagtttaggaaacgctgctattgactttgatgctggttcttcacrgtcgattctgtttcttaattttacyttgttcatagctctttgccatctgagatttcttttctttttcctatttttttttttttttgagacggagtcttgctctgttgcccaggctggagtgtactggcaccatcttggctcactgcagcctccgcctcccaggttcaagcgattctcctgcctcagcctcccgagtagctgggattacaggtgcccgctaccccgccgggctagttttttttattttatccacccacctcggcctcccgaagtgctgggattacaggcataagccatcactcctggccttgaacttttttttttttttaaagctttctacatgtagccttgtaatctccattaagaacaggagttttgtccctattggcttctgtagctctgatgcctgtggattctcacttaatatgtgaatgatttagatgactgaggaacaacttggaaagaatgagagctagtacttactgaacaattattcartgctagccaccgtactaaatgccccgcattggtctcttaatcsttgaaacaggtctgtacagaaggacttactctaataaatcttctacagttctagaaactgaggttcagaggttgtaaatctcccaagttcacaaagctaataggtggtggaggcagtattcactttttggtctgttaccaaagagctgtgtagtatccatacatttttctktccttccttcctttcactgtccaccttctaccttttcccaaggtctcccgcctgccatgcagaaagtcatgtataagggactcgtccccgaggataaaacattgagagaaataaaagtgaccagtggggccaagatcatggtggttggctccaccatcaatgatgttttagcagtaaacacacccaaagatgctgcgcagcaggatgcaaaggccgaagagaacaagaaggagcctctctgcaggcagaaagtgagtccatcttgtgcttcttggtcttgagaaatttgaggctttgtcctcttgagccgtggctggttatattctccctagaataagctcctttttggacagggcccatgatggaaatttatggcagcagttgggtgccgcagagtggaggtgacaactacctgagatttgcaactttgtctcatctggcgggtcagtgtgtctcaagtctacctactttaggataagaccttggtaaagggaggcttcagaccatgtgttgaaaggaatcagacgtgggtttctctctcttatttagtgccagagaaaactaccagtactagaagtaagccctcattttgtacaagtgcttacatttggctttttggtttgtggctttccccaagtcaacaagcctggctaggcatggaaatcaacaactctcggaggttcccctaaagctgaccgtttcaggaagctaaatgaagctgagtaggaagacaactacactgatggatttgtttatttatttttttgtcctgatctgtgaaataggagcttggttttttacgttctctgttcttttggctgcaagagatcctgccttgtcttgtgctcatcatagccattaacattctttcacgtaacgaggaaaagtgagattattttactatggaaggaacaggttgtaagaatcattacttgttatctttttacctggcaaattatactgattgctgtgtagcctcctgatcgttcttcctagtgttccaaggaagacaggtattctcaactgtgtctgaagtagagtagataaacttcaatcaacatcatttagtgaccatagacactaagatatatgaccaacagtaagaaaaggacacagtttgtgttacagatccataatcccccatgtgtgcttccaaaaccccaaaggagtataaaaacgagaagtgtttttataaatttaacagcaaaacctgaccagaattagtgtgaattttcctctttggtgacaaggtactgccccagaccccacagagaagattgttatgtatttgaaagcaatattatctttataaaaattccaaaaccctgaaagttcaaaactctagggtttcagataaggggttataaacctatattaattatctaaaaggtgttgatttggagacttcacccccacatatggggtctcagtgtcttgaaaccgattgagtttcttctcatattcctgtttttctttgccacatgtatgaaatagtgaaatgtgagcacgtcagataggagtggtcgcaatggtcacacccttggagcataacatgcctcctaaatacaggtttttagttactaatggtagcttaacaggcttagaactgttctccacagtacaggaaatcttgttcaaaaggtacttgaaaggtgtgactcgaattgtacttccagcccatgctgctgtgtttcattgaggccaattatgatgcatcacatgacctaatgagagggatatagtcccttgcctttttaccagcttattaaggggtctgggggtgatgtctggagtgactttttgctagcagtctggcagtgctgagtttattcctcccagagggattccaccatgccagtgaggatttgggctggcttgtggctgcctagtgcttacatttgattaaattgttaccttctatccattcattgtcccctagttccagccttccaagcagtggctatgcctataaggccacagatggagaagaaagaagactcaggcatttgggccaggcaggagaactgtttaaggggccctgaacttagaatccttraagagctgcctcagagttcttggggcaggtggtaggggtggagtttagaggcttcttaatgtcaggttatagagtaataagcatttctttctgaaaggtggctcttccaggttcctgtttagctggagttaagggtagggcagtggggaaaacttcggcgatgggctgggtctccatttgttgaagaactgctcctcctaggcagttagacggattaccagcatcttatagtgttctctggaagtttaagttgaaaaaggtgggtgccattttttgtctgctaggagagcaacaccctttgtcgccctctttagtttgatggtttaatcatttcagtggtkatttttttttttttttttgaggggaggagggcaatctggaaatcccgtttgctgtagaactttgatatctaatatggtagctatccacatgtggctggttaaaatgaaattaagaattcagttcctcagtcatagtagctgcatttcaagtgtgtaatagtcacagcagtaggtagtggctagcacaggtacraacatattcgccctcccagaaagttctgctggacagcactgtgctatagtttcaaaggatccatagtctgtcgtcattaaaagcttttgagccaaaacactaaggctttcttcatcctctctttcaagggaatagtaacacgacgaaatgtagtcagctgtttcatttcattctctcttctgacttatagcaacacaggaaagtgytggataaaggaaaacctgaagatgtgatgccatctgttaagggggcccaggtaaggcggatttctttgtgagcattctgaaaatgaggcagccccaccgtctgacttgaggttcctccaatcctgtcccttctcttttttccctgtttttttttttttgagacagagtcttgctctgtcacccaggctggggtgtgccaccacacctggctaatttttgtatttttagtagagacggggttttaccatgttgcccaggctagtctccaactcctgacctcaggtgatctgmccgctttggcctcccagtgtgctgggattacaggcgtgagccaccgcgcttggcccccttctctttttttctgactgtccctccatctcttaccattctctcgtgccttcaggagcgcctgccaacggtaccgctgtccggcatgtacaataaatctggaggaaaagtgagactcacctttaaactagaacaagaccagctgtggattggcactaaaggtatgttcttyctcgcctccttgctkkcccactgcctgcctctggcacccarcagcactcacattttagagtgcgatttcacccctccttctgaaacctctctctccactgtgctttgcttgcttctggcttttaaatttgcttttagatgctcgccttttgtttggaccgttttccctcattgttttcagtctgatcttagggctgatccaccaaacagtggctcttcagttgcacacagatttgggggtcccaaacacgtggcccaagggccaaatctggtccacagaaaaatgttttgtgggatgacacacaatctgtaaaaattgggagatttcactaatctgattttttttttttttttggcttctcttgaaaactcaaatgatctggccctttggggcctgcattctcacatggcatcgatccactagagccgagtggtggtttccagtgggccatactacagtcttcatggtcccatttatcttagaagtagccagctttgttcatttgtcacctgcctggcccctgtaggtcagagtttgaccctatagtaggtgaagttttcctaaccgctgccgaggaatctgcctctccctccccgcctggttgccctctgcctgccccacccccgcctgtgcacggtgtctggatcagccttgctgtttgctgggaagtgtctctgactgtcctccctctcccttcccccagatggttacaaagtcttgttagttacactgcagaactgtctgtccctttctttgccacactgttgtgccagttaaagtwcccaagcatctttaaacttggtctgttcaaagcgagttaccctgtttcactgccccatctgtgttttcttctgtcctgtccatcttacctactgctttttatcctgggtacccgtgctcaaggacctttggctgtttaaggacacattcaaatgcctaaccatagcgttcagtgttctcaacactgggccttagtttaaattttggttccagcttctggcccgtttgccctgtggtcccctgtgtattttagccgcatctctctgtgaagctcccagtgtgctttgcacagctccttgtctttgctcatgctgtgcccttacctggaatgcctttttcccattccttgttattaataaaatcttccaaggccctacttaaatgtcctctctgaatgaagccttccttgattctccccccaccctccaaatgacttgctgccgcttctgttcatagagcgcttcgtttatatccccagagcactcattactctctgacttgtctgtccccctgttagattcctggagggaaccgaacatgcctaaatcacctgtttctgaccagcactgtaggtattcagtgttcgaggtaaatgctaaagagaagtatagggggtcccatcatctgacgttcactggtttcagggacagaccatttagtgagactccacttaaaatgggaccaagttttatggagaataattggggcaggggtggtgggaagagagagtttttaatcatctaaaacacaaaaatcagtgttcaaccctatactgattgttaaaatgaacaaaaattgaaatgccaaaaatgcttgagttttctatcaattttatgataacttgctrttttcttcatttcacattcaactctaactgcatggtcaaagcaagttttgcagaatatctgagggttccccccagtttttgcaagggcctttgaaccctctgctagatcattctcttctgtagagcctgtccatcttccctttatcagtagtaagctgcccagcctctgtcaactttgcaggtgattttgcttagttctgtctcatcacattcacttgctgaagtgcatagacttcctgcctcttgctggacctctacttttgcttgtgggcagcctcattgaaggcagttgctacggctgacctggaaagaccctgccatgaagataggtgcaggcagagaagtctggatgggaactaagtctgtaagtgctcattggttccttggggaatatttctgtgtcaggaagttgtatagggaacacatcataactgcaggaactgacagaacaagaacttcctgaccctgtattggaagttttctttttgctagtaggagcagccgccttcctgctttggcctaaagggagagctgtagaagaagctcaatatgttggggcttctgagcccttgaaagcctccttactcaccagtcttgttgaggagcatggccatggactactcatgttttctagggttgaacaaggttaagattttcattcccacccatagcactgtacctctggagcccaaggggcaggcagtcttgtcacttgcccagtcctgttacctaagtgtcataagcactcataagaggacagcttgttctgggagttggctgctagccactggcttcgtctttctgctggcaagaagaagcggctatggaatgaccatcccagcagcgagttggcctcttcgtggggcgctttgctgagtaagtgacccttaagggctgctactcttgactaaactctgctagcttgtgtaggaggaggcagttctaacagcctcaaaagaatgagaacaagctccaggcaggaaaccggaagccgctggaggagagcatgtaccctgctcgtaggaaagttgaatctggctgaaggtctgatgtagtgatcaggagtgtgggtccagaattgcccaatttttggagttttcaagagaagccagaaatctgttgtatatttttgtgaaatctccagacatttcaggatgaaaggtgttttaaaagtttccatcttaaagacagctgctgcccaggtcctgctttagggccgactgttgtagagccactagaagtccaaacctaaataaacatcttcaggtcccttctccccagcccccatttttcagatactgaggcccacagaactgaagtaaaatgtcttaagtccccagctagaccagaacgctggtctctaaattcctagtctgtttggccaacttatctatttttagactctatctttccagatttttctttctgcaaaggctgcaagtttttttccacttggtttagctgtttgctgagcctcccygcccccctccccctgcgcccccgtccctgaggtgtctgctgctccaggatggccatgtccccttgtgcaggtgcacctcgcctcccctgacctcaccmagtcccgcttcacttggctcactcccggcagtctcatctcactccaggcatcccttgctgcccccttctcttacctgccatcctccttaaactygcctcaatgtcttctgaccccatgtgatcagtggtatctcaagtgttaatcacaaaaggttataaatgttttaagagaacttcataaaagtgtgtgaatatagagtgcggaggactcgaggagggaggccggggaagggagcagggtcgtggtatagaatctagccctaaaatccaggcactccccttcccttgtgagagccacaggggaacgtgttgcctctttgttcgtaggcctcttgactctccctactgcccaagaccttagtmaatgctgggcttgcataaggttacaaaggaatttcttgggtatttatttattttatatttttttttgttgagatggagtttcgctctttggcccaggctgaagtaaagtggcatgatctcggctcactgcaacttctgccccccgggttcaagcgattctcrtgcttcagcctcctgagtagctgggattataggtgcccaccaccacgcctggctaattttttgtatttttagtagagacggggtttcaccatgctggccaggctggtctcgaactcctgatctcaggtgatccacccaccttggccaaatcctgactcacaagatgttaggattacaggcttgagccaccgcgcctggcctttcttggatatttattaaccatcagacttttaaaaaataatcccagggaagatacaattctgccctcagagacctttactataccattgccaaacccagtttcccacttgctcctacggagttcccagctcccacacgaagccctatgtgcactggtcagaagaccctgtcgtgttgtccccagagggcatggcgccagtcacttgagtttactgtagatcccgcagccaccagccctgatgagggactgctgagtcagagaagttagaacaggagggccctttgaataatcactgtaatccctctcaacttagagcggactgagaaattgcccatgggctccataaaaaatgtggtcagtgaacctatcgaaggacatgaagactaccacatgatggtaagtagcgctggctgagttcagcccctctcactagactcccrcttcacctggcagggaacagttttaactgagcttgtttaacggaagaaaactcagtctccagaagatgcacttttttaagaccctgatgttttcttcatctacttagaacttaatccatggcctctattcctagttctgtttattttacacccccccacacacaccttccatcagtttaaaggggatatgttttctcttacctcttttagaaaagtctctcttgcctccctcttgtcgtgtgttgtttctagaccaggaaaataaatataaagaggaggaatggcttgtggattttcattataagttttatcttgcttataaaacaaaacttgcccttagccttggtgttggtgagggcaccagacagcctcttttctgtaataacgatgccgctcttccaggcccagtggctgagggcctcgtggggaagacgggctctgtggagcgtctattctgcatagaacccactctgcagagagcaggctactctttcccaagacagaatgtttggaggtgttgtgcaggtctgcagaacaaagcaaaaaattcattcatctggtaaaatgagcagcttaggcagtttccaaaattttcccagtgctctttggaggagccacattgaccacgaagttgattctgcagttgcccatcaggggcctggcctgagcagctgtaatgtgagggcggggcctccggccattgttcatccaaggaggcaggcctttcagtgtccatcccacagtgatgaagccacatcagcccatcccagggaaaagaaggaactagtggtttgaccagtagattgggataacaagtcccaggcagagagatgtgttggaagatcctcttgctatagaaaaaaatcaaaggggcttaaaatatggtgggcaagggaggcagccctgttggcatcctgcctagtgtggctgtagcaaggctgtagctgggagtgcagtccctaggctgtggggctcttggggttttgtcttctggaagtgatgatgccccttggcagcccttccacccctactctctctgtagtctttttttttttttttttttttgagacggaatctcgctctgtcaccaggctgaagtgcagtggcgctatctcggctcactgcagcctctgcctcccaggttcaggcgattctcctgcctctgcctcctgagtagcagggattacaggctcacgccaccacacccagctaatttttgtatttttagtagagatggggtttcaccatgttggccaagatggtctcaatctcttgacctggcgatccgcccacctcagcctcccaaagtgctggggttacaggcgtgagcctccatgcccagccctctctctgtagtctttattacaaggattgcagacaaattggtttggcctggtcagttatttttttctgttttaacagttgggccaggcgtggtggctcatgcctgtaatcccagcactttgggaggctgaggtgggcggatcatgaggtcaggagtttgagaccagcctgaccaacatggtgaagccccgtctctactaaaattacaaagattagctgggcgtggtggcgggcacctgtaatcccagctactcaggaggctgaggcaggagaactgcttgaattgcttgaacctgggaggcgaaggttgtagtgagcagagatcgtgccactacactccagcctaggtgacagagactctgtctcaaaaaacaaacaaaaaaacaaaacaaaaaaaaacagttggacttgaatgtttttaactgggccccatcactcctttttgaatagtttgtgttgccagtcacaccctgtagggtttgtagcctgacttttcaagcagtgtggtggtagggagtccaaggaagttgagtggactgttttggacgtctttggaggaattggtgtggatgggtaatgacttagtatttcattgaaatgttcatttctctcgagttatttctggcagaggatagctctagtagtccccttctcttttccaaacacctttacctttgtcctaatgaaagtacttagttatctctttgggcagatgctatttctctagctaaattaacatgtcatcattcacagttggaaaactgtggctgtgctttttcatttttagagaaatgtttttaaaatacagaaaagaggctgggcgcagtggctcacacctgtaatcccagcactttgggaggccgaggtgggtgagtcacttgaggtcaggagtttaagaccagcctggccaacatggtgaaaccctgtctctactgaaaatacaaatatttagctgggcatggtggcgcgcacctgtaatcccagctacttgggaggctaagggaggagaatcgcttgaaagtgggaggcggaggttgcagtgagctgagattgcaccgctgcactccagcctgggcaacagagagagactccagctcagaaaaaataaaaataaaatacagaaaagaaagagaataactgtcacaaacccatatatccatcactgagaagtggcaattgtaaatattttgtaatttgctttaatttttttaaataaaagaaataaagtttattcacagcaatgatggccccactgtcttcccctcccccattaccatcgtcatgtgtcacgtgcgtccttcccatctatccattctttgatttacacgtgtatccacgaacaagatggagtgttgttttgtgcttccagttttcgtaaatggtattatgtattgttctacaacttgcttttctttggttcaacataagaatctgtcagtattaactgtagatccatatggacccagttgatacctctttaaaaagagctccagtattggtgtgactaagccttgtcactttgaattctgcattcccttactgatggatatgtaggttgccccaggtttttgtggtttcagacagtgctgcaatgaacattcatacctgttttcttgagcatgtgtgacaggttttctagggcagcgtttctccaactgtggtccctggatcagtagtgttgcatcacctgggagcttgctagtttctcaggccccaccccagacctccccaaattagaaacttcacagggttggagcctgctgatccatgttccagcaagccccccggatggctctgatgaccactcaggtttgagaactgctgctttagggttggctcagcttaaccctcagcctgcctgtttttgtttttggttgggagaatgctccccacgtgcaargttttgtttggtttttcttccctttttaattaactcacatcccaaccctcacccatgtttgtcctgcctgcttggtctcccgacctctgaagtaccgcttggttttcctttttcccttccaggcrtttcagttgggccccacggaagcctcttactactgggtgtactgggttccaactcaatatgtggatgcaatcaaagacactgtgctggggaaatggcagtatttttgaaagcactttcacctctggcccaggagactgacccraagtgaaggacattgccgggagaggcctgcagcatccctggatttcagagttctggaactttgttcataaaaaatctatattcaatctgaggtgatgtggtgactgaagccagaggtgatgtactttcaccattagcttaattttaacttaaaattaccagttccctttcttgcagtcagcttcataccatttttaaagtcaatacratggaaatcaataaatctgaattccgaacatgttgtgtggaatactcttaagtgtgtttgagagtagatctgccaattatgttgacaagggaatgatcaaaagctttgtttttttwaaaaaaaaaaaagcagtttcaattgaaatattttcatacatctttggttgcaaacatttggactgcattgcaatgagttggggtgttttttttttccttttttgtataaaattgtatgcaaaatgggggtgggttagtaagccacatatttctgtccattgattcagatttaattctttccctttttcattctctcgcttcctcaatttgagtttttgttttaagaacccaaagatgtcagttcttcttttggtacctcatcaacgcttcctttcctgggctccctcccgccgtgctgctgctgcctgtgaacgcacggtgggagaggaagagctgctcagtcttgggcaaggagctctcacacttgctgtggtgttcgttgagcagcagagtatctcccagtgactcctgtttaaatgtcttgccctttgggcccccatctccaaggagttccattgctggttggatgattgtctgcacccctcactgagcttggcctagaggcccagcctggcatggttgtgcctgggctgtgccgctcaacagccccagctcccaagcagacaaagrcctcttccaggaggagccaggtagaagatagttatacagccatatagctgcagatccagataaccttctttctttggaagttttcaagaaattcttaagcagtccaaggatgatttcaattatgcttctccattgggtccttctgctcatgcattcagttcaagtgtcctttatcccaggttcagagatgctgcctttctgaagaagacatctgaccctagcaggttggccartgttattgaacaacaaaaatgggataaattgctttcaygattagctcaccttcttctggttttagcccttctgttctctgtacacgtgaacttctgtcatctccttctggcttggttgcctctgaaaggagggaaagtctcttggtaaattatctcttttgtgctgtttgctgtttctctgctgccgtctttgcagttctcctctcactggttgcaggctttcatagtaaggtttggcgagaaatgttccaaacatcacattttggattctaggctgtcacccctcattctgtgaaacgtattagcatgtgttcgcccaagatgactattccttgtgagccagttaatgatgatattctacgcccttcccttctaagctgtagttcaggaatccagcccacatagacagactcttgctttccatggtgtagtcaatgccaagtgatgcatctaggcaggaaaatctactctttgcttttttgggggcaattagtacatttgtgaagtgcagcatccaagaaacagcctgttttttcatcccttgagaaaggagcagtcattgcagcttttctgtccttgtcggcctgcagttcctggggaaaagagtacatctgagctacttgtccaagcctctgtctgcaggtgacaggttttgggggaaatgagatgcattaagtagaacatcatctcgggtcagacattgccccttttgtttgccartgccccagtcctagagacttgtcctgacagtgccgcacacctacttttgatctctcagagcaggtggctccatccccagactagcctggctgctctccgaggcccctccacctgctccccttattgccccattcttgtggcttgccgggccacttggcctcccttcttgccggtgacagcgttccatcatctccccgctccccaagggccaactgcttctcactcaggctggtgtcatttcaggaggaccaaagcctgcgtgagcctttttattttcagtaaaatggtgcttttttccttacttcgagatactatatataaataataatgtaaatgacaccttttcgtacggagctgtttgagtattgctttacagagctcactaaatcagcttcaacaatcttgagctctgtggctcctcaccctgtctgcatggaagaccttgctggacgctctcgggagagcagacatagcaccagaagccactgggagaagtgttttcgatccgtgtctgggccacagtagtattcactgtttagtctttgagttccgtaagcagtctcttcatacatttcttacagtctggagtgtactgactaaatctgtgtaagcaaattgaaatactctttcttttaggtagcgtcacagtggttttttttttcctcaggataatttctatacaatttccttactgtcagagggaccagatctttccctcactgtggcaggggccgtgcaggtggataaaggaagagctggtttccggagagtgactgtaacagcgttgactcgaagctagagatggagggggtggccgtctcttagacattggacacctctcagagcctcctgagggcttctttgtcttctagaatctctaccggtggtcctcctgcaggttctggctcacagacatcatcatgcctttttttccctccctgaggcgccttggcagaagagcgtgaccctgtgagccaggccccccttagctctgcttcagatcacagaacacagacagactcgcgagttgctggacctctttggtattaagtgtttgaatccatggtgggccttttgcaagtagcgttagctctttttaaatgttgaactgagctaaggatgcactttcttgtggacatagaaggggcccacgtaaggccctgagtaggctccttagttgctgctttacctgatgagggccaaagagattaactctgcctcgttgccatgtctcagaaaagttgccatatttcacccagaaggggctygttttcctcttactcttactttaaccatgtgcctggaggagccattctgggctcttgcacttgcccagcctttctttgccaggggcagagaagggaaagggggtagattgagtgtgccaagggccgtgcaagggcaggcttgctttccacccatctgctgagggagccctctcctctcgctccttgcctctgttcacacctgttgtcttggaagaggatggtccctttgtcttaaggctttgtgataaagtcatctccagttaggatctgcacctgtttccttcgtaatagtgcctggcggcctttctgaagttacaggtggttgggagccctctcgcatgcagaacatctggtagattgatctgccaggctgggtggttctactgctttctcaatttctaagaaccttttttttttcttaaagagttctgctgaattatttgacaatatttgtaagtaccatgtttccttgtggtgtatgctctgttctggtttctgttttcaaatcaaatgcctgtttgggaggagatgaacgtatttagtctattagatttgcactgctggattttttttttaaagtgtaaccttgaatagctgtcttattgtttatcctgtaagattagtcaatcgattaaagtttgataattaattgcgtctctttttccttccaattcttcatgcgcctaatccatactggggattaaccaacatttggaattggacctggagccatttctttgccagttgtggtcttatttggctttaagtatattcaaatgtattctctgctgaaacagttgacatttactctgcaaaatggtgaaagtgaccggtgtgacagtgagccacactcctgttggagcagcatggtctgctccttggtgggccctggcttccacatgttggaagagaagctgcctccctgtactcacacctcctgactagtgccttgggcaaccccacctagccatttagcctttgaggacatgttttagaaaacactgagattggagctacagatttagccacaagctataaagacccaggagtcgggaggaagaaaatctgttaccaaaaaatgggccaggctcactggctcacaccggtaatcccagcactttggaaaccaaggtgggaggatcacttgagcccaggagtttgagaccagcctgggcaacatagcaagagccccatctctacaaaaaatacagatatcggccaggcacggtggctcacgcctgtaatcctagcactttgggaggctgaggtggatggatcacctgaggtcaggagttcgagaccagactggccaacatggtgaaaccctgcctctactagaaaatataaaaattagccagatgtggtgtcaggtgcctgtagtcccagctgcttgggaggctgaggcacaagaatcgcctgaaccccagaggcagaagctgcagtgagctgaggttgtgccactgcactccagcctgggtggcagagtgagatcctgtcccccccgccaaaaaaaaaggcaggggactaaaacagaatccttggtatatgaagagtgatggagtttgtccctgctggtctcacttcttcctagcaggcggagggggtcagctcttcactttttcacagtacctcataatcctgaaacaatacggctggatgcttagggatctgactcctacatgggagagggggatcattgggattgtatcccatgctatacgttggctgatgcccatctggagaatctgctatctggtacttctaggctgagtgtgatggctcatgcctgtaatgccaacacttgggaggctgaggcgggcagatacctaaggtcgggagttcgagaccagcttgaccaacatggagaaaccccatgtctactaaaaatacaaaattaggcgtggtggcgcatgcctgtaattccagctactagggaggctgacgcaggaggatcactagaacctgggaggtggaggttgcagtgagctaagatcgtgccattgcactccagcctgggcaacaagagtgaaactccatctcaaaaaaaaaaagagaccacctagcagggtgttttgacctcttgctgtgtgccaggcaaatgctgtttctctaggcctccagccctggagggaagaatggacatcacctttgggcgctcttccactacgtacttgctctaaacactctgcattcaggtcctgtgacatcagcttcttccttatgtcttaacagtgtgaaggatgttacttgcattatacagtcaacactgcaccacatccctcctgtgaccctcacttcagccactagaggaaatcttaggttcagagaagttagatggcttagccaacatcacatgcctgttaccgagtgaagctacaattcagagcccagctttgcctgatgctaaagtctgtgctcttagatactggcctggtacttgagaagttaggaaagaacccagctgctttattttgctttcaaatttttttctttccttggttttgctgtgtgtcttcagggcactaagttgggtgtgtgagttgcttttttaaactttgaaccttggcatttgtttgttggctttattaattagctttgcatattaataaagttaatttgtcagttacatttgtttaattggctttatttattagttggctaccactttaaaaattaaaacagtaacacatgcacttgataaagaatttcaggtgataggtaagtctttcactcagttctcctagcttctcaaccccagcaccaaatcatccctgaagaagaattcacattacgctcaagtacttaagtgcgcatcccaggggcagagggccaatcattcccacttaagccacttcctagagtagggtgaggggactcctcaatgggaacttagcaggagggagccggcactggggaagcacctcaccagcgctcagactccaagcctgacatttttcttgaactgttgctcattatctgttgcctgctcaggtatcctacaaacacctcaaattcaatgcatcaaatccaatcctctggtacctgctttagaccgcaactcacccagtactggtatgttgggagatagcttagacacaactgatcagattctgccatttatttgttttattttatttattttgagatggagtttctgttgcccgggctggaatgcagtggcatgatctcggctcactgcaacctctgcctcccgggttcaggcgattctcctgcctcagcctcccaagtagttgggattacgtgcacctgccaccatgcctggctaatgtttgtatttttagtagagacgaggtttcgccatgttggccaggctggtctcggactcctgacttcaggtgatccacccacctcagcctcccaaagtgctgggatttcaggtgtgagccactgcaccccgcctatttatttttcaattcttttttagagacagagtctccctctgttgcccaggctggagtgccatggtgcagtcatagctcaccgtagcctctaattccctggctcaagtgatcctcccaggttctgccattttattcccagaatctcttgcccatccatctctctttatcccaatctccacatctgggactaactgctactacaggcaggtgacaccacactcagctaatttttaatatttttgaagagacagggtctcacgatattgcccaggctggtctcaaactcctggcctcaaatcaaagtgctaggattaacagaacaggcatgagccaccatgccgggcctctcatgacactttttaaagtccaggccttataaactcccaccttctggatttgtttcctcataatcagattcaggttagatgattttagcaagagtgcctcagaggtgacatgacctcagtgcctcacatcaggagcagcataggaggttgacttgttgtatcattggtgatgctgagtatgatacctccacctaggttgtacctacctcccttacaaggtggtgagctcctggagatgggagacaaactatatggtgtgaaactgtgtactcaggctccaggagtgcttaacacacagtgggtacttccttgtgtgtggagcgagtgagtgaacttgctgtatggagaacacagtgagaagactgaagcagctccactggagatatggtggggatggctggagacaggactgggactgggtcatgacaggcttcacaaaccgccctttcccagtgggaacggtgtacaacagaggcacagatcctctgaggtgttttcagcagctattaaataccatatgcatacaattccatttatcctgttcttgaattcacacacactttggaatgctacatttggccagtttgctgcctacctatagtggcacagaagtctctcaaaagaacattctgataagctcttagagcagaaagaacagaaaggcctttgctattgcttgaacaaccagaccctaaatggccttggggatgaatgatgtgtgtgtgtgagatccagtaaatgtcttccctcattctggcttctttggggcttacaccagctactggatgatgtgaatgggctgtttcactgcaggcgtctggtgaagatagtagcaaagcaggcactcaagtggcagtacagtcagactttgtgatcttaggcagacacaatcacagacgcttttttttggtaaaatgtacagctgccatgggatttaaaatagccagaacaacttggggactaccaccaaaatacccccagtgttaaactactagacgttccaatcaaaggaataacacacagcctgtttactccctatttgatcaccagtgcttagtaagtgctcaagctattgttaaataaatgcagttgtaaaaaaacaatgaggaagagccttatcctccaatttggcagttttccaagatatgttgctaaatattgcaaaaaaataaaaaaggtctagtgtaacaatgtatgattttcataactgaggatatgctttctattgctaaaaaggggccaggtgcagtgcctcatgcctgtaattccagcactttgggaagtggaggcgggagcatcttttgagcccaggagttcgagaccagccggggtaacacagtgagaccccatctctataaataacttaaaaaattagcagtggtgtgcctacttgggaggctgaggcaggaggatggcctgagcctgggaggttgaggctgcggtgagccacagtcgtgtcactgcactcagactgggtgacagtgaatgtctcaaagaactcaaagaaaacgaggtttgcattcgacccagcaatcccattactggatatacataaaggaatataaatcattctaccataaagacacacacatgcctgtgttcactgcaacactattcacaataacaaagacatggaatcaacctaaatgcccatcaactgcagactgggtaaagaaaatgtgtaggctgggtgcagtggctctcgcctgtagtcctagcactctgggaggccaaggcgggcggatcatttgaggtcaggagttcgaaaccaatctggccaacatggtgaaaccccatctctaataaaaatacaaagtatccgggcatggtggcggatgcctgtaatcccagctattcaggaggccgaggcaggagaatcacgtgaactggggaagcagaggttgtagttagccaagatagcaccataccactccagcctgggcgacagagtgagactgtctgaaaaaaaaaaaaaaagaaagtgtgtatacacacacacacacacacacacaccacacacactctccatggaatactatgcagccataaaaaatgagatcatgtcctttatggtaacatggatgcagctggaaccagtatcctaagtgaactatcacaggatcagaaaaccaaataccacgttctcactttaagtgggagctaaacattgagtaaacatggacagaagggaacaacaggcactggggcctactggagggtggagggtgaggctccaaaaaacacccatcagggactgggcacagtggctcacatctgtaatcccagcactttgggaggcggaggtgggcggatcacctaaggtcaggagttcaataccaggctggccaacatggtgaaaccccgtctcaactaaaaatacaaaacattagccaggtggtggcgggtgcatggtggcgggtataacgtcagctacttgggaggctgaggcaggagaatcgcttgaacctgggagacggaggttgcagtgagccaagattgtgccactgcactccagtctgggcgacaagagcgaaactccttctcaaataaaaaaacccatggggtattatgcttattacctgggtgatgaaataatctgcacaccaaaccccatgacacataatttacctatataacaaacatgtacatgtacccctgaacctaaataaaagttaaaaaaaaaaaaaaaaaaaaaaggactatgtctgcctaacatgcctggaataactctagagcaacccagaaggaaccagcgtattggtacctgcaggaagggaagcagatgtgagtgtggacccaatcccagagctgactcccatccttcgaccacctcatctctcagccatgagattctctgctggctgagggcccctcacctt

SEQ ID NO: 97788 - DNA, 34733 bp, Homo sapiens
atttcttttatttattattattattaaagacaaggttttgatctctcgcccaggctggagtgcaatggcacaatcatagctcactgtaacctcaaactcctgggctcaagcgatcctcccagccttaacctcccgagtagctgggactacaggcacgtaccactgtgcctagctaattttcattttttgcagaaatgagatcttgccatgttgcccatgctggtctcaaactcctggactcaagtgatcctcctgccttggcctcccaaagtgctgggattattggtgtgagccactgtgtctggccctaatgctctctgcccttgcctcacttgacctctcctcagtttgtgacactgttgagcactcccttctctacccagtgctctcttcctctggcttccacgaaaatgctcctcttgagttctctttttatcctcctggctagtctttgtcagttctcttcattagctccttctctgctgcttgcccctaaaagactaatgctccaggctgggcactgtggctcacacctgtaatcccagcacttcaggaggccaaggcaggtggatcacgaggtcaggagttcgagaccagcctggtgaacatagtgaaaccctgtctctactaaaaatacaaaaaaattagccaggtatggtggcacatgcctgtagtcccagttactccggaggctgaggcagaggttgcagtgagccaagacaacgccattgcattccagcctgggtgacagagtgagactctgtctcaaaacaacaacaacaacaaaagactaatgctccccatggcctcgtcctttaggctgctagtgtctttattcctatcccatagctcactgacttaaaccacacccatggttagtcataattaaaactaacttttacacccatgcttctgagccagacctttctccaaaacttcctaactgcctattggacaactgcattgcgatgtagacctggctcctcatattcatccaaaatggtatcatggtcttcaccattacacctgcccctcttcctgcagactttcccacagtgggtggaacctttgtcctccccattgcttaaatcagaaatattgctcccagccaccctagacttgtcctcacttgctgctttcaggaccttcagcatttggctccagccaacatctttagtctaatttctcaacttttttgatagcttgttccagctttacttaattacttgtggtttccaccaggccctgtggtacacacctgtagtcccagctactcatgaggctgaggcaggaggatcgcttgggagtttgagaacagcctgggcaatgcagggagaccctgtttcaaaaacaaacaaacaaaaaactggctgggcgcagtagctcacacctgtaatctcagcactttgggaggccgaggcaggcagatcacctgaggtcaggagtttgagaccagcctggccaatatggcgaaaccctgtctctactaaaaatacaaaaattagccgggtatggtggcacgtgcctgtagtcccagctactcaggaagctgaggcgggagaatcacttgaactcgggaggcggaggttgcagtgagccaagattgtgccactgtactccagcctgggtgacagagcgggactgtgtctcaaacaaaaacaaaaacaaatcaaaagcaaaaaaatcatatgtggtttccaaacaattcttgccacttcaagcactcctatgattttgcacatcctctttctagaattttgccttcccagcctccacctgttggctttctaattttggtaagtcctgctttcaaactttagtgcaagtagctcctccatctgactgtgctcaaggttctctgtatttacatcttagaactgtacttgcaggagccgagtgtggtggctcacacttgtgatccagctacttgggaggctgaaatgggaggattgcttgacgtcaggagttcaagaccagcctgggcaacacagcaagaccctgctccccacaaaaatactgtacttgtgacatcttgagcttgtctttcccataccccatcctttgttggggccaattctccatggtgtttctacccatcttatggcagcttttgtctcagactatctttccaaggatgtttacttagcaaacagccttggaagatagtatctctctctggggcagagaaaagattttatttcctgagcagtataataatctccccctcagggattgtgaaccccgaaaatttgagaaatttcagaatttagaatttaaatttgagaatttagaaagtttattttgccaggtcaggcatagtagctcatgcttataatcctagaactttgggaggccaatgtgggtggatcacctgaggtcaggagttcgagagcagcctggccaacatggtgaaaccccatctctactaaaaatacagaaatcagccgggtgtgatggcaggtgtctgtaatcccagctacttgggaggctgaagcaggagaatcgcttgaacctgggagacggaggttgcattgagctgagattgtgccacttcactccagtgtggcagtgtgggcgaaagagcgaaactctatctcctctgtctcaaaaaaaaaaaacaaaaagcaaaaaaaaaaaaacctggcgccgtggctcacgcctgtaatcctagcacttcgggagaccgaggtgggcggatcacctgaggtcaggagtttgagagcagcctggccaacacagtaaagcagccatctctttagtgtggtaaaattacaaaaattagccgggcgtggtggtggcgctcctgtaatcccagctactcaggaggctgaggctgaagaatcgcttgaatccaggaggcagaggttgcagtgagcagagatcacaccattgcactccagcctgggtggtaagagcgaaactcagtctcaaaaagagaaaaaaaagaaagtttattttgccgaggtcgaggacacttagccttgacacagcctcaggaggtcttgacgacatgtaaccaaggtggtcagagcacagcttggttttatacattttagagaaacgtaagacatcaatcaacatatgtaaaataaacattggttcggtcaagaaaggcaggacaacttaaagtggtcaggaagggcgggacaactcgaagtggggagagggcttccaggtcacaagtaggtgagagacaaatggttgcaatgagtttctgattagcctctccaaaggaggcaatcagatacgcatttatctcagtgagcggaaggatgactttgaacagaatgggaggcaggtttgccctaagcagttcccagcttgacttttccctttagcttaatgatcttgggggcccaagatattttcctttcacagtatgaaggttgggcagatttgttagcagctccttctaagacacgtggttttgtaagcttagggttccttggctgtgacacgaatgcatgctgtgcacagcatccacctaagctgctctggcatcatccttgagggacacagaggacagggggaattgaggcaaaacacgaagcttacactgcctgctgggccacaagtaagagagtcttttgtccttgacccatacgtctcatgtcttctgctagcatctgtgagcctctgaaactatggcagactaacttgatagtttgcaagtagggtaaacttttggaccctcccctgttcttgacatctttacacacacttgactgttaagtgccttgagagtagggactgtgtctcagtggactttgcttaccctgtggatgacacaaagtagttgcttgtggtaggtagtaactacctactaatgccgctttggtctaaaggactttggatgtaagcactcatatttatttactaaattcagctctggaaaaaactgccattattcccctgtttagccacagatcttcttcccctggtcattaggtattgtgtacattccttgggtttgcagaaggtgaagccacagagaaagtgaagtgcagggggctacaaattgctacagaaaattcacattgtgaataagccctgctgcaggtagtggaggtgactcatttatcagactgggtgtttcggggaggtagggtgctgtggtgcagttgggatggaaatgccggtctttgttgttagcctcacaataacatcaaacataccagactatttcccagaagagccaggatgactgcaaaccgacctgtctgagctcgaatgaaggaatgaatgagggcttctggtgcctgatgtcttagaagtaaattctgctaaccttttgcaacatgagtaagcccagtcatgaccaggcaagacagctggctgggcttgctcatgggagggaaatcttccaggctgcagctttcatctgggttttgaactgtggaagcctatccttttctggtttaggaggagggtagaacgttgagagcatttgagcagacatggctttcagagccagagaaagtcaagggggaaaaggctttgctcagagactatggctgatggctattaaagatcacttcgtttcatttgtcattttatagattaaaaaaatgaggtaggccgagcgcggtggctcacacctgtaatcccagcactttgggaggccgagactggcagatcacgaggtcaggagatcgagaccatcctggctaacatggtgaaaccccgactctactaaaaatacaaaaaattagccgggcgtggtggcaggcacctgtggtctcagctactcgggaggctgaggcaggagaatggcgtgaacccggaaggtggagattgcagtgagccgagatcgcgccactgcactccagtctgggcgacagagcgagactccgtctcaaaaaaaaaagaagaaaacccaaaaaaaccactgaggtctaccggcgacattattggatagatgactgctttgggagttccagttgaacccatttctatttcattagactgctcattttttctttttcctttggctctgttaaaagaaaaaattacaaagaatttagtttaaacatcttaactggcttttagttccaattctacaattgggcaacgcttcattctgtaaaatggaatgaatgttccaatgagaagaggaagttggtattacagacagaaaaggaccgaggaaagcagaaacaaaaagtggattagttggtagaaagttacttttcttgtaaaggttaaagaacacgggacttcttcatgccagctaaaactgacctgtttggggatttttgttttgagacagggtcttactccagcgggcaggctggagtgcagtagtggcaccatctaagcttactacagcctcaacctcccaggctcaagcgatcctccctcctcagcctcccaattagctgggactacaggcgccagccaccacgcccggctatttttttttttttttttttttttttttggtagaggcagggtattactatgcctaggctggtccggaactcctgagctcaggcgatccgcccacctcggcatccaaaagtgctggtattacaggtgtgagccaccgcgcccagcctgtttggggatctggctagcatctgtttctctcctgatttcttggaaggtcagataaagatcctagctttggcgtggtagtgtgaaacttcagcatgagtaaccccattttggtttggtctgatgggcctaatgcaggaggtcagtctaaactaacggtctcccatatacattttatctaatagctctgtcacccttcctgcacacccggggaactcgggtgcggcattctaacgcctgctcagcatgattccacattttctccaggcccataatccagaggaggttgggcccggagcaggcttgcctcgccaagctccggctccgtgcgtgtgtgaagcagtgccatgcctgagtggggaggagccgcggaagagaaagcgtaaggcggcgtggaaatgggtggggcacgctaggacccgctcacatttgttcagggagaggcagtcccaaaaagcctctcaggcacacaacccagcacagcaaggcagtcacaccaaggtgggaaaagagggcagaagagcgcgaggggctggaggtggcgcccctgtgtcccactcgttctccctgggctgggaaagagaagcggtccctcagaagcgcaggctgcgctagcttaggatggacgtgggtaacgctcagctgactccccgcaggcaccctatgcagggctttgtttcgggggggaacccgcaccagcgcgtaaggggagtaggagagatctacgtgaccctggtgcgcagccgcgccctatcgccccggccacgcgccgacgccccgccccgtccgtgacgcgttcgcgcggggcctccgccccatccccctcccaggcggtccccagcgcgctgcctccgccgttccccgccccctcgcctctgaggctgcccggatagctgcctgatccaaggcccagcagcttctgccttccggatccccaccgacggacggaggcagcccacctgcaggaccggggcgctgtcggtccacgtggccgctctggagcaggttggagttggcagcgggctgcgctgcagggacaggcgcggcggacagccccgggggcagcggcggggtcctgtctgggagaggacagggttgcggcgggcggaacggtgtctccttcacttcgccctccagctgctgsagctgcagcccgaccgcragcgtgccaagcggcttcagcagctagcggagcggtggcggcggcccccctcaggacaccaccaggtaccgccgcgcccgcctcacgccgacccaggggcctaggccgcggcggccaagccggaggcccgcgccggactcggagtcggccctggcttcctaagatggccgcgctgccccgcggcccctcgcccctctctkcccgggatctccctttggccctttgaccccagcttaccgcacttcttgtccctcccgcagattcccctcttcccgcggcctcgccatggcgacccacggacagacttgcgcgcgtcgtaagtaaagctgggatctctgcgggatggggcggcggagagtcgaagcctgtcgaccagaaacccagtttgtttccccctatctttccaagaacttggaaattcggctgcttttggtggtcgccccaycrtctgaccacctyctctgcggaggaggggctgggctgctggatttcaaatggggaacaaggcccggggagttggtctgtggccgcatggacttttcagcctttgtacatgtctttgacgtatagaagtaaamagttgttaattggggattctgcctttggaggatcggatcaatcacttttytagaggaagtagcagtccctcttgtgagagckcaaggtcattacttgtgctcctaagggcgtggacgtgytttgtggaatgaatgagctggtgtaatgagctcagattgcctgcccttaagcagcacagcattggccgaggacttgagagtyacattagtaagtttgaagcgctatttgatatttagttgatgtagacatttgagtgaaacacacatggcagtattttttccaagtttcaatatttaaattcccagtattaaattctcttcccactccagggtgttggttttcccctcagcgaagatattaaaggacgtatcagggtaaagggcctagtcttaggtttcggttttatctaatttagttaaatcagctcatctcagtgaattttggcagatacataaatatccatacacacaaatacttgtttgattctttgtacttgtccagtcctaggaagtgaggctgtaggtaatagactgtttttccgttttgaaacgaattccccaagtttgtatartcatggttatctgttttagaaataattcgttggtggtatctcctttatgggtcgttatagttytattgtagctcctgaccgcataaaaaacattccaacaaatgggattgcttgaattttaatatcagcagtgggtcatrctcttgttcttggatagaaggtgggagaatagasacattaacactggaatgttttttttctaccagcaatgtgtattcctccatcatatgctgaccttggcaaagctgccagagatattttcaacaaaggatttggtaagaaccttatttttaaaacgttttagataaagagtgaaaatgtatgtttgggttgcttagcgaaatcagatcaatcattgcaaattgtaaatatcttgctgctttaaatttagagttacttatttttttgagacagggtctccctctgttgcccaggctggatgcagtggcatgattatacctcactgcagcctggacctcctgggctcaagcgatcatctttcctcagcctcccacgtcccaagtagctgggactacaggcacgctctgccacacctggctaattttttttatttttcgtagaggtggggtctcactgtgttacccagtaaacacagtggcctctcaaagcctggttggattacgttacagacatgagccactgtgcccagccttgtattaattcttctattagaaacttaagatacttagattaaacttatgtgaaaatagttcttttacagtctacatccccctcccccaatttcccaaaatttttaaaaactgtacttagaagatttgagcctttaagaaaaacggctcgtgctttaattttttttcagttatagcttaggccctggttgactagagttacgatatattactgttttgcttttgtggtgactcctaatactttatctagagttatgagctttttcaggtgaatttgagttttcttgaaaattttgttccataccctcctcccctttatttagactgttggaaataccccattggcataaatgtcctaaatgtctgtattatgataagttggttttgtttttgtttttttttgagacggaatctcgctctgttgcccaggctggagtacaggggcgtgatctcggctccctgcagcctctgcctcctgggttccagcaattctcctgcctcagcctctctggtaactgggattacaggcacatgccaccatgcccagctttttttttgtatttttagtagagacgaggtttcaccatgttggccaggctggttttgaactcctgatctcaagtggtctgcctgcctcgactacccgaagtgctaggatttcaggcgtgggccaccgcacctggccatatcatgataagttattagctattctgaaatttcagttgaatgattttttaatctgatatttaagtttaagaatagtttgggggctgggcgtggtggctcacacctgtaatcccagcactttgggaggccgaggcgggcagatcacgaggtcaggagatcgagaccatcctagctaacacggtgaaaccccatctctactaaaaatacaaaaaattagccaggcgtggtggcacgcacctgtagtcccaactactcgggagactgaggcaggagaatcgcttgaacccaggaggtggaggttgcagtgagctgagatcgtgccactgcactccagcctgggcaacagagtgagactccgtctcaaaataaataaataaataaataaataatttgaaagcattcttttgtgtaccaactaccaaaaactagacaaagcagcatagggataattctgccctttataagccagtttacaaaagacgaatttgtaacaatttcatttaratattgtatattaacacatttttatccacctctgaatatgtggaatctttttgttttttatgtatagtcaacaattgctatgcatctttcatacaaaggaatcattttgtttcttttgctgtctatttgttgaaggttttgggttggtgaaactggatgtgaaaacaaagtcttgcagtggcgtggtgagtgttactgttgaataagttctattgaacctttataatttttcaacttgtaaaatggtcataactgaaagatgtctacctgttttgtcttaaagaagaggcagaagttaactttgttttaagagatttgyrtgtaacctgatttattttggccttgaatgtgatttctgattttcatgtggtctttcgtcatattatgtatgcacaaggaacttaggaaagaccagtcaggtggtactctttactcgtaagattacacatttgaaggcagggaacccattattagacttttttgtaaccctttgtcaacaatgctcgtcagagttatgggcataaaaatatcaggaactcattaatttgagtgtactaatcatttatataatgtccattttctagcagttctccctggagaagatttccacatgtattttatgagtttagggagtcctgatctgaattttttttttttgagacggagtctcactgtgtcacttagactggagtgcaatggtgtgattgtggctcactgcaacctccgcctcctgagttcaggtgattctcttgcctcagcctctctagtagctggaattacaggtgcctgccaccacgcctgactgatttttgtatttttagtagagctggggtttcaccatgttggccaggctggtctccaactcctgacctcaggtgatccacccaccttggcctcccagagtgctgggattacaggtgtgagtcaccatgcccagccaagaatatttttaaagaggttaatattttggtatttgggtgtcttgatagttcaatgaactgtttacaaaggggataaactaatatttaacttttttcgagacagggtctcactckgttgcccaggctggagtgcagtgagtgcagtggcacaatctcagctcactgcagcctcgacctcttgggctcaagcaatcttcccacctcagcctcccaagcatctgggagtacaggccgtatccatcatgcctgagtattttttgtagtttttctagagatgacgttttgccatgttgcccaggctagtcttgaactcctgagctcaagtgatccacttgccttggcctcccaaagtgctgggattacagatgtgagccaccatgcccagctagtaaaatttaactttgtgaaattttttttacttaaaaaatttttgttttgagattattttaggggtgggtgtgtgtgcacattagaatactataggttattttgatatatgtatgtatgtatatatatagagagagagagactttttttttttttgagacggagtcttgcactgtcacccaggctggagtgcagtggcatgatctcagctcactgcaagctccacctcccaggttcatgcctttctcctgcctcagcctcatgagtagctgaaactacagacacgggccaccacgcccagctaatttttttgtatttttagtagagatggggtttcaccatgttagccaggatggtctcaatctcctgacctcatgatctgcccacctcgggctcccaaagtgctgggattacaggcgtgagccaccgcgcccggcctatatagacatttttgatgtagtgcatgtaactgatatttatttaatcgtattgtagtttttttgttttgtttttttttttttcctctgagacgcagtcttgctctgtcgcccaggctggagtgcagtggcatgatctcagctcactgcatcctccacctcccaggttcaagtgattctccggcctcagcctcccaagtagctgggattacaggtgcttgccaccatgccccgctaatttttgtatttttagtagaaacagggttttgccatgttggccagtctggtcttaaactcctgacctcaagtgatcccaaagtgttgggattacaggcgtgagccacagcgctagccctgtagtttaaaagcctaggcctgttggatttctggggatttacattgatcatatctgtcgcttggtttttttggtctgaaaggaagcttaggtgtttagttatgattggatgacttatttggccaagttaacaggttacagagcagtgatttttagtgttttttaatgttcccattgttagtctattgaggcccctagtgtatttgttgaaacacaaaaggccttctaaaaaagattcagtccttgtgtttaaaaagcttactttctagttggagagacaaaataaactgagagtactgaggtaattaatatcaaatattagatcgttggataatcaaatctttgttggaaaggaatagattgttgtgtatagggttagggaaagttttatggaagtaggtttaagagcatgaaggatatgtaggagctggattagatatagcatgtttttattcacatttaatacatgtaactcaacaaccatggtattgatcctatagtatgtctctggccccagataagtcccattaatacctggctctgttttcttacctgaacagcaaagctactgaagccaccccagaatgtagaagccaaaatttctggtggtaaagggtatgagctgtaatctggcccaactctggtcccacagggtggtgttggctttgtttcttgaggcttccttggcatgtgtatataggctggctcttgatctgtgggctgatgaatggccgtaggtggggccccaagagtcattaatgtcattcaggattaaaaatagctactcacacattccccattcaaactgctagaaaaacctgttccatatatattgttttagtaatgctttccttttctgtggagcatatgaaaacgtacaaactttcacagtgtcagttcaatttaatcattcggaggtaggctttgtaattatagttgcagaaacagacccaaaaaagttaagtgaggctggtcacagtggctcattcctgtaatcccagcgctttgggaggccaaggcaggaggatcccttgagcccaggagttctgagactcacctgggcaacatagtgagaccccgtctctacaaaaaaatttaaaaattagctgtgcttgttggtgggtacctgaagtcccagctacttgggaggctgagataggaggatcgcttgagcccaggagtttgaggctgcagtgagctatgactgtggcactgtactccaacctgggcgacagagtgagaccctgtctccaaaaaaaaccgcaaaatgttgtgtcctgctcagtgtgatgcatttagtaaatgacacgaagaactggacatcagaactcctaatttttatatctagtgtttcctaacatgatccagtgcttttttgtttaattggaaatggagtctcactcactccatcactcaagctagagtgcagtggtgccatcttggctcactgcaacctcaggttctcaggttcaagtgattttcctgcctcagactcctgagtagctgggattacagggatgcaccaccatgcccggctaatttttgtatgtttagtagagacggggtttcaccatgttggctaggctggtctcaaactccctacctcaagtgatcggcccgccttggcctcctgaagtgctgggattacaggtgtgacccaccacacccagccagtccagtgctttttagtataggtattgagggctatgctttgacttgaaattcctgttaatgaaagggtctaatttaggagagtgatgtaagacctaaggatttgtctctaacagcagagcaatagttatacaaatgttctattttctgagagaaggttgactggcctttcctcctattgatacaatttttgatatttctcactctacagatatcacaatttctggctgtagtctctttattattttcacatcagctgtcttccttaggcttggcgtggtgatgcttgtgatcccagctactcaggaggctgaggtacgtggatcacttgagcctgggaggttgaggctgcagtcagctgtgatcacatcattgtgttccagcttgggtgacagaggcaagatgctgtctcaaaaaaaaaaaaaaaattcagataagccctccgtattttttctttttcagttcgtgtgcaaccagggattggcacattattatttttagacagggtctcactgtgtcacccatgctgagtgcagtggtgggattatggctcactgcagcctggacctcccaggctcaagcagtcctcccacctctgcctcctgagtagctgggactacaggcgcacaccaccacgctgagctggtttcttaatttttgtagagacatggtcttgctatgttgcccaggctggtatctaagtgctgggatcacaggcatgagccaccacactcagtcccccattgatttttgaatcccaaataaaatcaccttagcaaaaccttccttaaaagatgtacagttagctggggtggtggcttacgtttgtaatcccaacactttgggaggccgaggtgggtggatcacctgaggtcaggagttggagaccagcctgaccaacatggtgaaactccatctgtactaaaaatacaaaaatcagctgggtgtggtggcgggcacctgtaatcccagctacttggaaggctgaggcaggagaatcacttgaacctggaaggcggaggttgcagtatgccgagatcacgccactgcactccagcctggcgatagagcgggactctgtctcaaaaaaaaaaaaaggtgtacagtttgttcacttgagaattcactacaggttaacttgtgattgattggaagtgtcagctgtgtatgtaaagtggcagtcagttgctcaaaggcttatttgtcactcttatatatgcttagagagtagcacagtgcagaaggatacgagtgtttaggaagctagaaaaaggattcatgaatttaccaaatgtttcagggggtttgtgtgtgtgtgcgtgtgtaaggcagtgatgaattctaggcttatgagaatgttcatgaagttattgattgtcttgttaggaattttcaacgtccggttcatctaatacagacactggtaaagttactgggaccttggagaccaaatacaagtggtgtgagtatggtctgactttcacagaaaagtggaacactgataacactctgggaacagaaatcgcaattgaagaccaggtaacattttgaaaattttagtattaattttattaatttatttttgtatttcaaaaaaagaaaacaaattacttttctttcaaaatagatttgtcaaggtttgaaactgacatttgatactaccttctcaccaaacacagggtaagcacagacatttttatctgtattacatttaaaagtatttctcttttgtatatttagaaaaggtgtacatttactgtttgatagcttattaagctaccttgtggtggtgaaatctctgtatctgcttttatttatttatttgagatggagtctttgctgtgtcacccaggctggagtgcagtggcatcatcttggctcactgcagtctcagcttcctgggttcaagcgattcttctgcctctgcctccctgagtagctgggactacaggtgcgtgccaccacgcccagctaatttttgtatttttagtagaggcggggtttcgccatgttggccaggctgtcctggaactcctgacctcaggtgatctgcccaccttggcctcccagagtggtgggattacaggcatgagccaccacgcccagcctttttttttttttccatattttattttattgtatttattttattttattttattttcatttgggacagagtcttactctgtcacacaggctggagtgcagtggcgcgatctcggctcactgcaacctctgcctcccgggtttaagtgattctcctgcctcagcctcctgagtagctgggatcacaggcatgtgccaccacgcccacctaatttttgtatttttggtagagacagggtttcaccgtgttgatcaggctggtcttgaactcctgacctcgtgatctgcccacctcagcctcccaaagtgctgggattacaggtgtgagccaccgctcgcagcctgtttgtttattctctgtcacccaggctggagtgcaatggtgcgatcttggctcactgcaacctctgcctcctgggttgaagcgattctcctgcctcagcctcctgagtagctgggattacaggcatatgccaccgtgcctggctaaatttttttgtatttttagtagagacgggatttcaccatgctggccaggctgatcttaaactcctgacctcaggtgatccgcccgcctcagcctcccaaagtgctgagattacaggcgggagccaccatgcctggcccatatctgcttttagaatactatggttgctatcattggcttgccttcaaatatttgcctctttgttgttgcactaacttgggcaactaatgtgtttctaacaggcttttgtgactgattgtttgttctgcaaagcagttttcctagatggctgtccagttgcttcatgtgtccttgtcttgtagttcattgagctgacttttttactccctgttattgtattgctgatttttactccctggtcatactgcagtttatttaagtctgttttgtgctctcttgtgcagaagtgtgtgtaaatttttcccaatgacatcagtttgttctttttccagaaagaaaagtggtaaaatcaagtcttcttacaagagggagtgtataaaccttggttgtgatgttgactttgattttgctggacctgcaatccatggttcagctgtctttggttatgagggctggcttgctggctaccagatgacctttgacagtgccaaatcaaagctgacaaggaataactttgcagtgggytacaggactggggacttccagctacacactaatgtgtaagtatttctttcataggatactgtgatgtgggccctcagaggatgattttgatgtctgtcatcttattgatctgggtgcaccctaaaggatttctcataacatttaaaaacaaaatcattcttggtcatttctagggtgccccttgaaagtttatagtagaagactgttagtctgacctttggtgctgagagagtaaatgttcattttatatggggtttaatgtgctttgtatttttacaagaggcattatatattggcagactgctaccagtacattcattttacttaattattttgatgtgtgagatgctgacttgataggattgcctaaaatgtatggtgttttgtggttgggtttttttttctttttcttttttctttctttttttgttttggttcagacagagtcttgctcttttgcgatctcggctcactccaacatccgcctcccgggttcaaacaattctcctgcctcaacctcccaagtagctgggactacaggcgtgtgccaccatgcctggctaatttttgtatttttggtagagacggggtttcaccatgctggcaaggctggtctggaactcctgacctcgtgatctgccaaagtgctgggattacaggcgtgagccactgtgcccggctattgttgtttttttgtttgtttgtttttaattatttttgtagagatggggtcttgctatgttgcccaggcttgtctcaaactcctggcctcaagcgatcctcccgcctcagccttccaaagtgttgggattataggcgtgagccactgcatccagcctggtgtttttacctagcccaaactagatagatacatagaaagtacttaaaatgtttttctttccattgtaaaaattcattggtaaataacagaagcacaaagaagaaaacctacgtttcttacaatcatgccagctaggtatataatctttgttaatgttgtggttcacctttttatatgtgtgtgtatatatacttatatataaaatacgtaaccaaaaggctgtttgagaacctcttgcatgtttaatacagtgtgataattccactgaatggatattctgtggttcattttaccaatccctgtatgggtatgggttggggaaaaaaacctgttaaaacttgcaagttttcagtggaacactaaagacccacttgagctgtggttttttatttaaatgtaatgctacaaatcagcctgtgccttagacattattacattgtctattctagatctactaatttaaaatatcttatagcaatgatgggacagaatttggaggatcaatttatcagaaagtttgtgaagatcttgacacttcagtaaaccttgcttggacatcaggtaccaactgcactcgttttggcattgcagctaaatatcagttggatcccactgcttccatttctgtgagtacttttgtggacttagaatgggggttttggttgtgggaatgagtctttgggtatactgaattatgttgaaaatttgaactgatttcacacagtccccastttacagatagattagttttagattttgaaatgcgcttttttgatggatacagtgttagacgttttatttccaggccaggctggtggagtttgtttaacctcaaaagctgccgagttaatgttgatgataaccttgagccataggcctgtctaagtccaggtatagctggtgtttggtccctgagtggttcttactgtgtcagaaataatagtgcttttttaaggctctctgttgtcgaggctggactgcagtggcacaatcacgactcccggcaccttgacatcctgggttcaacctcagcctcctactattcccaactaattttttgatgtttttttgtagagatgggatctccatatgttgcccatcctaggctcaagctatcatcctgtctcagcctcccaaaggaggctgttgggattataggcatgagccactgcacctggctagtattttaatcatcactttgtcttttttttttttttttcttttttgagatggagtctctgtcgcccgggctggggtgcagtagtgcgatcttggctcactgcaacctccgcctcctgggttcaagcagctcttctgcctcagcctccygagtagctgagattacaggtgcccgccaccacacctggctaatttttttgtattttttagtaaagatgggatttgttggccagactggtctcaaactcctgaccccaagtgatccacccgcctcagcctcccaaagtgctgggattacaggcatgagacaccacagctggccgccttctccatttctaattgcactacagcaataaaaacctcaagattcatacagtacactattctgttacttacattgatgttcttggatgtctgtggcattttaacagatttaatgtaagtggaagaagcttctctcagctactaggagttcatagttaaaatgggaaggcagcttgggacccctgtgtcatttaatgactcctgggaattagtttggaaatgtacctagcctttcccacttcagtaatgttagctgccactccaattcagcagtacccagaagcattgcttaatgctccttgtgatattaggaagtatatatttggttctccttccctctcctggcatagaactcctaaaaaatccttggaatcccgaaagtattaagtatctttttgtatgctaatgagttttgactggtggctggccacctttaggtagcttcgggctggaggctagtcagtggagagaccaaggtgtgattagagggggtggggagaggggctgtaggtttaattgttcaccaatggctagtggtttaatcagtcatgcctgtataatgaagcctcatgaaaacccacaaggacagaggtcagtgagctaggtagctgaggttactggaaggtggcatgtctggagagggcattgaagctgtgtcccttcctatgttttgcactgtacatctcttcatctgtatcctttgtaatatcctttattaaaactggtaaatgtaaataaagtgtttcttgagttctgtgacctgctctmggagattaattgaacccaagaaggggcttgtgggaacctctgtttagaggtgccaggtcagaagcagagttaaaacaacctggggcttgcagttggcatctgaagtgggaggagggcagtcttgtgggactaagcccttaacctgtggcatctgatgtctccaggtagaattagaggacatttagccagtgtctgctgcagaaattattgcttgcttggtgtgtgaggaaagccctcacacatgtggtcacagaagcattctgtgttgtgagagaatagtaggagaaactgagttggtttttttctgtatcctcagaattgatgtcaggattgggatttgctagagtggctctagctagagtggctcatcgaagcatggtttaggaagaaaaaggataaatggatgggaaatgaggaacttttgactcctgggtggtcagatggtcacccctgctatggagccacaactgtgctgtgctcaggtacttaaaaattaccagtggaattcaaagatagatccaactccaagggagttggttcactgggtgcataaggaaacgcaaacaataagaaacaaacaaaatatacaatcccttgattattgttatttgtgatagctaaaatcaaagtgaaagagtgctggattgtaccttgatgctagaccaagctcaggtttcatttggtttaagccttggccaccagcctcaaagccaccttgcaagggtaaaaagtacccctaagacctgtatttgctgtattttgcccagtttggagaaatttaaaaagtcagaagttagagattacattgagaaatgtgatctgaaattgcctggggcagtagtcaggcttattaatcaagataaaggctgacaaatggggaagggtagatttctgttggaaaggcaaagcaaatatctctaattcttactgatctgtaacgaaactgattttttttgtaccatgctcatactgccatatggtaatattgttggcagattaaactcccttgtgtaaataagtcttataatactgattgatgattatatgtattgtgaaattgagttgaagcctcctcaggatataatacctatggaaagtgactggcytgaggaggaactggatctcactatcagctgatttccatcctgaatagttctgcacaaggtacaaataacagtagatcaagggaaaagaaagctggtacaagatgataaagatgtttctaatggcttctgtcaacctaaaggaagaaactaaggcacaaaatacaattttaaagaatttatttgcaccataatgaggacagctgcccagcagactcagatccaagtggatttgagctccatttggcccttgttacaaacaggtttttaaaggccaaaaattcgggacaggatgtgggctgatacaaagttgtttggcaggaattctctttggtttacagaaataacattgattagtgattggctatacattgttctttgtatcacagattccaggaacatgaagataatgggtgagggtcacattgtgcagtaacactttagatatttgccagcgagcctggaaactacaaggaaggaaaaaaagaacaaagtgtttttaaacaatttcccctaggcatgggggtgtgtcctgtgactaaagtctcattctcatgtctctctgggcctgataaactttgcatacctcacattcctcatactgctgagctatttttttttctcttcataggaccgagtaggttttttttgttttgttttgttttgttttgagacggagtcatccaggctggagtgcagtggcgtgatctcggctcactgcaacctccacctcctgggttcaagccattcttgtgcctcagtctcctgagtagctgggattataggtgcccactaccacactcggctaatttttgtatttttagtagagatgaggtttcgccgtgttggccaggctggtctcaaactcctgacctctggtaatccgcccgcctcagcctcccaaagtgctgagattacaggtgtgagccactgcgcccatcctagttgcttctttaaacctatccctatcccacagtagcttctccagatgataggcatatttgtgtttgtactcttgtagatatgtctgttatataaatgcaacaagtgtaaacatccttgacagatatatggacctttttgctgtaagggatccctgtttgaaaccagggggtggcctatgatactatggtgtatatattttggtttttgtcaagttcctggctcacagcttctataacccttgcaatttcccaagtgactagagccgtaagagtgtattttgttgagatatttggccatttgtcctcggttcctgaaacagctccagagcataaaagtgaaagacagtcttttgtgggtttttttttttttttttttttttaatgaaatctcactgtcatccaggctggatggagtacagtggcaccatctctgctcactgcaacctcaacctccgcctytcgggttcaagcagttctcgtgcctcagcctacttagtagctgggtttggaggtgcctgccaccaagcccgactaatttttgtatttttagtagaaatgaggtttcaccgtgttggccaggtgggtctccaacccctgacctcaggtgatccacttgccttggctcccaaagtgccggggtaacaggaacgagccactgcgccctgggctatgttgttatttttaacaggcctctttcaaccacatctgaacttatgttaatgaggtgatttttggatagtccctagatggccacatggtagggggtgctggttgctagggaacaaaccttctgccttggggagggcatagtagctaaaggttgagccagtggccagtgatttaattaatcgtgcctttgtaatgaagtctcctttgtaatgaagtctcygtaaaaacccaaaggactgagtccagggggccttcaggaaggtaaacaataatacattcatgtcatgggagggtggggcaccccagctccacagggatggaagctcctgtgcttgggacccttcaagacctcacctataaaggaaaagatatataagtatcttttcatctggctgttcatttatatcctttaaaatatcctatataactggtaaatgtgttagtccctgagttctgtgtgccaccctaggaaattacttgaaccccagggggttgtgggaaccccagtttataaccagtctgtaagaagcagaggcaaaagaacctggagctttcagttagcattgaaaatgagggcggggcagttttatgaaactgagccctgaacctgtgtgatccgatgctctctctccaggtagatagtatcagaattgaattagagaacatctagctggagtctgctgcagaatcgtttgcttgatgtgtgggaaattctccctaggccttatgagagtatagagggagaaactgagtttattttttctactccttatcacagtttcatggtttaactcttactgttaaataataggaattttttttttttttttttttttttggagacagagtctcactttgttaccctggctggagtgcagtggtgcgatctctgctctgctcactgcaacctctgccacccggattcaagtgattctcctgccttagcaccccgagtagctgggattacaggcgcctgccaccgtgcctggctaatttttgtagttttagtagagacggggtttcaccatcttggccaggctggtcttgaactcctgaccttgtgatcctcccaaagtgctgggattacaggcatgagccacccagcccggccaataatgggaatttctttctttctttcttttttttttttttgaggcggagtctcgctcagtagcccaggctggagtgcagtggcaagatctccactcactgcaacctccgcctcccgggttcacgcctttctcctgccttagcctcccgagtagctgggactataggtgcccaccaccacgcccggctaattttttgtatttttagtagagacggggtttcaccgtgttagccaggatggtctcgatttcctgaccttgtggtccgcctgcctcggcctcccaaagtgctgggattacaggcgtgagccactgcgcctggccaataataggaatgtctatccagctgtctgaggctcttatttgtagggtacaagatggtcattagtgaggtatttttctttctttttttttttttgagctttgttgcctaggctgkagttcactggtgcaatcacagctcactgtgccctcagccacctgggcttgagatccttccactcacccmccacttccctggtagttgggtaggtgtgcaccatcataccaagctaggaaaattttgtacagacagacaggggtctcaccgtgttgcccaggctgttgaattcctgggctcaagtggtcctcccgccttggcctcccaaagtgcagggattactggtgtcagccactgcgccaggcctgtttttttctttagatggtcattggtagctcatgaatatttggctgtagtgccaagtgaatacaggtgttttggatgtggtttgtgtctgtatagttacatcatttctttctctggattgggctctttggatgttacacattataagagtatagacatcgaatcatttggagatctgttttggtcacatagtctgtttgttacctttatattgtagccctcagaatgctgaaagcaaagcaaagttgcatgtctaggcaacytaggccctggaaatgaaggcaggtgttcctggcctctggtgtgtcttcataatgttaggggtggtagagaatggagctagaaagaatctactctttactatgtcttactcttcagggttcattccagcccttgaagtcggtaactaagtcctaaaatgttgggattgtgcaaggaaggcaggggcctggattggtacatgatacctcactgggacctcctcccaaacgcagtggttacatacagccagaactcagcagcaccggcatttatgagaggtgtaagaatgtgaggataaaggattgtttgatctgattcttcagaggaattacttgtcgtttggagattttttttttttttttaaacattcatggttttgattctttaggaagagtcctggaagtagtaatgtgtgtaactaagtcatgaatttaaactttataccctgtgctttaaggctgctgtgtgtcacctctagtgagcctgacttgtaccacattttggtctggtttgttgtgctagactagaattaacaaagatgatttttatgagagtgcttaggcttttgtgctgtatggacagtttggggtctttggatacattccagtggctatcaagagtattgtgtcctactgagaatttgatttttgagttgaatggatacgaattaaatagtacctggtttgtttggcttaatacataatattgaattttattgtctyacgtgaataaaactgaacacttcatgattacatgatggggaaacatgtaggggctttgtctctattgaaatatttttcttacagttgtttttgtattttattttaggcaaaagtcaacaactctagcttaattgsagtaggctatactcagactctgaggcctggtaagtattcttgataaagtaggattgttttgatagtattaaaaaatttagttttcattcttcagcttacttttcagacctttcaagcacacagaagagttgaaagaagagtacaataaatacgtgtttaccttttaccacaattttttatttctttttctttgctttttttttttttgctgggccatttggtcatgacacttctcttcagaataaggcccgtctcttcttttctgcataactataatactatcacacctaagaaagttagtgattccttattatttaatacccacttcctgtcagtttcctcgcttgtatctgaaatgttttgtagtaatttttattttgttgatcaaagttcactcattgctttggttctgcctatagtcttgttgactttatataatattttgaagcgtgctgtgtctagaacagcgcttctccaacttcagagtgcacatgactcatcttggaatctgcttaaagtactggagacttcccccttcagatagggattttcctccccaaagtttattttggtgattttgaaacctaaagaaaagttggaagaatggtacaatgaacatcatatgtccttaccttgcattgaccaattattaacaatttattaacaattattaacatttactrcatttattttatgtctgaaacttcacatacttttaaaaaaatgtatgttttgcagacatacagacatggcarcccctagcatgtgtatcctaagagtaagacatttttctttataagcacaataccattgtcgcatctaagaaaactaacattaatgtaataccaaatacatattcagatttacccccgttcccaaatgtgtctttattgtaggttttcctttctaggatcgaattatgattatgtctttagtctcttttcatcgggatagtatactcaacattatagtatattctagaacactttgaagttgttattaaaacatttctctgtgacttggtgccttagctagaatggtaacccagttcttctggtgtctcagatacttccaagcgccctctggtggccagcactagtaggtcagctgacaggctgaggaagtgacaggcaggctctggggatgactgtgaaagaaggcccagactgagtgacgtgcyaggtacatcacggttttttgtttttgtgtttttttrtcttaataggtgtgaagcttacactctctgctctggtagatgggaagagcattaatgctggaggccacaaggttgggctcgccctggagttggaggcttaatccagctgaaagaaacctttgggaatggatatcagaagatttggccttaatatatttccattgtgaccagcagcaggcttttttcccccaagaagatgatcaaaacaaaggatgatctcaacaagagctgtattttaagtatttagacagttctttgttagctggtttctagttggttatctagttaccawtgctgcagtcctgcagtcacctatacrttatttaaatgyatttaactgttaaatgcgctacccaccaataatgaaatagacctttatgaaaactgtgcaattgtgtgcatgtttgtttttatgttcctttagaaaacattgactgttaccattgaatgagawggatcagtggatattaagatgaggttacaaattttgttaagttcagccattattacttttggtatcccagaacatgacaaattatgaataaaacaagtatacataattaatggctccaagtatttgcggagttccacgtttgccagctaggatcaaatccccgtggtagctagccaatacttgatttttccagtgagtattttgctctgtacctaaatctgtgccacagaatcttctgtgtccctagattccacgagctttttaagactacaataagaggatacatgcttttacacttttacatgcacagtttgtaagtctgtgcagaattgccctgcatcattgaaaggaaaaagagaaggtgctgaaaagttacacaaacacaccatacccctgtgagctactgctaggaacataaagtaggccctggtttggtgagatggtgttaagcatacagaagaggagtaaggtgtagacagtgagggtaacctgagggactgtgagaggtcattactcatttccttctaggcagacacactgaaaggtgggtataggtaggagaccagagacaacccctttaggctgcgtggcattggccttcatctgggcatgaatgagacattaataggtggttctggctggaaaagtaggtaagagtacgttttctgatgggagaagataattggatatgattaaaggttggagaagatttgttcaacaaatctgtaatagacctgaagaatggtagaacctgagtgataagaaatgggtaagaaaatggaaggacttatcacccaagaaatgatacatgctacaaacttccaggttgagaagaagctggtgagagaccagagctcaagcaagctctccacacaggagggttgggggcatgaagacccctctggtcccactattcctaggggactggcttgaatggcccatgtgaatcatggttctctggaaggccctctccagacagacatgacttaagtgacagagggttagaatttgagccagcttgagtcaggtaagaggagaaacatgaaaagatgtccatgcaggctaggcctgaaagcaactccagcagtgtgaagtagacccgcaggcaactaaccactgctggtggtccttcaaagagaaaaaccctagtcatggggactgctgccccttagctaatgggtggccctttattgggcagtggctacagtaatttggactgaggtgtggcacgagtgagttaactgttttgtcaaggatttccttagagtaaattgaacctattcacccacatgcatcctaatatgcttttatgagttagaaaagggtaggtttccagccgtggtsttgcgtagtgtccaaaatgcaaagtttgtcccaggagctgtgagctcgtgtggcttttttttttttttttttttgagacggagtctcacttcgttgctcaggctggagtgcagtggtgcggtctcggctcactgcaacctccgtctcccgggttcaagcaattctgcctcagcctcccgagtagctgggattacaagcgtgtatcaccacacctgtctaatttctgtatttttagtagcgaccggatttcaccatgttgaccaggctggtctcgaactcctgacctcaaatgatccacctgcctcagcctcccaaagtgctgggattacaggcgtgagccactgtgcccagcctcatgtggctcttttagctctgcttccatcagtctccagggacacttcccaccaccgaggcttaccaggtagtggcaaaagctgcttgaattccaggctaatgccacttatgcctgaggcagtgtcagtggaaagaatttgaccatctgccagtggagataagatctgtgaggttggggagatttaaataagcagagcacctgggtcgaaggtgctctatgaggcctggttccttctccacctcccctcataggcagatggttcaggaaagcctgaagttctcttcatcctctagggagtgtagtaacaactgctgtacctataggcttgtctgcttcacgcctccctggccagtgatccccctcacttaagaatttcaaggagacggcaggatactcaagtcaaccccacggcaggatactcaagtcaaccccgaggtcctcaggtccaggccaactggcctggctcttagaggtgatgttcccccaccagggcctccactggagaggtgaggctggggagctgactgtgctgtgaagacatgagcaagccgccagcagaactggcatcacctacaaaagcacacaagtgacacccgtggtcccctgcaatcctctttcatgttgtcagacaccagacgtggctctctaccagtcccagctgctcagaaccagagcttcgcctgccctgagggagagatgtaggaggcagacaagcccgaggtgctggggtctctggccattacacgtggccaggccagttaaaactttataacctgcctcctgccagctggaggttcctgcagttgggccacagacctggcgccagggaggggacgaatctcaaggcccctttcactgaaggcaggagctgtctgtgctgggccttccctcccttccccatccagcgccacacacggaggctcaggaggtcgtgtgtcccagccccactttattttcgaatttaaaactcagggtcaattcctggggttcccaggcaaccctccctcgagcccactcactaggggccagccctagatcttgaaggccaaggtgagtccatcgcccaggggcaggaggctgatgtagaccctgacgtcccgccggatgcgttcgtttaggtttcgcacacactcggccgccacgtcccctttcggaggttgcagcaccttcccgcgccacaggacctgcgggagggcggggccaaccgggccgtgggaggcggggcttcggagggaggtgctcgggcggaaggcgggggactgggagggaggtgcccgggcgggaggcggggtcttggagggaggtgcccagacggaaggcggggtctcggagggaggtgtctgggcgggaggcggggcctcggagggaggtgcccgggcaggaggtgaccagagctggagacagaaccaaagcggaggaaagcctgggtaccggggccggagccccggagggggtgtagcctacgtgactggactgggtggggctttggggtataagaggagtcaagggaaaagatggggacccggcccgacagggtgctttctcctcccccgcagtggatcccttactctgaggacggcgaggatgcctccgggtcgcagcagctgcaggcagcgctcgtagtaggcggagcagttctccttgtccgcatccaccacggccacgtcgaaggtgccggcctcgcccgccgccagcagctcgtcttgcggggggagggagggcaggtgcggctgagtccgcggccccggcggccctgaggcccctcccaggccggcccgggctctgtgacaaccggccctgcccttaacctgcccggcaggcccagtcacagctcggccacacagcagcctcgtttgcaatgaatggcttcaaagcccttcccgcttcggtgctcacccagggtctccaaggcgggcttcagccggaggtcgatcttgtgctccgcctcggcctgcggagggagcgggtcagccgttgcgcccccgcctggggctgcagagctaggcgcgggcgctcacctgcctccacaggggccgtcccagctccgggggctgcgcgtccacctcgcaggtcaccacgcgcccgtccgcgggcagcgccagggccagggccagggcggagtagcccgtgaaggtgcctgggaccaggacacagacgggctcagcccagagtgggggtcggcccggaaacctcggccctccgggatcccggccgcgtgcccctacccaggtccagcgccttcttggcctggatgagccgcgccaggttggccaagagctgggcctgctcgcaggtcatcatagaatccccctgcggctgctccagggtcagctgcgtgaaaggagagggtggcaccagccatgcaggtcacccaccttcgccctgggggtcccaagccccaggggcgcggttctgggcgtggcctgggggactggcccttcggaacgcccaccgcacccggcccagggaagccggaagcccagggagggccagggcccagcccaaggtcacacagccacgtgggacccgcaggggtcgagagggacgcccgtttccgtcccgcgccctgctgaccagcctcaggcttcgcagcgccgggtgctcccgcatggagcggctcagaagatactgccacaggcggctgtcctcggggggaagcaggcactgctctcgccggcctcgccatggggggcaccgcctccctgacggggagagggtgttggattaacctgagccacgccgcgccctactctgcgcccgcccacccgcccgccgggaccaggtcctgctcacccaggaagaggccagtggcgaaggcggcgcccagtgcggctgagcccagggccagcgcggcgggcacggagagccggggcaccggctgggtcatggcgcgggcaggaggcggcgggaggcagtgacaggtcacgtgagctggagctcctgggacaggtctcggactcgcgggcccgccgggctccaccttgtcggggcactacccgcggagccgcggtctcgggcatcatctggcggccacacagccttactgcaagccccgcccgagagagccgggcgcgatctggtggccgcgccgggaactgcgcccctgcggggagcaggccaagcgcctagatctgaattttcccgcctgtgcccgcagtccaggtgcctgcctccattcccctcctgccaatgcttttttctcctcgccaccatttattctgaggccccttgggggcatatgtgaattgtgtatggagggcgccagtgtaagttacaagatagtcacaagtacaagagatagagattaaagggggaaggcctcctggacaagatgccccaaagcatcaggctgaaggagtgagggaactggtttgagggcatgcagcctcgaattggggttcaggagccctggggtgggcctgtggaactgagaccatattcttagctgttaaaatcctgcttttgggggccagatggatacgagtgtctaatcttggtcctgccagtctctctgagcctcagtttccttcctgtaaaatgaggcctacaatcttaccataaaaggcaccagatcccacagcttcgcacacagtagcacaatacataagtggcagctgctgttatgttggtaggttggaatgaagacatcttggggagaaagccggtgaagctcccttgcaaggttgttctgttgaaacactgtccagagaacactgattgaacccctaccatgcgccaaactccggaggaggtgaaagacgctgacgctgtcctttttttttttttttttgagactgagtctcgctctgtcacccaggctggagtgcagtggcacaatctggtctcactgcaacctccacctcctgattcaagcgattctcctgcctcagactctggagtagctgggactacaggcacgcacccctacacccaactaatttttgtattttttgtagagacgggttttgctattttggccaggctggtgtcagactcctggcctcaagtgatctgtttgcctcgtccttccaaagtgctgggattacaggcctgagccattgtgcctggcgttggtgttctttttttttttttttggcaaggtctctggcaaggctgaagtgcagtggcaagattactgcttactgcagcatcgagctcccaggctcagcaatcctcttgcctcagcctcccaagtagctgggaccacaggcggtcaccactgtgcccagctaatttaaaaaaaaaaattttttttttaaagagaaggggtcttactatgttgtccaggctggtctcgaactcctggctttaagtgatcctcctgcctcagcctcccaaagtgctgggattacaggtgtgagcccccgtgcctggcctctggttggtattcttagtgaagctggtttcagagatgcaggtcacacacagctggcgggtggcctaagcttcacgacttctgcctctgtgaaatggcgttatgaatagtcccaacctcctaggggaccaaatgagaaaatccaggctgaggacttacacaggggaccaaatgagaaaatcctggcacttagtgagctgtcatgttacctttaaaaggagtcaaagtccgaagggcagccggttatcttcctgctgcactgcagatgtcccctggggtggaggctgtaagagccttttttttttttttttttttttttgagatggagtcttgctctgtcgtccaggctggagcccagtggcgcgatctcagctcactgcaacctccgcctcccaggttcaagcgattctcctgcctcagcctcctgagtagctgggactacaagcgccagccaccatgcctggctaatttttgtacttttagtagagacggggtttcaccatattggccaggctgttctcgaactcctgaccatgtgatccgcccgcctcggcctcccaaagtgctgggattacaggcgtgagccaccgcacccggccaagaatccattttaacaacgctgactaggcattgagctccactggggggcttcccaggcgggggctcaacctgagcgaggcccagaggccagcttgttgagtagttaatgagagagtggcttggctgaggatgaaggccagaaacttgcagtttcttgatctgagctgcaggaaccttgggcctagcggaagcgaggaaggaggaggcggagctctggggtgaggctacgggccggcctctaatcagagacagggtggggctggttctttgaccaaccagccggcagcccccgaagcacatggctgtgtgggggcagaacctgctgtctccgtgcatgcgtgccctttcggccctcctgggacttgcctccgggctagcagcactgctcgaggacaagctccttgccctttactctttgaccctctacgtcccgcttggcctctaacttgaccgtgaatctcattctgcgggtaaggactgaggctgctggtctctccttcccaggcctgagcatacagcaggcgctaaataaatgctcttgactagagttctggcgctgcctggcgctccttgctgccaggagtaaaaatagtaacagcagggcccctttattgaggacctgccgggcaccaggcacaatgcatccaggatccgggggcggctgtgatcttgttcccattttccagagcaggaaagctcagagaccaccgcccagaccctgcagccaacagaggaaacgcgcgtacctctcccttgaaccctgggacccagagggaacaggccttcttggctcctctgctgggacgagggcccagctcgagctggcctgagggccctgcgctcaggtggtgccgctgaccgctctctcc

SEQ ID NO: 97789 - DNA, 100783 bp, Homo sapiens
  misc_feature (1)...(100783): n = A,T,C or G
cgcctgcagcgccctcggcgggagacgccggggaggggagagaagggaggagacgggaggggcggccccgtcttgggcactcgcagggactggcgggaggccgtgtggggctggaatcgtgaccacggatgccgcaaggccacagggccctcctcggggtcccggccggaaatcctcaggggcccgaggaggagccggggcggccacccgaccacctccccgcgggccgcaggcaggcggcgcgccgtacccgccgagaacgcgggaagaggccatcgcgtctggacacctgggcttcgtcccagagccgtcactgctgtgtccccttgggcaactgcctagctccctgagcctcacttttcacacctggaacataggaaaattgcgcccaccttctgggtcgtggcagataaaatgagttcacgtcagggctggctctcaggaggcgctcagtgctcgtggctttcctccccggtggacagaaccccggggcagctccccgcgccctgacgcccagagcggagcggcccggagcggagcgaccaccgcacactggacccgaccctagtcggccccgcgcgcccgggtcggggctggaacctgcgggcgtggcgcacgcctgccacctggcggcgaagcccccaggccgcccgtcccgcccacggctgcgcgcgtgcgcaggcctgcaccacccagtcgcccccaccacgccgcgccccgcctccctcgcccagggacttcctaggccacgccacgccgctccaccagctcagggaacccccttggccgtgcagacctgcgccacagggtcgtttcctcccctccttccctcgaaagcgtatgcatttcgttgcccctggaactggggtcatttcaggacctcccaaggagggtcaggatggtggtattggccttaggggacgcgggctcaggttggcggttgaaccgcatgttcctgtttcaaacaaacctaaatgtaggcctggaaggctgtgcactgaaatcctagtattaggttggtgcaaaattaattgcgatttttgccattgtaggttgtctgcagagtgagattatggcgaagcattttattctttttacaaacctgctttttctcagttttccacattgggtatgtattggtgataaggaaaaaaaaactacaaaatatattttttgaaaaaaaaaaatcacatggagagagagaaaaggggacgaattggcctatcaagggggtttccggaagttaactttctagtatctctgtttgcatgtagactcccagggtgccctgggagaaatggagaaatgaagcccaggacatgaggcattgggatggatggtccatctttcacatgtgctgggattaacttcctttaagaaaaaaggaaggcaaaagggttcccagccttagggttgggtggggtagaggctccaaataaaccagaaactcttgagtagaggtggtcagtcattgctgtctggttcaagcgctgattggacccaaggggaccagatccaggatatatttgagaacaaggaatttatttcagaaaggggccactcaacagtcagcatttactaagaacctgcttggtacagggtgctggaactaccacaacgaggctgccccttcccttaaggagttctgggctgacttttgggaaagttcatcagcggtgacgggtagtgagtgaggcagatcagcaggaacattacaagccgcaggaaccgtcagctgctgatagaggccctgggaggtagagtggagaacagctctggccaccacagctaatggccaccaagggagcgacaggacccttgaggggagagcagaggctggaggtccttggggtctactgggaggtggcagtcacaggcccttgggtcctctccacagccttgctggaaccttccaaagagcaggtgtgactggggaagtgtgttgctgggctgtcaccctcacctgggacctcctctgtgcactcatccattcacagatttgccagctacctgcctttgcaggacacctcagaagttacagacttgcctgtggaaatgcagagagcacctgaggtatttcccggactctccagtagtagccttgaatggctgaccaaccgcagtcacctgccagatcttctcagaaccggccagcccaccagcgacaggcccattaagtggcctggcccagcccagatggaaaaccccctccacgtgactttctaaagaacatgcatgaagacaaaacaccaggtgcctcaggtgtgacaccctgaggacacatcacctgtacagtatcctaacccacccaagatgacacagtaaggtaaaaccacagtagagcccaggcctgtttgactctgaagtccaggctcctttccaacttagtgccctaaaggcctgattggggtgggggtaggcaggaagattcaagcactgattgtttgtagcccaggctgggagggcaacagctctagaaaaaaagtcactcactgctttaaccatcttccagctaactgcagtgaggtgtacagggccatggggctctgggatgaactcttccacctctacaccttgtaaacaaggattccagacacaccctccaaatgggaatggagacacacgtttggcagagttggacagtaacgctgctctcctatcagcctggactttgaggggagtggaaaacatgagtgtggaggtgcagcagtcctggtatcccctgaaaccagcctgtgggggaacagtcttcccaggggagctgctcaggatcgtcctggtccatgcatcaggaagaaaagggaacctgagagcagagggaaaatgcagaaagtggggcagggagactgctccctgaaacccccatgggctgctggtccaagcagaaagtgttgtcggaggggggagaggcagggtgaaatgggacaggaaacgaggacttccgatgaggaggaggagggggcagtgggctgcgggtcttggggactgaacagaatggggtttgctagacagagctttcgtctacccactcctgaagtcctgctggacctcagctggcccttgtgaactgttgagggggatataaacacaaaggcctgcattcctgtgggtgcacaatcctaagagaccatggactgcctgtgtgtggtgggaacaggaaaaggaggctgagtgtagccctgcttggaatttagtgtccaccacagatgtatccactacccagggccaaagactcggcagcctcagaagactcaatggaagctgagcacaggactagaaagggtcagggccctcctctgtatgtaggggtggcacatggccactagctgggtgatggggcactgagaaattaaatgtttgacataaaaatgtaatcaggacccgagaggaggtgggtggtgtaatgaacagcatcctagaagtccggtacagatttcacgtgtcaccttctagttccttatctgaaattgaaaggtgaggtcaggtgcagtggctcaggcctgtaatcccagcacttagggaggctgaggagggcatatcattgaggtcaggtgtttgagaccagcctggccaacatggtgaaacctctactaaaaatacgaaaattagccggctgtgctgcacacgcctgtcgtcccagctacttgggaggctgaggcaggagaatcccttgaacctgggaggcagaggctgcagtgagctgagatcacaccactgcactcaagcctgggcatcacagcgagacttcttaaaaaaaaaaaaaaaatttaaaggtgagccagttcaggcttctagaggcactgcagttacagacggtaaactgcacaaatcctgggtgtgaagctgttttttcctgtgtaaccaccacccatttacagcatcccagaaagttcaagtgtgtcccttcccagtttacagccacccgcctcccaccctcacttctaaatccaccgattagcagtgtgtcttggaaattaatatacaaggaatcatatagtatgtgctcttttgtgtttggcttctttgctcaagatgtccgtgagattcagccgggttgcctctctctgtaatatgttaatttaggtgtagtatccattgtctggaaatacaattgtctattctctactggtggatatttgagtgtctctggtttggggccattataataaaactgttgtgaatcttcttatacaagttttttggtggacatcagcctcatttctctgaaatgagtggaaactgctgggccggagggtagctgttgtttttagctttagtggatattgccaagtaggaagtagggaggtgattattacagtctctaatatataaaaaaggagtagagggggaaagagaggaaagaaatagagattccataaactattcccaaaactgatcctttaacaaatctggagcacctcctctgcactgtaaaagctgaggagtgcctcttcccacgctttcatatgtcttgatcttattcacctgatcctcaccccactagggcagctgtgccttgctggaactacccagaaggttgcaattaaagcttggccagttagaacaagcacaagcgctgtgcgggacacatcactacctgagtggcaaatctgaaaattcattcctcacaagctgctaaatggtgctgacagacccaccctgtgtttcaccacctggaaagaaatcagggttaaggcagcttttacacttcatgcctcagcaacttgcatcatagtcttttaaaatatatccaaagcaaccccctccagaggctctgggtgtgtcagaggtccctgccctctgctctctgccagctcacagagaaacaggcattctcccttccaggtgctcctcatttgcactgaagaggtcagtcaactcctaggacatctgaaagggaaaccctgactccaagggttatattgtgttctggataatagaacttgcctttctgtagagcaggttttctcaaccttgccactactgacattttagtccacataattgttaatgggggctgtcctgggcattttaagatgttttgcagcatccctggcctctacctactcgatgccagcaacactccctccagttgtgacaacaaaaaatgtctccagacgttgccaaatgtcccctggagggcaaaattaccaccagttgagaaccactgtgatagagaaagaacagttttttgtttttgtttttttgagacggagtctccctctgtcgcccaggctggagtgcagtggcatgatcttggctcactgcaagctccgcctcccgggttcacgccattctcctgcctcagcctcccgagtagctgggactacaggcgcccgccaccacgcccggctaatttttttgtatttttagtggagacggcgtttcaccgtgttagccaggatggtctcgatctcctgacctcatgatctgcccgcctcagaaagaacagtttttaaacacaccaaccagtgtcctctccctccctccaagagggaaagatcagctttccaatatacaatcaagctggcctgagtgggcccacttagtccacaacaggcattttatcttggcaacaatgcaaaccacaacaaacaaacaaaaagccacacggtttactctggtgaaagaaaaactgaaaggcataaaaagaaaactaaggaaaacagaggtaagaaaatttgaaggtaacagcaacaatgaatgagaaatcatctttgtaagttcccgtttgtgagctgacacatcagccatggcttgcccacattcgtgactcaaacaccaaacatgaggccacagctaacttcttggggtctaaactccaaacccagtgttttcaggaaatgtccctaaaccaaagtccatctcattatatgaaaatacacatagatacacccaactttaccccccactgttttattaaatcagacagtttaaagtgtatgttctggtatttttaattttcttactgggtccattttacttaaaaaaaaatataaaacatttttaatgtatcttagaaaaattagcaaaaaattgagaaagttgagcatattacattgtacaatgttttcatacgaatgttttaaaatcataaatatttggtttcccctcaacatagcacatcacaaaaatacatttcaaaaacttttttcatatataattcctgtaaatgatcatatccctacttattaaggaaaacacctgatgacaagcactcaaacactcttgaaattttctgtacagtaattacaaaagtaaaaccaagagttctgttggccctttaacaggtgaaaccattttaaatagtatcaaaatataattccaaatgggatatacttagttcatttctgtgctatctttgattcacaagtatctatcttagccaaagcactgtttaaaaggatattgcctcctagacatagtgccactgaaaaccaagatgtaaatcggtaacactatgcattaaacagaaagcttttgcacaaccacatatgtaaccgcttagtcgtatcaaggtccacatgtgaccagaaagcaggcagtccttargtggatggccaggggccaggcagtgtgaggtctccaagaacccagggctagagcagctaagccccaggtcatgttatcagctacagctgtggaataagccaggtttaaagaaggacattctgcaaaagtgcaggacctatttcacaacttctagaagtagaaattcacatattccatcatgatcctccccaccatgcagagactatttgactcctaaggccacactgtttccatcccatagatttcacagaggtgattaggttctttgtagaatactttttcctcattctggaatgagggatactggagtcttctggtgtnatgtgcagtcaaaccacaggaaaggttccattccttacctaagtctcgttngtctaatacacctgccagctactgaataaaatgataatactgataaatggctgggcagaaatccaacacccaaatcagctgtcaaatttcaaaggcacatgatacaaaaatattttagacaatacactttataaaggcaactataagaaaccgttaaagttacatttttattaaacagccaaaaatcttaagacaaatacctacagaccatttcttcattggcaaatattttccagtcataaaaggtgataatttatgggattatattccaataatttatgggattatattccagtttcctctcatgtaaataaatacatacactgaatctctaataccactctctctagatgtatacatctatttggaattgctttcttagtatgcactcagcaagcactagcataagaacacctgaggttctctgtcctcatttaatacctgtaagagaaaaggactttattctactgaattctgccctttttttgcaacaactgaattatccccatatttatttacaattttaagcttgattgctgtccacggagttactgttgcttctcaattataactagtgttagaaggcttgatttcataaatgttctttttaatccaaagatagatcatatatgaaaaccttcctcaatactcctttcaaatcagatgcatataaactatgatcccaatttccctgttagaygtatttctgttggatatttcctccgttgtcaccacagaggaagggaaaaagcagaaaagctgcccacctaacaaaggctaacataatggctaggctaatatattgacatgctatcatctttatgatgttttgaatctaactagcagacatacagtcaacttcctgttgaccatgtgcatstaatctgctttcttaattatacaaataatttttatttcaaattagcttctttctactactcagtataatcctctcacagcctggcatatacttggtagcacatcattcactagagagagtacgagagaaaattaggttgacaatatggggcaaaggggtagtctcctttaaggtgaggggaaaggagatgggaatgaaacatgccaagtgtatgatggttagggaaagaaatatcttagtagaagctagaaaacctctactaacaggatcacattccaaaagggcaaccagraaatggcaatgactccatgacttctctgtcagagcaccaatggtcaaaggcattccatgtcaagtgtcaggaaatggaaagcgaaccggccaatctagtttaacagcacatactcggaaaaggaaacacgctgccaaaggaaagagctgacatccagtccacagaggttctgagtacccagtggcagtgagcccctccaaactctgcagagctgactgtgctgtctgcaccctgcctcatttggggaagaatctgagagagctaaaagacaaatttcagaaggtgatgttttcaaagaaagagtaaacaaacagcttgacaatgttgactttttttttcttttcaggtaacccttgtttgcaggaagataaataagaaggcttccttaggatactgacccacttagagaggcacagaaggaagaagagttaaaagcagcaaagccgggtttttttgttttgttttgttttgttttgttttgagatggagtctcactctgttgcccaagctggagtacaacggcatgatctcagctcgctgcaacctccgcctcccacgttcaagtgattctcctgcctcagcctcccaagtagctgggattacaggcgcccgccaccacgctcagctaattttttttgtatttttagtagagacagggtttcaccaggttggccaggctggtcttgaactcctgacctcaggtgatccacccgcctcggcctcccaaagtgctgggattacaggcgtgagccaccacgcccggcccccaaagctgtttcttttgtctttagcgtaaagctctcctgccatgcagtatctacataactgacgtgactgccagcaagctcagtcactccgtggtctttttctctttccagttcttctctctctcttcaagttctgcctcagtgaaagctgcaggtccccagttagtgatcaggtgagggttctttgaacctaagaggcaaacatgctttaaatacaggaagtattatattcttcaggataccccatcatttttctacagacaaaatagtaacttycctactttatttcttctttgaggaacatgcataaatgtcataccagctaaaacaattagaagatgtataccaaggggattaactgggccctcttacctattaggggataagattttcaagagaaatttatcctgaacagcttggtttttttacatttgggctaaaaaagtttctttagtacaattcaaatacacaagtgaaacagaaaaataaatttaaaaataaatatatgggcagggcgtggtggctcacgcctgtaattccaggactttgggaggctgaggcgggcggatcacgaggtcaggagatcaagaccatcctggttaacacggtgaaaccccgtctctactaaaaatacaaaaaattagccggtcgtggtggcgggcacctgtagtcccagctacttgggaggttgaggcaggagaatggcatgaacccaggaggcggagcttgcagtgagccaagatcgcaccactgcactccatccagcctgggcgacagagcgagactccatctcaaaataaataaattaattaaataaaataaaaatgaaaaataaaaataaatatatgattacttcatagagtctgttacctggttctatcagtcgaattaatccttcatgatgggccactttgtccttccagctcttggtcttattagttgccatctccagcttctttttaacttcctgaaacaaaagtggattttggactatgcagacacacgggtagtttaagaaccaaatcacaactattgggcccttactatgtatttgtgaattatctcattaaatcctctcatagcccattctaagaagtgggaactactattaccccattgtacagagtgaaaacgggttcagagaaggtcagtaacctgccgagagtcacacagcaggaaatggtagagccagaattggaacccaggctgtctgattccaaagcctattcttccaccatctgcatacgaattacaatgggtgtatggccctgtgtgccagttasagtttactgcctctccactccaaatccaccctgaactgtcctgctggtgaaactaaaataattctccctcactagctggcagcataaagctttgtcagtagagggtgctgaagggacacgaggagggagggacttttcttctaggttccactcagcggctcctgtggcactcagaacacccacagtgctcaccaccagtgagtttctgtagcacctccctgtgggcagcttttgccggtggcctcccagtgagctttgctggcacagcacctcaacaaacttttctgccatctgtgcaccctctccatggaggtatggatcacaacactggggttaaggggcaagaagcaaagaatgctcttccagatccactccctccctggtgctctgcctcagttttcgaggcagtggctgctccctacgtctgctgttcctgcattctcaaagccttctttacaacacagtaggtaatctcctatgacagttaataatgttttatattaaactttccctgttcaaattactgtgcagtttctgtctctgatggatgtataatatatcttatctcctgtaaaaactccctcttttttctttcttacagctaagcaagattcttactacagcttcatattggcagctaagcaaataattctattattgagaaaygtttttcaaaaatttaaatatacaagtttgcagggccaagtctcattacctcgtactgctcaagtgcttgcttccgttctaactcaagctsctccagctgctccatggcctcctgcagggcctgttccttcaggacacgctgattctccaactcctgcttctccgcctcrgttgtctgaatggcctgctgctgctccaagtgccacttttctagttcagccctcttggaagactcttcctccaacaacctacaatgtggaggaaagctccagatcaaatcctgcccaggtcaccaccctgacccagcagacgagggaagcattttagacaagagaatatttgaggtcgtctaatccccctttcattccaccaggaggaaagcaggagccagagaagctcatattcacaaagctggtaaagcagcctatatgtcctgctctaagctctctcagtttcacccgtttgtgaaataaaaaataacatttatccagagtttaatgtgtgccaggaactggcctaagagtcaagtgtattttctcaattaatcctcacagtaaatttaggtgctgctactcatattttagagatggtgcaagtgagacacaaaggttcagtggcctgtactaggatcatccacctgccaggtggcagggccaagatttgaagtttgcctggttgctacaacatgaaaacattttcatctagtaaaaacctgttaccatggaaaaagctgataatgaagatgaagaaaggagtgaacgcagacagaatagagatactatttattgaacaattgctacatgccaggcccttgcctccattattgctaatcccctgacaatcctgaaaggtattgtccctacattacagatgaagcaatgaaaaaccaaagggtttaaaagtatgttgcacaggttataatggattttaacccaggtctgtgtgactccaaaataacaggaatacctatctgggaatacccagctatgtagttgtttaaataaactaacaaacagccaaaacctgcattaaagtgtatatagtgtcgttcgatgccagccaaggacaggatacatatctagtggcttgagcaacaatattatggtaacaaagtcaagtcacatgactggtcagttactactacctgccagcatctgctcttataaaactaacaacaaaggaataaagtaacagactataccaacaccaatttccaaattccctctacaacttcctgcaaggttgttattcaactcagctccaatactctaggtgatgggctaccactcgttgcctcacaaattgggccagtttatttatgggcagcttcaattcttacgaagttttttcttatactaagatgagttctcccatcyactaccctagttccacaaaggaagtatctactccctcttccctgtgatagccctttcgcaactggaaggcagctttgttgcctgttgagaacatccttctccaagaagaccacctccagccttaactaatgggacccagcttccagactcaatatccttctttggagacactgaggtctcctcagatgtctcttggagtktgatgtacacaacagaacacgacactacagatgtggtctgaccagtgcagagtttattcactcagttgatgtgtattttttatgtgccttctacgtgcttttctaggcactggggatataagaatgaacaagactggatgggtctgttttttcattcyagtggtaaaagtatggagggggaatggacatttccaggtgcttaggctgcccagcctctgaactccttcatgtgtctaggggaactgccatagtagaagacttgatggaaggtagggctcatttcccgctatagaatccacaggccagacacctgccctcccaccccttggcagctagggtatggtggaggcacaagctgggcttggctatgtagatgctccttctggaactttgactctgaagcacctggcacaaagaagcagagccagtagagaattcatcttgccggtggcagtaatatgcagtgttgagtgacagcaggagcgatggcactgctgatgcctggtaccaacatgggygccagcggcatcctcactggactcttcccatggcctggcttgggctgtagttggggctgctcatccccctgtgattcctgcctgtgttcaaggcctggtcacctgcctttctgtggaactggcaaactatttaagaaactttcaacaaattgttttattgctttagctaatacaaggtggtttctgtggttcgcaagtaagactcctgactaaagacttcagtgcctcactctttttctgtgtatcggcttcctcatttatcaaaaaaggaatagaaactacacctaccatcaaaggtttattagtgtattaaatgcgataatgcacataaggtgtttacatgcctaccacacagcaagtactggtaggtaacagctcatattatagagggacaattatctcatttgctctggacacttcacattcattaaggctgcctaagagtgtatagggttttggcaaccacatttcagggaaatgaaactgtagaacttttcaaatgaatttctataaagccaagtctcctggatcctgtacttgttcttttgatatgttaaattagcttcttggtctaaaatcatcattctagcctgtcaacatcttttttctgaatgcttatttttacaytccacacattatatatcttccccgtctgcaaatgagataaaggaacagaaagcaacacactcggagtgactcccaaatgctaggcattactctaaaacactctgcatgcatcatttcatttcatcctcacaacaactgtataaagttggccattctctcaagttacacagctaaaagtaccagagccaggaatcaaaccgtggcctcattccagagcccagtctctaaccttcaaatatatgaaaagtattatatcaaatgtaagagggactgttgttccatgtggtcccattggatccattcattcattcaaaaaaatttccctgggtacttactgtgtgccaggtacgagttgctgggaatacagacacgactaaggtgtactccagggtgttacagatccaaagtgggtaagagttacaacaggacagattatggctcagcctcaagaactttccaataactcgatttttcttaattttttcttttttgtttttttcttttttgagacaggctggagtacagtggtgcaatctcagctcactgcaacctctacctcctggattcaagtgtctcagcctcccgagtagctgggattataggcatgcaccaccacgcccagctaatttttgtatttttagtagagacagggtttcaccatgctggccaggctggtctcaaactccgagcctcaagggatccgcccgcctcagcctcccaaagtgctgggattagagcgtgagccaccatgtccggccaataacttgagtattctacattttaaatgaacagttttcttctgagttctcattcagaagtggctagatcaccttcaggattacacataaaaaaataaacttcatagcagaaagggtgactatagtcaatcataatttaattgtacatttaaaactaactaaaacagtatagtggactgtttgtaagactaaggataaatgcttgaggtgatggataccccatttaccctgatgtgattattacacattgtatgcctgtatcaaaatatctcatgtacctcacaaatataaacacctactgtgtacccacaaaaattaaaagttaataaaaaacttcaatcgtaatttttaaaattacaagatctggccaggtgcagtggctcaagcctgtaatcccagcactttgggaggccgaggcgggtggatcacgaggtcaggagatcaagaccatcccggctaacacggttaaaccccgtctctactaaaaatacaaaaaattagctgggcgtggtggcaggcgcctgtagtcccagctgctcaggaggctgaggcaggagaatggcttgaacctgggaggcagagcttgcagtgagccgagatcacgccactacactccagtctgggtgacagagcgagactccgtctcaaaaaaaaaaaaaaaaattacaagawctacgtgtttcaagctaaagttcttgtctttcatttaaacaatttactataaaaagtttctctttttttttaagacactgtctttttaagagactgacagagaaagaactatccattaaaagaataatgagattccaaatattccacgaatgatcggctgttgctttaagaaaggagtgagcaaacaaatttacaagaaaaaaagaaacaaccccatcaaaaagtgggcgaaggacatgaacagacacttctcaaaagaagacatttatgcagccaaaaaacacatgaaaaaatgctcaccatcactggccatcagagaaatgcaaatcaaaaccacaatgagataccatctcacaccagttagaatggcaatcattaaaaagtcaggaaacaacaggtgctagagaggatgtggagaaataggaacacttttacactgttggtgggactgtaaactagttcaacctttgtggaagtcagtgtggcgattcctcagggatctagaattagaaataccatttgacccagccatcccattactgggtatatacccaaaggattataaatcatgctgctataaagacacatgcacaagtatgtttattgcggcattattcacaatagcaaagacttggaatcaacccaaatgtccaacaatgatagactggattaagaaaatgtggcacatatacaccatggaatactatgcagccataaaaaaggatgagttcatgtcctttgtagggacatggatgaaattggaaatcatcattctcagtaaactatcgcaagaacaaaaaaccaaacaccgcatattctcactcataggtgggaactgaacaatgagaacacttggacacaggaaggggaacatcacacaccggggcctgttgtggggtggggggaggggggagggatagcattaggagatatacctaatgctaaatgacgagttaatgggtgtagcacaccagcatggcacatgtatacatatgtaacaaacctgcacattgtgcacatgtaccctaaaacttaaagtataataataataaaattaaaaaaaaaaaaaaaaggagtgagaagagttaactgagcagccttttacacaggcccttggcgtaagattatgtgcatttcattagtgccagttttccaacccaactccaggatgacttcccttgatttttctatccagaaaggcctatcctgaggagcaaagaacaaaccctctctgccaatctgacagaaagtccctctgaatcagccacagccttcagtgacttcaggaaagaggaacacatttcacttaaaaatgaccactaggccgggcgtggtggctcatgcctgtaatcccagcactttgggagaccgagacaggcggatcacaaggtcaggagatggagtccatcctggccaacatggcaaaaccccatctctactaaaaatacaaaaattagccaggtgtggtggtgcgcgcctgtactcccagctactcgggaggctgaggcaggagagtcgcttgaacccaggaggcrgagattgcagtgagccgagatcacgccactgcactccagcctgataacagagcaagactccatctcagaaaaaaaaagggagcaggggggcaaatttgtccatttcaggttccaaaaactaagagaaaaaaaaatttagaataataaaataattatattcataaaatgccctttgcacattaagaaaaagttaaatttgtgtgcagtactttcagcatattggatcagagctgtatgtagaagttacatctggattcaaaaggttgaaaccattttgctattgcttaaatcagagtgtgcaaaataattagctggagttttttgccgttgttgttttgtgttttttttgagacagggtctcattctgtcccccaggctgtagtacagtggtgcaaatgcagctcactgcagcctcaacctcctggactcaagtgatcctcctgcctcagcctcccaagtagacttttttttttttttttttttaaagatgaggtttcaccatgttgctcaggctggtcataaactcctgggttcaagtgatcctccagcctcggcctcccaaagtgtggtgggtgagccacactttgtggtgtatttttcagaagctttgtgaggtgattctgatacataacattggttaaaaaaccastggcttcaattatccaaaattaycccttattcaaaatatcactcattctataaacactaaataactaagactagtatttctagaattatctggttccctctgtgatctagtctctgctgtgtcataatcaacttcccacaaaactgcagtaatacatatagcatatttcacctgcgaattctttgcacaaaaacaatctattaactctcaacacggctcaaattakgaggtggctcaaaaaatgttgagtgtcatgtagaacgtcactctggacgtcacatggcactcaaacattcccgtagagtgactcttctgctaaaatcactgccgagtggcactggaggggagttccaagaacctgattaacctcacagtgcagtgaatgtgcacctgtggggcctatawatgcctggcaatatgctacatgcttaattttctatttagaaaataatttttccttaaaaaaatttaaatttaaaatctaaatgtccaaaacaatttatttatttttgaagtcacttttggcaaaatatacaactaaagatggcttcttctttctcttcctatctaaagattaaagaaacatcttttgctgctccacatgtaaaatggcagccatggaaaatctaccctagctcatctcataactgctccccaaaacagggggtcagagatcaaagactggaccctgtgctgctactgtagtgaatactttttagtgttgtctcccatcccagacaccttaaakaatgtaaatggggcagcaaagtagaaactggcagaggataggctcaatttttccctttgggagtcttcattttattttgtcctccctgctgccatgaaggcccaaaattgagaattttcatctgcgaacatgactatcataaagttctaaggggaaaaaaaatctaggtttcaaatacttttaaaattaggatttcaagtagtaattactgaaggaatgttaccaatcctgaatgaccaaatagaaactgcatatttcttccttattcctcaaaacctgacggcaacgttggcctgarcaggcctctgcctgcataccaatggccctctctggtctggagcgtgttgaagatgccaagctcttatcagaggtaattctgggtttgtggattttctcgaataagactaagggtacctcatcaaacatacctaccagactgctctaaaataggcccttatttagccccagaagcaagggtttcccagcgcctcagaatgaaaagaaacactccagccggtcgagtctccacagtctttctaatctggacagcacctcgagctcagtcacagccagagcagagacacttctccctctccaccagagtgttagtsattccaagaaactgtattagcccaggcaaagtacataaaggcaaagtctgcaaacaaatctggcacctggcctgaagcttccgcactgtctcttcatcttgccgggcctgtctctcatcttcaagagcctcctgcagctttaggtacatgtcttccagctcccgtactcgctgtaaatactgttccagttcagaggacttttgagcaacctgttcttccatctgctgtctgatctgttggtataaaagggtcttgtttaaatgcaggttgacttctttctcagggaaagcctcacctccacctgaggggttgcccacagctgcagcctcagcccatcagggtggcaggaccctgtccttcaatccttgaacttaaagatggaggagatgagggtaccacacccaatcgcaatagtgaaagagtctgggaagagcaaattataacccaaattatgttctgccctgctgtattttccatcccttccactccacattttaagactcaagtcaagaaaaaaatgtttccttgtgtaatttctctctaaattcctttctgtcttaaagtcacaatctttttaccaatagggtcttctctaaaaggaacgaaccttttcccagtcagagcaaacgaaccttttcccagtcttctttagtgttacactaaagaagaaggaaaggtcatccagcatggrattcctcccacacttccctggctgtctccactccctggggcacctccagccctagaggaactcaagcatttcagttaatctgtatacgttaatggtttttcccttctggattacagagttttgaatccctgccttaaaaattacaagacaagaacatcctaaatataacaaacacattagcctatttctctgcagttgataaaatattttcacttgcattagctcactctgtcttcagaagagtcatgagagagcatgtgataatcctgaacttaaagaagaaaaagccaatgttcagtaagaaggaccagagaggaaacaagaccagacattctggctgtttctctacatcacatttgccttcctcttttctctgaaccacaaacacatctctttcaactctaaataacaaaaagtgactagaggaaatgtcacatgcatctatttaggcactgggcttagcactctctgacagagtatcactcaatgtgagaagacctgtgttccagctaaccagctaactacctaagacaacctggatcttgggtctcttgaagatggaagcctctaggatgaaccggagctgccaagagcaacaaatcagactctagatgttctcacaatttcaggatctcacccccgccatccttgcttattacagaggagatataccatggaacctatgcttactttttccataactatttattttccaaatcagaactgttttgagaatgaaaaggaatgttattaataattataccagaatggcagggactctcccaggcaaaccaggaaatayagtcaccctaaccaagcatttatcacatcattccacaaatttctttttttttcttttttggagacagggccttgctctgtcacccaggctggagtgcagtggcaaaatcacagctcacagtagccttgaactcctgggctcaagcaatcctcccacctcagcctcctaagtagctggaactacaggcatgtaccaacaggcctggctaattcttttttttttttttttttgtagatattgcccaggctggtcttgaactcctgggctcaagcaattctcatgccttggcctcccaaagtgctgggattacaggagtgggccaccatgcctggctccataaatttccacttaggagtcttgaaaacaaggtttatgtcttttgccattacatctttggcacactgcctggcacatagaaggtgttcaataaacagataattaatgaatgaacaaacatgcaacttcccctacagcccattccaggtcagtagcaaagccaagctgatgacatgcctcactgtagcctccagcccttccctgttcccacygacccaggctgagctactgcagctgctttctccagccatgtgatactcacaagcttctctctttccagctctgtgctgaacctggcctgaagttccacttgagtctgaaggcgtttcttttcctcttctgctgcacgagatgctgcttcctccagtttctagccaatcaaaaacccatccacagaaaagcaggtgttagagtagmagtacattaaagagagagagacagtcatacttaagtacaggaaaagccaaacattcttaacattcaataaagataayagaataaaaacttttagctccattagarttccagtctaacgatctgctgaatcaacatacaaaataaattaggtaaatgaaagactattgataagcctgaacaacattttgcaaagaaagttttagtayagtcattgaattaaattcacttgggattgcattcatgagatttttatttatttatttatttatttgagactgagtcttgctctgtcgccaggctggagtgcagtggcacgatctcggctcactgcaacctccacctcccaggttcaagtgattctcctgcctcagcctcccgagtagccgggactacaggcacacaccaccacatccagctaatttttgtatttttagtagacacggggtttcatcatgttggccaggatagtgtcgayctcttgacctcgtgatccgcccacctcagcctcccraagtgctgggattacaggtgtaagccaccatgcccagccacattcatgagatttgagagctatttcttgagctctttctgtacagttttktcatcttatacattattcattataacttttaccagaaccaatttctagaagggtggcataaggagctccacagaccctttccccaacaaaacaaccataactggtgaaaattattgttaaaaaaacaaaacctttaaaagtctctagaaattatgctaaggacattctaaamtggagaacatttatctaagaaaatctaactctcagtaagaatcrtgagggtctgtggcatatgatgcactccctccccacccccacagtgtcagtgagaagaaagctcttctcctggcagatggaaccccaaacaagggttcccctcccctcagctcaagcctagggctatgataccttcctgggaggggcaggctggctgccagaatttctctttgtccccagctgcatgttgcagaaactttattccaggcaagagtggctgagaattaagaggaggccagaagctccatgagaacaacacactaacacacggaccagctaaaagtgttgttggttkgttggttgactgctatgaggtctcgctatgttgcccaggctggtctcaaattcctggcctcaagtgatcctcccaccctgtcctcccaaagtgattaacaggtgtgagccactgctcttccagaccagccaaacgtctgacagacagaaccagagaaagagacagctaagaagagttctcatgtagtaggaacaagtctcaaagactgaccttaaagactacatgtaggcctgaatttaaatgatctcagactgtgaggcaattcaggttccagggcattatggagaacaacagaacaaaattagtgaactctaacagctgttggtgtgrtaccaacagaggtggaaagcttaaatgagagatcagagaaagacactcaaagagagccctgcaaaaatcagggtcttcgcagggtgactgtgttcctgtccaagcctgtgcctctgaggagcaacagtcagaagcttcacactgtgaggaaaacaaacttcactgaaatagtccagccaagtcactaaacaaataaaggagcaaacaacagcaggcctctggggagaggggtggaatcagaatccagagttgctaccacacattatctaaaatgtctagttttctacaagaaattatgagacatgcaaagaaaaaggaaagtatggcccatatacagggaaaaagcaggcaacggaaactgcctttgaagaggcccagatggtggatttagcatatgaagacttcaaagcagttataaatattttatgctcaaataactaaaggaaaccatacttagagaagtaatggaaggaatgacaatataccataaaatagagaataataaagagatataaatcacagaaaaaaccaaatggaaattctggaagtaaaaagtcccataactgaaacgaaaaattcactagagggactcaacagtatatttgggctacaagaaaaatctactaaagacagatctatagaaattatgcaactggaaaacagaaaataaaaaagaagaaaaatgaacacagccttagagaaatgtgggacaccattatgtgcaccaacatttgcataacgaaagtatcagaagagggaaaaaaaagtagaaaaaatatttgtggctgaaaacttatccagcttaaggcaaaacattaatctacatattcaagttcaatacactctaaacaggataaacacaaagagatctacacccacatacaccacagtaaaactgttgaaagacaaagaccaaaaaataatcttaaaagcagaaaaagaaaaatgatttaccacacacaagggaactcctgcaagcttgacagctgactactcatcagaaagttctgactagttctcaccaagatattatcaatagaagtacagtgtgacatttctaggctggagcaccgcattgccaaaccctagaacactttttcttccggcacagtgaatagcaacactcaagatggcggctggtccatcagcccggatttcataattacacactttgacccagcattcccacttctgagaattcattccctagagatatcagaacatgtatgaacacatatacaatgacacaggtacaagattattccctacagcattacctattaaaacaaaagattaacacaacccaaatgttcactaacagggaatgactaagtaatgacacagttgtataacagaatattctacagccataaaaaagaatgaggtaactctctttatactgatatgaaaagatctaaaaaatatattaagtgaaataaactggaggcagaacagtgacactagtatatacttttgtgtgtttaacaaatgggaaaataagaatgtatattcatatttccttaccttgggcaaggggtggaaattcrtaagtgggggagggggagaaaatctttcacagctgcctttttatatttgtatatttttgaacctacccaaatgattatattttttaaaagaaacaaaagtagaaataaaaatttaagtaaattctttaagtaaatctattaatttataaaaactaccatgatttcttattccttcttctaattaaaatgaggcctgtcaaattttaagaaacccacagatatgtaacctaattccagatgattaaaagattcagctgggcatggtgcctcattcctgtaatcccagcactttgggaggctgaagtgggtggattgcttgaacccaggagtttgagactagcctgggcaacatggcaaaacctcatttctattaaaaatacaaaaaaattagccaggtatggtggtgcacacctgtagtcccagctacttgagatattgaggcaagaagatgtcttgagcaggggagtgagcatggcaccactgcactccagcctgaacaacagagcgggaccctgtctcaaaataaataaatttaattaaatattcatctaagctgtttttttctaagaatgcctccatgaaaaaattggagaactgtgtttattgacaagaaaatcaaagattactaagcgatctataagaatttttcagcacttatccaagaatcctaaatcagtcttttaaataattctataaacctaggtagtgggaaagctgtctacataggtctacagcttgctaacaccaggcatgccttcttcacattatacagagcagaacactacatgctcctggaaggcagagtttaaaagttaaaaagggcatcaatgtatgaatctcaaatgtacaatgctaagtcaaagaatgcggtcttaaaatgtacattctgtatgattccatttatatgacaatttggaaaaggcaaaaatacaggaacagagaattgatcagtggtttccaggggttagggatgagggaaagacctgaataaagaatataaaatgctccaaaatccaaaactttttgagctctgacataatgctcaaaggaaatgctcattgaagcatttccaatttcagacttttggatttgggaggctaaggcaagaggatctcaactggtaaatacagtatataatgtaaacattccaaaatccaaaaaaatcccaaatctgaaacactttgggtcataagcatttcggataagggatactcaacctgtattggcaataatctatcttaacctgggtagtattttcatgggtattcactgtatgattatttgtatatacatatttcatattctcctctacaggtacgagctattttataattttaaaattataaaaaaggacaccaagttctagctccccaccattccctcataacacccacttttgatgtgtgcacagtggaaggaagcagcagcaatcacatacggcaggtgctcagcgtaacctttaaagggaatttttacagaaaatatattgcagcagaaagaggcaagatgcaagactgtttcaagggtgggaggcagtaagaaatgaggagctgcttttagaaagtaagtgtgtgatagtaataactttttctaagattatatatatgcccatgcagttcctaagattataaaagcattcttaaaaatcttcatgagtctactctactcagaggaagttcagcacacaatgtggcatttctacgggttaccaagggagaaccccactaggtatgtagagtcacagattatgagccacccccatatcccagagcaaagtttttgcacagatgtgcatgaaagagtccttgagcttgtggttagcaagtgctcattgattcaaggcagacagactcagcccaaaagtgtctcaaataaagaccatatccatatactggggactcactaccacccctgggatcacgacataaccgaggaagtgttcccagtgaacatcaactatctcatatagcatatggtacttgacctcctaatcttgagatggaaggaaaagctgacccagactgtatctttaactccaaacagtaggtaaaactaacagttctaaagtaagggtcttccaaggtactcatgagtgaagatgggagctaaggagaaaactaaaaagcaacacaccttgtccaggccagtaagaacagccttgacaccctcaagggaatgaaatttcccatcttcttctgacraaattcaactgtgctcattattatttaaaatattccttcctagccaatgaaatgtttttgctgccgagatcaacatagtttcagggctaggaaaacyagtatgtctcacttgatggtctggaaacacttctgagaacagttcaccacaagtatctccctaaaactgcactacattcatcttggtagaaccaacacccctaagcaaggcacgatggcttctgcaggggaatgaagggccctctcccagcccagcgcccattcccaccttccgcacggcctccagctcctgctgcttgctttcrttggcggcctggagttccttcatttgtcgctccagttcctcttgttcagccagctgcttcttccggagttctttccgacgctggcgggcttctttgtgtggtggagggctgcccagcttcaacagatgaatagtagaatgaatggctgtaaaaggtgtaggaggaaaaaaaaaatggggagatattatttattctttgtaagcctactatgcaaatggcacagtgggaagaaaatgagacagggagccagaaggcccagtgtagattctgattttgtcactccatagtggtgtgaccctgagcagtcacataacctcttggttttttttcagagctcccctcaagaaataacctcttgcagcatcagtttccacatctttaaaatgagagagatgatctataaagtcctttctcgctccaaaattctgttaactgtatctgtgctcagaaacactcgatctgggaatattgcacacatttttaagaactaatgacaatactttcgactcctttctctatacttttcaaaaagccaaacaagattaagacacagtaaggacagagattcaaatttctgatatctaatttgcaacctactgtgtttagttggcctatcatcyatgccttatgcaaccccttcctgagataacaggtaacagcagctgtcatttattttaaaaataaaataaatacatcctttacatgcattatctaactgttatacaacatctgatttttcttttgatattttaaattacttaaatgtaatttcttgaatagctaacactttcacattattcaaattcaaaagacacacaggaaagtctccctcctactcctgtccctcaagtactagattcccctccccactagcaactaatgctaacagtttttatgcatctttcctgagatagtataagcctatacaaataagtatgtatatatgtcttccaccttcttttcacacaaacagtggcacaacacactcttctgaccctcagttttttttatttaatctatctcacagttcccagtagcaatacataaagtactatacataaagtactgcatggcacaccaaaagtactatacatgaagtactgcatggtacaccactgtgcagctaaaccataacttattcaaccatttccctattaatagatagctagattgtttgcaatctatgtcattttgaaaaatgtgtgagtatatctgtcattatctattttctaatcctcaccacaaccctgggaagaatgcactattattatccccactccacagaagagaaaagcagttacagaatttataactcaacccaagagacccaggaaagagcattcaaaccaggtgcatttgcctcgaactcttaaaccacatcaaaaatgactacattctccaatataacataattttatctacgtctaagaatataatattcagaatctcctttcaggattttttttaaaaagccctcttrtattgcattttattctttaccaattttggaataatggaacactttaaagttattcattcactacggagccataaaaaagaacaaaatcatgtcttctgcagcaacatggatgcagctagaggccactatgctaagcaaattaacgcagaacagaaaaccaaataatgaatgttctcactaataagtgggagctaaaaactgggtactcatggacataaaagtggcaacagcagacactagggactactgggacgggaggtagagacgggggaagaggttggaaaactctagctgttgggtacaatgctcacttcctgggtgatagatycaatcataccccaaacttcggcattacacatatacccatgtaacagacctgcacatgtacccctgaatctaaaataaaagttgaaattttttttaaaggttattaattcaaaagtttgtgttcctgagttacccaaaactagtgatttcttgtggaagtaatggatcttgaaaatcacttgaagtattaaaaaactattgcataattcctcttttcttttacatattacctcaagctcaagatggccactttaaaattcttcacagtccttaaaagggaaaattctatattcttcaaataataagaataagtaaaacctaaaatctctaagatatggaatcaacccaggtgtccaccaacagttgtagtgtgtgcatacacacatataccttggaatactattcagtcataaaaaaagaatgaaataatgtcttttgcagcaatatggatagaactggaggctattatcttgaagtatttcttgaaataacccataaacagaacataaaatacatgttctttttttttttttttttttaagtagagacggggtttcaccgtgttagccaggatggtctcgatctcccaacttcatgatccacccgcctctgcctcccaaagtgctgggattataggcatgagccaccgcactcggcctacatgttcttatttataagtgggaactaaaatatgtgtacacatggacatacagcaaggaataatagacattggagactcagaaatgtgggaaggcaggaggcyggcaagggatgagaaattacctaacagcaactatgcgagtgatgattacactaaaagcccagatttcatcactacacaatatatcactgtagcagaactatacttgcaaccccaaaatctatttaaaaagtaaatctcccatttataatttacccaaagttcattatgcaaataaaactaatgaaaactttgagagcgcatcttaatttgtttttctctcagctactgtatcacatgcagaaaataactacaatgaggaagtaacgccttagcatccttcatgagattcaaaactagaaagtcagagctctcggccaggagtagtggctcacgcctgtaatcccagcactttgggaggccaaggcaggtggatcacaaggtcaggagattgagaccagcgtgacaaacatggtgaaaccccgtctctactaaaattacaaaaacattagctgggtgtggtggctatagtcccagctactctggaggctgagacaggataattgcttgaacccaggaggtggaggttgcagtaagccaagatagcaccactgcactacagcctgggcaacagagcaagactccgtctcagaaaaaaaaaagaaagtcagagctttcaagttatatcatggcaaataataaaaaatcaccttaccttgaatccactcctgtttcttcttcttatctgaagcactgatttcaaaagtcttatcaaaacattttacgagaaaaaggcatttctttccatctttgtcaggcaaggactaaaacagaaagcaaaattagttcctcaaaattttaagtatttaaatgaaattcaatttgawttatttataaaaatgagctgaaacttaatgtcaatgaaaaatacctataaattcatattackgatttacwaatgctgtttcctaagcacattacttatggtaaaaatgaccccagttggtatactacatctagactggtaaaactataaacacctgataggatgccatrcattgggatttcctgagtatagcagctcttatcctgagcacctcccttgcaggaatcctggaaggtacatctgtgatgatgttacaagaggtattaactcctatgggatatgaagcacctaagccagggtgattcctacatctgcttaatgtggctttctctycttgcacttggaatgttgtggctggcaacccgtggtttctgtcctatatgtttatgagtaaactggcctttggtaaccttgtagatctccatgtttagttaaatctaagcagactccttcatgggcatcacacatctcaagacattattattcactaaaatacattatagtttatgtgtgagatttcaggtatttaaatgttcttcaacacatamagacacggggacagttcatataaaaattaaaaactcaaaaatttatgttcttgagaatttcacttctttaaagaattagtacctatgaataaagtgtcctgaaagtcacccaaagtattcaaagacaatgcttacatcttcttttatttcttgcactcaaaatgtcccagattttctggcatattctttattccaaatattgtcttactgaacttttttttactttattatctcttttatgactccattttattcaataaatgattccttaaatgttccaataaatgatttaatccttatactttattcacgagtagaaggttgaaaataaattcacattagaaaaaaattttgtcagctatgtttaatttttggttcagaaaccmtggcaactgcatgcctatattattttggaaatgtaaatttggggattattttaaggttctagagtctaggtggaagaaggtgagaagctacttcagcatcagggggcagcacggggtaatcatgcaaagaagtaagagtagactcacctctacacagcaattttcatccaagagaatgtctcctttcttatccttcagatcctcactcacatagtaagaaattatgttgggttttagtacaaaccatckttcagtccagtttttccgtctgtggccctttttcatcatgtaaccctgtgaaagattaaatgtgatataaattattgtctttttatttgtmgagctgacatctcttccttgatatacttgcctactccattatttgatatatgatcctgaaaacatgaacaccaattgttcttggatcytctgagaatctatggaggggcattacacctagtcatgcaagcataaccagacaaaaatttgcatataatttcagacacttcagagacaacccctccccaaagtgatatgcagacaatagaatccccttgayattaagtagcatttgagatttctaaaaaatcattatcttttagagatacctattgaaatatttataaacaaaataaaatacctgagatttgcttcaaaataatacaggagaggtaaaagtaggtggggtaggattagccacatggtggtggttactggagctggttgatgcatatgtgggagctcattatactggtctattccacttaaaaagaaagaatgaacccctaacaatgattctctgtaaattaaaacctcgatcaggcctgatgccagtggctcatgcctgtaatcccagcactttgggaggccaaggcaggaggatcgcttgaggccaggagttcaagatcagtgtgggcaacatagtgagacttcatttctacaaaaaaaaaatttttttttaggagtgtcgctctgtcgcccaggctggagtgcagtgggtgcaatctcggctcactgcaacctctctgcctcccaggttcaaatgattctcctgcctcagcctcctgagtagctgggactacaagcgcatgccaccatgcctggctaatttttgaatttttaatagagatggggtttcaacatgttggccaggatggtctcaagctcctgacctcgtgatccgcccacctcagcctcccaaagtgctgggattataggcgtgagccaccacgtccagccaaaatttttaaataaaataagtaaaacctcartcamtgaaaatgttaaatgactgaggtaagtaaaacctcaatcaatgaaaatgctaaagcttggccacatatatcttctaaaccaaatattcaaggacttccacctctggtaccaacctacctttctgcctgacctctcartattytgaaggaggaactctgccccagaccaacaggaaaatactgcaccaggagttcaaatactggcttctaaatgtggcttctaagctcacactcactagttctgtatttccttcccacagactggcctcaaaggtgtgtgactcaaatgtttacttaagcaaaattatacattattataggccaaagcccttcaggcttgtttaagaatagctgctatttttagtattaaatctacaggtgctgatagcrcatgatagaatatacatatcattaaatatatatgatattgattgtaagtttcagttggttattatattaagttctaatcatattacatattcagtttcctaatctttggacatttaagmaaaagctatctcatacggcaattctactacagtcatatcctgccatcctaagaggctgagaattccacttcagatggagaccaygtctcatacctctttgtagcaccaaaaacctatacaaattcagcctcaacatttatgatgtgctccattaggaaaaaaaagaacaaagacaacactattacctatggaagaaagaaaggatcaaagtaaggaaatcccaaatcagttattattcaatataataatgtaagaagtttcaaagaatcaccaaaaaaatataaattgtatttaacaagcatcgagcttcatctgctatgctgggtgctgagaaaaagaggacagtctaaataagacaaaagcaactttgctacataaaggtatttttttttccacaagtagaggtatttttctgattttataaaaataatataaaatcatatagaaagtccaataatacagaaaggaataaaraagaaaaaaattcaccaaaatcccacaatctagaggtgatcactgtaaacattttrgcaagcaccttcctgacagctctacacacatgctaacattacctgaaggggattacaagatatctcctgttcagcaatgtggttttttttcactcaacgttatgccatggagatctttctggatcagtggttatgaatktgcacatgacaggaagatactttaaaaatattttggaaatggcctgggcgcggcggttcacgcctgtaatgccaacactttgggaggccaaggctggtggatcacaaggtcaaaagatcgagaccgtcctggccaacctggtgaaatcccatctctactaaaaatacaaaagctagctggacgtggtggcgcacacctgtagtcccagctactcaaaaggctgaggcgggagaattgtttgaacccgggaggcggaggttgcagtgagccaagatcatgccactgcactccagcctggtgacagcgtgaaattccgtcttggaaaaaaaaaaaaaaaaaaatatatatatatatatatatatatatatatatatatatattatgtatgttaaatacagacagggtttcaacatgctggccaggatggtcttgagctcctgccctggtgatccacccgcctcagcctcccaaagtgctgggattacaggcatgagccaccacgtccagccaaaatatatatatatattttaactgtattcttaactgtactttaaaatcgcacaaataattttttttaatgaaagcctaatacaagactggaaaaataagaaattttattcctattcaaaatcaggccaggcccagtgggtcacacctgtaatcccagcactttgggaggccgacgtgggtggatcacttgaggtcaggcattcgagaccagcctggccaacatggtaaaaccccatctctactaaatatacaaaaattagctgggcatgggggtgcatgccttcaaggcamgagaatcccttgaacccaggagatggaggttgcagtaagccaagatcacgtcactgcactccagactgggcgacagagcaagactgtctcaaaaaaacaaaaaayaaaaaaacgaaatcagtgtaagaaaataagtgacttatactcatctttgtgacaaaaatattaattttaaaatgtcaaattctaaagatgagaaaaaaaaacagtaacagaattcttacctgctttaacacatctaatataagttcattaaagacttcattaattgccatagacacagtctgccggtccatgcctttgctaaactgtccatttccaataagctcaataagttcccatgcagaaaggccatttttactgtcatcaaagttgattttataatgttcaaattgttcttgctgccaacctcctcccatagcttctgtaagcttcttaagcaggtattcaatctayataaagaatgtgaaataattatttcctagttaaaaaaaactttaacatagttatgtatttatgytataaacactgataagttcaacttaggaaatactctttacagttccaaaaatgcctacctttagagtctcctaaaatacagggagagaagtataaataaaatgccactggtctgtattagtgcagaataagtaaaggaatcaaaaactgataaccctctaatagtgtagtatatttgtctgcagaactaaaacaaactgcagatatatgacagcatacaaactaattaatgtgatctgattactcgctgttaaatatttcaatatatcagaacattagtcttactcaacaaacaagcgctraattaaacatctcaaagtaatatgtacaagttattgatcaatttacaaactttccacataagccaattatttaaaattcatgctgcttcctcccactggaacactacaatgttgtaaataatggtggaatacctagcatgagcaggaaaagcttactaaatcctaaaacatcatactttgtgtagaaaatactgctattgaaataatagcagttaggccaggagcagtggctcatgcctataatcccaacactttgggaggccaaggcaggaggatcacttgaggcatggagttcaagaccagcctggccaacatggcgaaaccctgtctctactaaaaatacaaaaaagttagccaggcatgtggcgcacacctgtaatcccagctactcaggtggctgaggcatgagaatcgtttgaaccttgaagrcagaggttgcagtgagcggygattgtgccactgcactccagcctgggcaagagcaagactcttgtttcaaaaaaaaaaaaaaaaaagtaaagaargaaagaaataacagcagttaaacaaaacaataaggcagtaaaactgaatgagaattgatacctcttattttctggaaagcccaaatatcctatacagtgctctcaaactcaacatatgtccaaaaatgaatgaatcctctctactttccaaatggcttccccgctgtattattgatttccattaggaataacaccattcacacatccatgtcaggattcttgctccccamccccmacatcaaaccaaggatataatcctgctgttttatttccctaaatgagctccctaataagtttgaaaactgtgggttatggcccactatgaagtcaacttagtgggyagcaaccagcatttttttttaatggaatgaaaaacatgtgagttcatccacaataaagaaatagtgttttgtgataagttttgctktgagtgtgtgtgtgtgctgggtcatgatataaaatgtttatcttcctatgggttgcagtgaaaataaaatttaaaactttgtcccaggcagctctgaactctgtcactcctatttgatctgcttttggtcgggcctcctggttggtatctgtacctccaggtcgccaccttttatacatattctgccagagggatttttctaaaacaaaagccagagcctgacmctcccctctttaagccctgccctggctccctatcacctcaaagacagaggccaagctcytctgcatcccttggtgatcatcccccagcctactttctcaaacatgtcccacctcagactttacactccaccaataccaccaataccatagatcaggggatgcaaacttttactgtaaagggttgaacagtaaatatttaagctttgtgcctccctatcatgtgttcttccttgattttgtttttttacaaccctttagaaatataaaaactattccttagcacatgtgccacrcaaatataggctgtgggctggattyagccagcaagctgtagtttgccaccacttgccatagattataagtagtttaccctcttaccatattttccttatgctttatgtcattccccactctgtcttctctgtctagaataccttttcccacctctcgacccagttaattggtatttattcaagtcctacatcctctagaatattcctactcaaaacgaagcrtgcggaccagtgacgtcggcaccacctggaagcttgttagaaatgaagactgtcagaccaaccaaaggaccaaaaatcagaatctgtattttaattaaaacccctagtacttccatttgcacactaaagttttgagaagcactgctgctttagcaaacctgctctgaccaaccctaacccaggtcacgtgttccttttctaggtcactgcacttaacgtattttcactcattcgcttttctaccattttctgcattccttgtaggaggaaccatgtcccactcatctttaatccccaaagctcagcgtggtacctcagagctcaactaatgtttgctaaactgaaattaactaagctaagccttaattttctcatctatgaaatgggcataataatacttacagaaatgctgtggggtgaaatgagayaaatacrgagcaatttgcacaatgcccatcacatagtaggtactccactratgttgcttcccttctgcactgagtgaaatactattcaaccattcaaaattacatttaaagaaagcatttatgaaacaaaagaaagtgaagaatacaaaactaaatttacctattayttctactgcacgaagattatgtaattattttgacaactatttgtcagaaayagtaggtttaatttgttacaataggatcatgagttaatttttttcctttttcttctttgcatttccaataatttggttataatgttttttgtaaaataacatattttaacagaaaaatagacatgcatgtttgcaaaggcatatatattcacaaaatatcacaagttcaaaaaatatcaagagaagccaggtgtgatggctcaagcctgtaatccctttgggaagctgagacaggagcatcacttggggccaggaattcaagatcagcctaggcaacatggcaagatctcatctttacagaaaaattaaaaagttagccaggtgtggtggtacatgcctgtagtcccagctactcaggaggctaaacagggaagactrcttgagccaaggagtttgaggttacagtgagctatgaccacaacactgcacttgagcttgggcaacagaacaaggccctatctcattaaaaaaaaaaaaaagaaagaaagaaaaaatatattaaaaggtctattgatttaatttgatgagatgctrtaagctcttttaggacaaagatttatcttataccctaaaaacagcacatggtaagtgtttaccaaaatttacttgttggagaaaaacacgcttagatcttttctttctcttgttggagatatgtcatctactgttaaacttatcagatattatcaggtatttccttggctctttaaagagaagtaacagggataggcagaggaagagaaaaaaagaaaatgttaagaaaaagggaaaagggaagagggaaggagaaaatgggacagaaaagagaaagatataaaaagattaagagattgaasgccaggcgtggtggctcacgcctgtcatcccagcaatttgggaggccaaggcgggcagatcacctgaagccaggagttccagaccagcctggccaacatggcaaaactccatctctactaaaaatacaaaaattagctgggtgtggtggtgcgcacctgtaatcctagctactcgggaggctgaggtaggagaaccgtttgaagccaggaggcagagattgcagtgagccaagatcgcgccactgtgctccagcctgggagacagagctagactccatctttaaaaaaataaaaaataagaagagattgaagagataaaagcaagaaaaagagagtcaaaaaggacattaagataaacaattgctcaaggtacaataagcagtagcattaacaggtacagaaattcaatctccctaaggcagcaaaaagaagggcccaggctggcagattacaacttggggtacagggartacaggcacaagtcgaagttttagtagcaaggcaaaggaagcacatgtgtatagccacatgtgtgtgcagtatgactacacgtgggtgagacaagatggtagagccgawtgaccatgtcctggcacaagtcaagaatcagccttagctcttcctcacctacctcttactgaacccacgtcattcacactccaagcttcagtttcttcaaaatcagatgacttgttatgtttgtaactcagaaagcgcctattagtagcaaactcagctctagaagtagcttgccaggttcatcctgaacctttctgaaggtgccctcccaagccttatgaagttgtcattagcacccagcttcgatctgctcagcattcccagtgactgtgccagacaactaatctagattcatttcctgctgactttcaacacaatcatatacgtatcataaccaaataacttaagggccttttgattcattatattgggccaaggagagacaaacattaccattctccactattcaattatactaaataataaatcatgtgttgccgttttagtctctagtggcctgcatcaattctaagagctcattcagtttcaggaagcagcttacttcctccttccaagcaagtttcaccaaaaataacaaagaaaaaactttcaagatgcatgtgattttcgaggccttcagttccaaaatttattttattaaaaatgctttctctatcatcattaataaggggcattttattggcttaataggttttatttatttagggtctcttaaaactatttcaggttcaatttttaactgcatcaaggcaattcttccaaataggtacacaagagacacatcctgttttgttcctggttctgtgagaaacaaatactaaataaaaactgtacttggcaggcacatatttccaggaatataktctaacaaaaattatggaacgaactcaaatggggacacactatttcttacaactatgtgacagaaacatcttaacttcactatgtaagtcacttaaatatttatttaacatacttgacactactttctgggtaacagaaaactgaatcaraagcaaacattaactttttttttttttagatggagtctcgctttgttgcccagtggcacgatctyggctcactgcaacctccacctcctgggttcaagcgattctcttgcctcaacctcccatatagctgggattacaggcatgcaccaccacacctggctaactgccatggttatatctttttttttgagacaggatctcattctgtcacccakgctggaggcagtggagtgatcttggctcacagcagccttgacctcccaggctaaagcgattctcccacttcakcacccctgcctggctaattttttatattttttgcagagatggggtttcaccatgttgcccakgctggtctcgaattcctgagctcaagtgatcagcctgcctcagcctcccaaagttytgggattacaggtgtgtgccmctgcacccagctgacaattatatcttttttttttttttttttttttgattcagtgtctcgctctgtcccccaggctggagtgcagtggcatgatcacagctcactacaatgtctgcctcctgggtgatcctcccacttcagcctcccgagtagctgagacttcaggcatgtgccactgtgcccagctaatttttgtattttttgtagagacgaggtttcaccatgttgcccaggctggtctcaaactccycagctcaagcaatcctcccacctcagcctcccaaagattgcaggcatgaaccaccaagccaggctggttatattttacattgtattaattaaggcttaaaaaaaaaatctttcttaaaaaacactctaaacaaaatgcaaatgatcattacggtaagtggattattggaaagaagtattacttcaaatttataaatcctaaaaactactgataagataacaagttaaacccacctatatgttcatgaaaaattatgacattatacttcaaaatttattttttaaatatatctgttttcacattaaattttattaaaatctgtaagtctacaatcagtccaaatatagtttttgaagtgttattattcagaaaggaagcaaaagctaacagagaatgtatttttcataatatagcataaccttgagtttgcagtgcttggtcaaaggccaggtgataggctaagagcttcataaatacaaatccatgtgattaacctcagcagctagacaaagcaatctcacataaatctactccaatgatcccttctttccccacacaagcactcctggccccagaggaaaatctataaaactaactcamattctacttctaaccagaagaaatgatgagagagtaaaagctgtcaaagcacagagtgagtccaaacagtaacatgacaaggtatgctgcctggctattctaacaaatcaaagaaaggctgttcacttctcaaatgagattaacttgatttgaaagagaatcaagacatttctgttagcctgcaaaggtgaagaaaaacatgccaggagccttggctgggctctggcctacagaaacgcacatcaaggcccatgtgggtcccaatccttcgggatgcctgcagcacaaatcttttgagtttcttaggcacaatagtcagaaaactgatgctgactggctcccttcacagcctgtggctcaatggtgatttaatgccattgacatgtcatccacattaagcaagtgctgcctaaggcaataaaaacactcactaaatttctaattctgaaatcaggacaaggtcactttcaagtccaccaaatattttagtgatggaaaaaaacaaaacatcaagggtaagagacccaccccacatccagtttttcaaagaaaacacaattaattgtggaacacagtataactacaaaatgttttaaaatactgtaatttttttttttttttttttttgagacaaggtctggctctatctcccaggctacaatgcagtggcatgatgccactctctgctcactgcaagctccacctcccaggctcaaaccaccctttcagactcaagccatcctcccacytaagcctcccaagtggctgggacaacaggtgcacaccaccatgcccagctaatttttgtatttttttgtagacacagggtttcaccatgttgcccaggctagtcttgaactcatgagctcaagcgatctgcccgcctcagcctcccaaagtgctgggattataggcttgagccagcacacttagcctaaaatactgtaaattttatttgcacaattctttcaagcagcagctaggttttaaaaccaccactgggatattcttttctacagacattcccttctatacacctctgtattaagctagacaatttccttggacaaaaatttcatagcatgttttatttttcatttcctttttaacatacatacacgattacatcattgttattaagcactaagaaactgttcccaccactacagcgaaactgccttctccttgatcaccagcgagcacctaattgttmaatccaagggcaacktctcacttaccattgtctaatttttccatagcatctaatgccagtaactacttctgtgcttcttaaaactttgtgtttcttagacatctatgactcagcactctctcagttctcctacctcatagcgtgttcaattcagcttcctttgccaaatcgacttcctctttctgctacagaaatggtcccaaggttccgtccttggcactcatgtctccaactacagtcttcctccctgatctaacctactcttgtggtttccccacctctgtctccagccctggcctctcacaagctgtagataaacacttctagtgcacagctccacaaggatgttccacctaaaatcccaaatgtaccaaacccaccaccatgcaatatgtcccaratttgttcatcatcctaccattcattcacacacaccccttttagtgagcagctaccatgggtccaggcactttaataaatgtttcacatacatcaactttttcaatcctcacagagtccaatgaagaaagtagttatccccattttacagatggggaaccccaaacagagagagtgagtaatttgtcacaaagctaataagtggtagaggtgggtttcaaaccagtcagtctgatttcagagactatgctttaaacaaatatactatattattccccagttgcccaggcctgaaacttgtctctgcttccccacagccaggcactatatgcttggtcctgtgacctctaggttcttcccatctggccttcttttccattctcrctgtatkttagtcctcaatgccacttagcttctctcaacttctcacctcccatgtctccrtatttcatctattcacctatcactctcttcctcaaaaatcatcagtggctcatctttccacactgcctacaggataaagtcaaaactctccagcttcatctaccgcctatcttcttcacagccatcatgttccagtaagaaaggacatgtatcattcttttttgactgcccagcatttaacccttttcttatgtctggggaaayccctacctgccaatgtagaagctgaaaatgcaaatgtatcctttccaagactcygttgcagctagtgcacagtgcctgacctaggccatgccaattagatacatcatgccctgatgataattgggaagtgggcactatggagaactcyccctcataggaagaacagttccaggaaaagttgagttctggggcagtgatatggtttggctgtgtccctacccaaatctcaccttgaattcccaggtgttgtgagagggacctggtgggaggtaactgaatcatgggggcaggtctttcccgtgctgttctcgtaatagcgaataagtctcatgagatctgatggctttataaaggagagtttccctgcacaagctctcttctcttgtctgccaccatgtgagacatgctttcaccttctgccatgattgtaagccctccccagccatgtggaactgtaagttcattaaacctctttcttatataaattgcccagtcttgggtatgtctttatcagcagcatgaaaatggactaatacaggcagcaatcagtgtccaggaccagatgtgttccatggtataagtgcaacacccatcctctggtgggagcagcattttccttgttgttcctcatggagtggccagtacagtaaataggacagaccaaattgcatagcctccacacctgttttttaagccatcatgatgattctgtaagctatccagcatacttttaaaaaattcccttttaggccctgcacagtagctcatgcctgtaatcccagcactgtgggaggctgaggtaaagggatcacttgaggccaggagtttgayaccaggctgggcaacatggcaagaccccatcactgcaaaaaaaattttttttaattagctgagtgtggtgatgtacacctgtagtcccagctactcagtaggctgagacaggaggatcccctgagcccaggaggttgaggctgcagtgagccatgattgtaccactgcactccagccagggcaacagagtaagaccccgtttcttaaaaaaaaaaaaaaaaaaaaaaaggcaggtgtggtggcaggcacctgtaatcacagctactccgcggggtgcaaaatcatttgaacctgggaggtggaggctgcagtaagccaagattgcgccattgcactccagcctgggcaataagagcgaaactctgtctcaaaaaaaaaaaaaaatccccttttggcttgaatcagccagtgtggctgtttctaagtaagcatcctgactggcaactcagtcaagctggatacctccctcactccttttaraacatgccctttgctttcctgactcataaaacactgcctactgttgcttccatccagaattctcctctgccttcactattggccaaaatccttcccaccctttaatgccttggtacagcctttctgaagggcaactttgccttgttcatctaataccctgaaagtgtgcatttcttaggactcagaattccactgctggaagtttattcaaagaaaataatcagactagtatgcaaaaatgcatgtaataagagtagtcttaagagttactgagtacatactatgtgccaggcattaaactaaaccctttaaatgcagaatttcayaacccttagactaaacattgtaattggctttatttcacagatgagaaaatgaagacttgcaggttaaataatttgtccaaggttaagggattatagatgactttttttaaagtgtggggactacagctgattttaatygtgtatattaatcttttctgaattttctactgtaataaccatgtattaacatgtgtcactttttaggacagttagatagcacagaagccttactcctattatttttttcctttggaagtttagggaaaataacaaarcaagcattctctttcttttactttgaaaggtatggaaagtcatcacccyggactttgaaacaagaatagtatttactcacacaaaacagccctgaaaacaacattctggatctcatgtgtttcccatgtataccagcactcagccagttacgttttgtcaatatgcaagtagtatgaaaattatgttgtgacttgtacagaatactctttggacrtgaggatagattcacttatcatcatagccatttagagaagaagaracccactttccctgtaaatctccaggggtattacatgccccaaattactatatttggagcttttctatactcaggctgctttgcctctgatccaaaaacactagccaaggatctccttccatatctatgctgaattaacagaaaaaataccaagccaggtctattaaatgctaaaatgaccaagtaaaaactccccaagccacamcttacctcttctgacacaataattaatggatacttgtcctcagataaaaagttgaaaataacccatattttaaatgcatcttcttctgtaatgagcaggggattctttgtgaggttttttttgacacagagggtccaacacatcctattgaattcaatcttgtcaaagttgtcttggacctaaaaaggaataaggaaaaactccaacaaatcagtccgatataagcagtatctaaggcaagtaaaayagaaagacaaagcctcctttggctcccattttaatcaatccaattaaccaacagccatatcctacatatttgctttaggtattacactttcagtggctcaattaagatgttacatttagcatgacactgaaccaacatctgtccatatcactcccttggcacataaaatactgacctctcaaatagttaccgtttcatgtgtacacactatcttcctattaataaacagactaccaatcctagcacygacctctcaaatagttacagtttcatgtgcatacactatcttcctattaataaacaggctaccaatcctagcacatggaagaaactgagaatgtcaattactcagtatgagccaagtacaggtacattatctttacatacacggtcaaagaagaggctgggcatggtggcycatgcctgtaatcccagcactctgggaggccgaggcaggcggatcacytgaggtcaggagtttgagaccaacctgaaaacatggagaaaccccatctctagtaaaaatacaaaaattagccrggcgtggtggcgcatgcctgaacccgggaggcggaggttgcagtgagctgagatcacgccattgcactccagcctgggcaacaagagcgaaactctatctcaaaaaaaaaaaaaaaaaggaagaagataccttcttttggggaaaactatttaactgaaattctaaaacaacaatcctgccattcattcatttgttcacgtatccagtgtttcctcagcatctactacgagccaagtactgagattagataggcatgagccactgtgcctggcctattttttgtttttattttttaacattgtttatattaatttaaaaaataaatagagatgaggtcttgctatattgcccaggctggtctcaaactcctagccttaagcagttctcttgcatcagcctcccacagtgctgggaggcacttttatatcctataaactaaggatataaagatgaagaactaggtctgtgctcttaaaatgttcacagtttattagggaaaacagatatgcaaataaattttaatataactgtataatttaacagtgtataattcaatagaattgttcactcatttgacaaataaaatttagatcataattattatttgccaaagacagtacaaagatactcaacataatactggcctatgttcccaaggaatrtaaagacaattacagcagagtgtgacaagtactgtaatagagataagcagaggattttgtgggagcactgaggagctaacacaatcttgacatctggggaaagattcgcagaaagagtgacaggacaacagagctgagttctcaagcagcatcaagagtcaaacagatcaagaatgggataaagggtattccaggtagaasagaatgtgagaaagccccgaagtggaggcaagcatggttagtttggaagaactgtgagtatttaatgtgaatggggcacctggtgctggagggtggtataactaaggctcttcgtgtaagtgcaagtaacaggaaccaccttgggttcctttaaaaacaaaaggaatttattggaaaaacaatgggtaacctcacagatctaaygcaaaggctagaaaaatctargctctgaaattaggctggtatcaaggtagagyaggcagccagaactgcggctgaaccactcacgggaacagtctggtgaagacaccactgcctgtataacatgagagcaccctcactattaccactgctaccactgcccctrtccatgatcttctgcgtcactcactgcagattcaaagttctactggctgagcctgggtcacattcctgtgctctagctgccaaggaacagggaaaaatgagtacctgaactttccagattttgaggtgtgagacaggtcctgttccccaccaagactctgtagaatttcccaaatgtaagaaaaaagttcagatgctagacagacagacagacagacacacacacacacacataaaaggcaaatttccattacwtgggacacagtgaaagacaaaccagtgaggtaggtgaagactgatcattaggagatttatcattcatgttaaggagttaggactttatctggactgaaagagttgaaggtagtaacagacacactcttcattttaaaagccacattctgcaccagtgcagtgcctcactcctgtagtcccagcactatgggaggctgatgcaagagaactgcttaaggctagragtttgagaccagcctgggcaatatagcaagacctcatttctatttattttttaaattaatataaacaatgtttaaaaaaataaaaataaaaaatacataaataaatatgtataacaatacaaaaataaataaataaataaataaataaataaaaataaaaaayaggccaggcacagtggctcatgcctatgtaatctcagcactttgggaggccaaagcataaagattccttgagcccaggagtttsagaccagcctgggcaacagagacagacccggtctgtacaaataataattttaaaaattagctgagcacaacagtgcatgcctgtggtcccagctacycaggaaggtcaggcagaaggattgcttgtacccaggtggtcaaggctgcagtgagccatgatcatgccactgcactccagccttggagacagggcaagacrcttaatmaaaaaaaaaaaaawtttttttgaaaattaaaaaaaaaaaagccatatcctggaataacatggaagatgtactggaggaggcaggcatgggcagcagaataacatcagcgaagcatttctttttagaaagatatgaacaaaccattttttgactatatgaaaaaagtcaccagctgtccgcaggccgaagtttcacctgatctctaactttaatctgtagttggcaaaccaggcctccaggagtagaaagagctcctttgtgttctgcctttagtaccttgcctcagtctaacaccatttcccacggccccatcaaatacaagtgatcccatggagggaaagcagcagcagcagcagaagcagcaattgctgctgcttttcttttttgccttatcactatcaccttgaagactgactatatgctaggcattttatatgttatttctcacttaaattttgtattagtcctataaggttaattattgcccctattttacagatcagaaaatacaggttccaaaaaactgagcatccttgaacaacataggtttgaacttcgagggtccacttaaatgtggactggattttcttctgcctttgccaccactgagacagcaagaccaacaacttccgcctcttcctcagcctactcaacaagaagacaatgaggataaagacctttacaatgatccacttccactgaatgaatagtaaatacattttctcttccttatgatcttcttaataacattttcttttctctagattactttatcataagaataactgcacataatacattttacattaaaatatgtgctaatcaactgtttatattattggtaagccttccagtcaacagtaggctattaggagttaagttttgggggagtcaaaagctaaccttggaagccaggcacagtggctcatgcctgtaattccagcactttaggaggccaaggcrggtggatcgcttgagttcargagtttgagatcagcctgagcaacatggtgaaaccctgtctctaccaaaaatactaaaaattagccaggcatggtggcatgcatctgtggtcctagctgcccgggaggctgaagttkgkgggagatcgcactactacatgccagcctaggtgacaaagtgagagattctgtctcaaaaaaaaaagttatacttggattttcaactatgtgggttcaagtgtcaactgtacatttacaaagttcacatggctagtaaatatcaaaaccaaagtttaaactcaagctcagcaaggtgtggtggctcaggcctataattccaatgctttgggaggctgaggtggaaggattgcttgagaccaggagctcgagaccaatataggcaatatagcgacatcttatttctaccaaaaacattttttttaattagctgagcatgttggcatgtgcctttagccccarctactcgggagactgaggcaggaggatcacttgagcctgggaggtggaggctgcaatgaaggcaagactgtgctgctgcactccagcctgggcgacaaagtgagactctgtctgagggggaaaaaaaaaatccagcctgggcaacatagtgagacccctgtctctaaagaaaaacattttttaattagtagggtatggtggtttgtgcctatagtcctagcttgtcaggagggaggtgggaggctcatttgagcccagaaattcacggctgtagtgagctgtgatcatgctgctgtacaaattcacactctagtctgggtgacagagcgcaactctgtctcaaatgctagctcttcccaccataccaaactgcttgtagaactcagtaggtggaggccatctatgggatgaatgccatctatgggatgaatgccatctatgcagaacatttccaaggccaccaccaccaactctatccacaccccacaaaacactaagtggaagatatgccacacaggggaaatgacatgtgcacaaaagcagatagccttgctctgagaacaagaagtgattctaagtggattctgtggtgaatcatagggttcctgaggggaaatggctagatatacagctggaaaagcaaatataagaccaaatcacaaagggcttcataattttaagaaatagcctgtaggaaaacagttcaaggagtttagaacagaatacatgaagaactcctacaattcaataacagaaaaacaaataagcgaattttaaaatgggcaaaggaattattcgacatgtctccaaataatatatacgaacagccaacaagcatatgagaagatgctcaacatcacttatgattggggaaatgcaaatcaaaacacaatgtgatatcacctcacacctgttagaatggtcactatcaaaaaaaccagaaaataacaagtgttattgttaggatgtggagaaattcgaacccttgcacactgttggtgggattgtaaaatggtgcagctgctatggaaaacagtgtggaagttcctcaaaaagttaaaaatagaactaccatatgatctagcaatcccacgtctggatatatatccaaaagacctgcaaacaggaccttaatgagacatttgcacacctatacccactacagcataattcacgatagccaagatgtggaagcaacctaaatgtccatccaaggataaatggataaagaaaatgtgatatacattgggtgcaatgtacacttcttgggtgacaggtgcaccaaaatctcagaagttaccactaaatagcttatctatataacaaaaaaaccacctgttcccccaaaactattaaagtttaaaaaaaatttttttttaattttttaaaagaaaataagggccaggcacagtggctcacgcctgtaatcccaacactttgggaggccaacgcgggtggatcacttgaagtcaggagttcaagaccagcctggccaagatggtgatacctcgtctctacaaaaaatacaaaaattagccaggcatggtggcaggcacctgtaatcccagctactaaggaggctgaggcaggagagtcacttgaaccccagaggtggaggctacagtgagccaagatcgcaccactacactccagcctgagcgacagggtgagactctgtctcaaaaaaaaaaaaaaaaaaagaaaaagaaaatgtgttatatacatacaatgaagtattattcagccttaaaaaaagaaggaaatgctgtcacaggtgacaatagggaagaaccctgaggacactatgttaagtgaaataagctaatcaaaaaagacaaatacagcatgattctacttataatagaaggtatctaaagtaatcaaacacactttaaaaaaatagtagaatggtgattgccagggccagggggaaaaggaaaagaggtgttgttcaaaaggtgtagagtttcagttatgcaagataaacaggttctaaagttctgttgtacaataatgtgcatacagttaaaaatactgtactatagccttaaaactgttgaggataaatttacattatatatttttaccagtttttttaagtataaaatctatagttttcatagaaaatagtgcataaagcattagtattcaagtgttttcacacaaggtataatgtcaaacaaaataaagaaattcaatcttgggtttcyggaatttcatataccatacactataccgaatggttttcaaggttctaagaataagaataaagaaatatatgtgaaagaatmttgctaaagaaaaaaaatgcttccttcctgtaggagatagctaaaaataaagaaaaaaaaggaaaaaaatgctgcaaagtatttattattaaattatatgatgtactgaccatatacacagctgtaacaagaaaaaaaaagagttctttatgtgctaatctgaactaatcaccaagatatgacatgaaggtacacaacacgaagaattatataatgtccagtgaaaaatgcaagtcagaaaagaccatatacagcatgatcctatttttatgtctccagagtaaaaattaatcatacattaagatatacatatatgacaaaacttttttctaatgtgagaggaaaatgcacataaaattcaggatggtggcttcctctcgggaggaggcagggaaatgacaaaagagaagagcaaagaggttgaggcaacattactgatgtgtttcccaagatgagtggtaggttcacagatgttcattttattatgctttataattttcatatatcctacaaatattattttgtatatatcatattataaaataaacaaaaagacaaaatggggggaaaaaaaacaagtgctgatcaatgtatacagatcaccagtgtatacagatcaccaagtatacacagatcaccagtgtatacagatcaccagtgtatacagatcaccaagtatacacagatcaccagtgtatacagatcaccaagtatacacagatcaccagtgtatacagatcaccagtgtatacagatcaccaagtatacacagatcaccagtgtatacagatcaccaagtatacacagatcaccagtgtatacagatcaccagtgtatacagatcaccaagtatacacagatcaccagtgtatacagatcaccagtgtatacagatcaccaagtatacacagatcaccagtgtatacagatcaccaagtatacacagatcaccagtgtatacagatcaccagtgcatacagatcaccaagtatacacagatcaccagtgtatacagatcaccagtgtatacagatcaccaagtatacacagatcaccagtgtatacagatcaccagtgtatacagatcaccaagtatacacagatcaccagtgtatacagatcaccaagtatacacagatcaccagtgtatacagatcaccagtgcatacagatcaccaagtatacacagatcaccagtgtatacagatcaccagtgcatacagatcaccaagtgtacacagatcaccagtgtatacagatcaccagtgcatacagatcaccaagtgtacacagatcaccagtgtatacagatcaccaagtgtatacagatcaccagtgtatacagatcaccagtgcatacagatcaccaagtgtacacagatcaccagtgcatacagatcacaaagtgtacacagatcaccagtgtatacagatcaccaagtatacacagatcaccagtgtatacagatcaccagtgtatacagatcaccaagtgtacacagatcaccagtgtatacagatcaccagtgtatacagatcaccaagtgtacacagatcaccagtgtatacagatcaccagtgtatacagatcaccaagtatacacagatcaccagtgtatacagatcaccaagtgtatacagatcaccaagtatacacagatcaccagtgtatacatatcaccagtgtatacatatcaccagtgtatacagatcaccaagtatatacatatcaccagtgcatacagatcaccagtgtatacagatcaccagtgtatacagatcaccaagtatatacatatcaccagtgcatacagatcaccagtgtatacagatcaccaagtgtatacagatcaccaagtatatacatatcaccagtgcatacagatcaccagtgtatacagatcaccagtgtatacagatcaccaagtgtatacagatcaccagtgtatacagatcaaccatttgtgtacaaaggggagagaacagatcatctttgctgtttgtatgaagtgtagcaatgtctgcatcaatatgtctttgagctgaactgcagctcaagactcttattctagatcctgtctttcaccgtgtatctgtggatatgcaaatatttgttacctgtctactacaggtcagtcarcatctggtatgggaggagtcccacataaaataagacatacgtagtctctaaggagcttctagtgcgaggaggaaracagamtaacagttatgtgcaaatgctccaataaaggggaatacagggaactctagcagggcacagtggttcatgcctgcaatctcagcgctttgggagtccaaggcaggcagrtgacttgaggccaggagtccgagaccagcctgaccaacatggtgaaacccaatctctactaaaaatacaaattacccaggcgtggtrgctcgcacctgtaatctcagctactcaggaggctgaggcatgagaatcacttgaacccgggaggtggaggttgcagtgagctgagattataccattgcactccagcctgggcaacacagaaagagtgtctcaaaaaartaaaataaaataaaataataaaaatttaaaaaaaaaaaagagggaagatgcaggtcctctttccttgcctaatgcagccatggctcgtggtcccaagaagcatctaaagcaggtagcaactccaaagcattgaatgctggataaattgaccagtgtgtttgcacagtgaggtcatatatatacacagtaaggccataaatatatatatggtctctctmtatatagacagtaaacagaattgtgtctgttattaaaatattatagaacatactgggaaattctcagaaatccagaatttggatagggatgatggccacacaacatagtaaatacattcacaactaytytactgtacactttaaaatggtaggttttatgttatgtgaattatatctcaatggttttatagtttcataaaaccatttaaaccagagcaagagccaagaaggagaaagtaaaatggtaggctcttctcatataactacatatacatttctaacctcaaactctttcctgagtcccagttctatattttattacaactcacatgaaatcatgaattctttgaaatcaaaggccatatcttattcagttttgtacccctctgcctggtttgcagtattaatttgcgcattcattcattcaaatcattgtgagtgtttaccaggtaccagttactatgctaagagctggataacagtgaaccagttcttgccgtcacagaactcagagtctggagagggaatcagayaccaaacaatacagcaacaacccaacaactagtaagtgctatagaggaaaagcacaggctgctgcgggaaacacattataggagagctggttagctctgggaagggtgggttctaccaggagaaacctccctgaggaagtgacaatcaagtccagagctaaaggatcaacaaawattcgctgcatttgatgggcggagttggccttacagcacaggaagcagcatgtctgaaggctctgaggcaggaagggtcttggtaatctggggaacagagagaaggccaacgtgattgcactaaagtgaacaacccacatgtccaacaactgatgaactgaatatgtaaataaaacatggtatatccgtaacrgaatgttattcagccataaaaaggaatgaagtattgttataggatacaacgtggatgaaccctgaaaacattatgctaagtgaaagaagccagatacaaaaggctggctattgtatcattccattaatattatatgtccagaataggcaaatatatatagacagaaagtagatttgcacttgcctagagctataggggagagggagtgattgctaaatgkgtatgagattttgggggcagcagtgagatgaaaatattctaaaatcaattgtggtaatggttgtagtgaatgaacaaaaaaaccactaaatggtacatgttaaatagactaattgtatggtatgtaatttatatctcaataaaactgytactttaaaaaacaatatatctttacagtacatgactcacattgctggccaaagtattcatcagtataaagtcattcatgtttctcagcatgaaacccctttatttactcaaaagtttatagtcctctatagtttcacaaatataatgaaaatgtagagtccaacttagtcattgcaccaaattaaaactatgtaactttcagtcaggtgcagtggctcacacctataatctcagcactttgggaggacaaggcaagaggatcacttgagctcaggagttcaagaccagcctggacaacatagtgagacctctgcaaaaaaaagttaaaaattagccaggcatggtggtgcacacatgtaattccagctactccccaagctacttggaaggctaaggtgggaggatctcttgagaccagcagggcaaggttgcagtgagccatgatcatgtcactgcactccagcgtgggcaacagagcaagacctyatctcagaaaacaaaaaaaaacaaaacaaaacccacactatgtaactttcaaaaaacaatgaacgaaaaaataacacaggctaaagagcaataaaaaagaaccacatgaaagcacgggtttgggtgtttaagaacagtaccacttcctactaaatgatgttgttaggcacacatttgaagtgctttgagcactgaagggagtcatttcattaacagaagaaacttgagactacactttataaaagaattataagtgacatatgaacaagaaagtacaccaaggggaaaaagcataaatattagactagaaaaacagaatgcagaggctgctaggctctggaggagagacatactgaactgaaaagtttctctgtgtttttcttttgtgtatgtttccaaaaaaccaaatacaaaaaggcttctgttagaaagcaccagattccccaaytggaacttggcatactgccaatggattaatgattttaatcatatagcccaaaccaagacttaatatgagaatcagagaaaagaaatgacaagatttggactagcaagcctaatcagccattaaatctcatggaagaatcagactgccttaaaaatatgctgaagcaaaactagttttttatatactttattggtactaactagaaggtagcagtataccactttcttcaattattcactgtcagataatccagcaatagtgtctctgccaaaaaaaaaaaaaaaaaaaaaaaaaagagcccacaaaagtttcttcctagacgtttaaagaattccattcctttactaaacaaggatttttttttttttaacagacaaggtcttactttgttgtccaggctgctctagaactcctgggctcaggtgatcctcctgcctcagcctcccaaagtgctgagattacaggcataacctaacacgcccagccaagaaggaatttaaaaatttaacatttggggccgggcacagtggctcacgcctataatcccagcattttgggaggccgaggcaggtggatcacctgaggtcaggagttcaagaccagcctggccaacatggtgaaaccccgtctctactaaaaacacaaaaagtagctgggcgtggtggcaggcacctgtaatcccagctactcgggaggctgaggcagaagagtcgcttgaactcagaaggcggaggttgcagtgagccaagattccaccatcacactccagcctggggaacaagagtaagacttgtctcaaaaaaaaaaaaagttaacatttggaaggaaaaaatacttggtaaaggaacaacagacaggttaatcatttgaagtctcaggaaagctgaaaattaattctatcratgtaaaataacaaagtaaatacaaaaaccaaccgtaaaaattactttttggaaagtttcaatataayttaactcttggtatgaacctcctcagaataattctcccaggcaaaggcagaaaacccctaaaacaacctgggaaaaaaactgaaaaaaactgaccaaaatgaacactaaggaacaycatacactaattaagacaagagaatcaccttaaaacaacttgagacagaacagaagaaaactggatgaaaactgagcaagtgtgaggtaatcaaaatggcttttaaacaactctacccctccctgccttcgaccaatatttcccccatgtatccaaatatgagacattggaaaaaaacttaattcctaaagggagcaaataatccttcaatagtacagttaaagaaacactggtggtgaaattaaatggcttaggttcaaaaatctacctatcacttattagctaggccaccttaagctgtttcctctttagttaatgggggataattccaattctgcctcacagaattaacatgaagatcaaatgagacagtatgtatacatgacagcataccttgcaactgtttaataactatttcatattttctctacatagctgattataatctctaagttttatgttaacattcttcagtcactgttggcatttcttttttcaaccaagtttcaaataaggcactaatctttgctcaatttaaactcaaaccatggaaaccttggctgctttacttggattgcaggactggcaaaattccactccaggtggctaagcaataataaacaagggctcactgttccatcacatcctcattccctccgtgaataagtttctctccaaatttagtggctcatttttgacttttaaaacactactmtatttcctcccccagttataaaactttaaaaacttgaaatactaaaacaaagaacattttaaaactaaataaaattcagtaagtttaaagaatgtcacaccaaggagaacaaaatgcagtagtagggtacagcacttcaagatattaaaccatgtttctctatccactggcccagcacacacaaattctagcactgaaataagaaaaacaaattcgaatttctgagaatttcccagtatgttctataatattttaataacagacacaattctatttactgtctgtatctagagacwatatatatatatatatatatacacactatacagcctgggtgacacagtgagaccattgtgccacagtgcagtggcacaatcatagctcactgtaacctcaaactcctaggctcaagcaatcctcccacctcagtctctcaagtagttaggactacaggcatgtgccaccaagcctggctaatttttaagtttttttatagagataggatctcactatgtcacccaggatggtcttgaactcctgggctcaaatgatgctcctacctcagcctcccaaagcactgggattacaggcatgagccactgtgcccaaccagtgtctatcattaaacacacatacacacagcaggccatcaagtatttgtgttctatagttttattrtaagtatatatgaaatatattcagcaaatatttgacatattagacatatttacatataataaaactatagaacacaaataagctacctgagcaataaacagaacagcaacaaaaaaaaagcattatactgtaaagtgctgaggctttacacatcaattttggtacaatttaattattttttattgagatataattcacataccataaaattcacccttttaaagtatacaattcagtggttttcaatatattcataaggctttatcactggttaattctagaatattttcatcatccctaaaagaaacccaagatcattagtaatcactcaccattcctacctccccctcaccccaagaaacctctaatctactttgtatctctatttacttgcctattttggacatttcatataaatagaatcataccatatgttgcttttgagaatttaattaaatcttacctttcattatcatgtggtttttcttcctttttttccgaattaaagcatgatcatgtaccacatgataactatagttaataacaatgtattaaatacctaaaaattgctaagagagtagactttargtattctmaccacaaataaggatgtgaagtaatgcacactacctagtttcactttaccattccacaatgtatacacattgcaaagcatcatgttgtatcccataaatatatttttttggtcaattaaaaaaataaatatgaagaaaagaaaaaagcacratcagggtaatgttatcatctctgaaaaggaaattctttaaaaacatgcattgaggttgggcacaatggctcacacctataatcccaacactttrggatgctgaggcaggcagatcacctgargtcaggagttggagactagcctggccaacatggtaaaactccatctctactaaaaatacaaaaattatccaggtgtcgtggcacatgcctgttgtcacagctactcargaggctgaggaaggagaatggcttgagcccgggaggcagaggacacagtgagccgagatcatgccactgcactccacactgcagcctgggggacaaagagagactccgtctcaaaaaaaagaacccaggtcaggcacagtggctcaygccygtaatcccagaactttgggaggccaatgggggcagatcacctgaggtcaggagtttaagaccagcctggccaacatggtaaaaccccatctcaacaaaaaatgcaaaaatcagccaggcgtggtggcacacaactataatcccatttactggggaggctggggcaagaaaattgcttgaacccaggaggcggaggatgcagtgagctgagatcatgccactgtactccagcctgggtgacagagcgagacctggtctcaaaaaaaaaaaaaaaaaacaaaaaacatgtattggccaggcatggtggctcacatctgtaatcccaggactgtggtaagcccaggtgggaggattgcatgagggcaggagttcaagaccagtctgggcaacatagtgagatcccgtctctataaaaaatgttaaaacttagccaggtgtggtggcacgcagctgtagtccttactactcaagaggctgaggcaagaggactactttatttagcataggagttcaaggttgcagggagctgtgacagcattactgcactycagcctatgcgacagagcaagacaytgtctcaaaaaaccaaaaaacwtgtataacacatgaaatacacacacacatatacataggcgtgcatacacacaaagaaagatcaggaacttgtattgtgaggctgatatggaataaaagatatagatacaaagattatcacacagatgaacattgtaatttttagaatctttgctgcaaaattcttgaaaaatatttctcgtggtttctaaaaagaatcctggctgggcacagtggctcatgcctgtaatcccagcactttgggaggccgaggtgggaggatcacctgaggtcaagagttcaagaccaatctggtcaacatggtgaaaccctgtctctactaaaaatacaaaaaatagctgggtgtggtggtatgtgcctgtaatcccagctactcaggaggctaagccaggagaattgcttgagcctgggagacagaggttgctgtgagccgagattgcrgcactgcactcctgctggggaaacaagagcaaaaaaaagaaaaaaaaaagaatctcaaaaaaaaaaaagaatcctgactaacattttggcattttccaaactattaaattattattataaatgctaattactatactttactattgtaaaaagacattaaactattttaaaaattatrcatataaataataataaaaatctgaagccayagaaaaacatgcatatagttgtgtatttaggtttgatgcaaaaattgagtttttaaaatttttttaatgttttatttatatattttttgagacaaggtctcactatgttgttcaggctagtcttgaactcctgacctcaaacaatcctctcacctcagcatcccaaaatgctggtattacagatataagccaccrtgcccagctgcaagtattttacttttaattcgaaagtattatcattatcattttttgaaaggcattattgaaatatacttgttatggagaacggtctaagcaaaaaatgataaaaatagtaagaatttaaaacttagaagtatacaaagaaatttcatgctcggtgttataaataggcaaaaggaggaattcacaaacttttgatataaatgattactttcatatctaaactaaatgtacatgatatggaaagatgacactaatatattgttcaattaaaaaaataagttgcttatatcctactggtcacataaaaaaacctttttttaaaaagttgcagagctgtatgtataatatgatcctattcatgttgaaacaaaatagcatatattgatttgagggtgtgtgtacatgtgtatgtgtgtgtgggtgcatgtgtgtgtatgttttcaggtaatttttgaaagtctacaaagatattctctaaattattaacactggttactccaggaaaatcagactacaaaaaattaaagcaacgttcactttttatttcacatatttctgtattaactgcttatgtactaccttttgtaactttttcatcaccaattttaaaaattatttaaatgtaccatcttttcttgcatcaaattcaaaattttagtgtgtcaatttgtaatgatccaacccaagggaaaaaccgaacatggccccaaacactaataggtgatatttgacttccaagcacctcacaggttttttaaagcatctttactcagaacatatcccagaggaaatatctaagtggtaccctgaaaagtctgggataagagttggctgtataatatctatacagtaaagataatcatcacttttaatattcacacattactccaccacttccacactttaacaaccattgccccagcctgggcaacatggcaaagccccgtctctacaaaaaaatacaaaagtgagccaggtgtggtggtgtacgtctgcagtcccaataatgggaatctgaggtaggagggtcacctgagcccgaggaggtcagaggctacagtgagctgagatcgtgccactgaactccagcctgggtgacaggrtgagacccctcaaaaaaaacaackattgccagtatatatgaaaccagatttttttttcttctaaaaacaaaaacaacaacaacaacaaaaaaaaacggatacctgtgcagcacgtgcaggtttgttacataagtgtacgtgtgctgtggtggtttgctgcacctattgacctatcctctaagttccctcccctcatcccccaacccccaacagatcctggtgtctgttgttcccccctctgtgttcatgtgttctcattgttcaactcccacttaggagtgagaacacgtagtgtctggttttctgttactgtgttagtttgctgaggatgatggcttccagcttcatccatgtccctgcaaaggacatgatctcactcttttttagggcagcatagtattccatggcgtatatgtaccacattttctttatccaggctatcattgatgggcatttgggttggttccatgtctttgctattgtaaatagtgctgcaataaacatacgtgtgcacgtatttttttttttttctgacacggattttcgctcttgatgcccaggctggaatgcaatggcrtgatctcgactcactgcaagctctacctcccgggttcaagcaattctcctgtctcagcctcctgagtagctgggattacaggagcatgccaccacacgtactaaaaataatttttgtatttttaatagagatggggtttcatcatattggtcaggttggtctcaaactcctgacctcaggtgatctgcccgcctcggcctcccaaagtgctgggattacagatgtgagccaccctgcctgggcatgaatgtatctttatagtagaatgatttctattcctttgggtatatacccagtaatgcaattgctgggtcaaatggtatttctggttgtagatccttgaggaatcgccacactgccttccacaatggttgaactaatctacatttccaccaacagtgtaaaagcgttcctgtttctccacagcctcgccagcatctattgtttcctggctttctaataatcaccattctgactggcgtgagatggtatctcattgtggttttgatttgtatttctctgatgatcagtgatgttgagctttttcatgtttgttggccgtgtaaatgtcttcttttgagaagtgtctgttcatatcctttgcccactttttgatggggttttttcttgtaaatttgtttaagttccttgtaaattctggatattagacttgatttttttaaagcaccctgagagagaayaggtacagattaacacaaaacacagttcttaatttcaaagaatgaaccaagttggaaaaacatcaaaccaagtttagaagacagtggaggagagggaagaataggaagcactgtcagtctctcattctttcttcctttctggtttatctagtgattctttgtacctcaactccttagtgaactcaccaacagggggcttttgggcccacttgaaacatgcaaaccaaacaatgctacacccaaaaaaaggttagaatcataccttttccaaaatgaacctgtttaaataaggcatgtagccctggttggacactggaccctcatcatcatccctgaagtgctcttcaagggcaactgggtcatgaggaaccttcagcaccgtgcacaggttatgggaaaggacctgcaagggaaaagaaaatcgtttaaagactcccactaaccagcacrtgacaccttcaccatgartacaacatgctgctccctctcctgggtagagaaagatggaaaataaactagcaaaaacagggtgaggactgctcagctgcaagcccctacttgtaacctgttattctttctcattccttcccaggtttggttcacttagaactagtctctattacatgcctactatgagccaggctccatgcaagatctgtgaatataatactcctgtggtcttttactaatttgtccacatcagaaagaaaagtggggtggggggggaagtctaagagaatgtgttcaaaattaaacttttcaccaagtagagcagagtcagccaattagagctgttcagagaaagaacctggtattattgggaggctgcagccaggggttctggacaaggaggctgacctgggcaagtcacaacctctccaggctttagttttctcatttattcaatagaaagggccaaattaatataccaaatattaattaggaatctctaagtatctaaacatttctaaaattctatgactaggctaaatttcagcatgagtrtaaaagaatataaatataaaaagagaaagaaatcaagggcctggattagattcaggaaaaaattaaatagcaaaaataggagtcgccaacatggttaaaaatattttacagaaaacctgcattccatagcataaatacatataaagggctactggtcttgcaataacctaagttcacacttcaaagtccaggtacagtagttaaatkagcagtgtgggctaccttagtattaatcttgttttacattaaatgaaaatttcaagatagaacttaaatcccttccatttcatttgtgctttctgaacaggtcaaattacatagctaaggctgtattttcttcaacagagaatcttcctagttgaaccccaggtaaaaacgttccttatttttctcagccctaaacatttaaccttaaggagccacattcatctcaataaatactttcatttgcattaagcgagtccctttttctgcatacacatatttcagttaggagtttttttaagattaaamatttttaatctataaaataatttgcatatcttctttctaaatttgttttgtttctcaaagcttcatttatgtggagatccttttctacatgctctactggttttaaggaagtaagttaaggaagtaaattcacaaatggttataaatgcagtaatgaagactacaaagcaggctgtgtttctcaagcaaaccctgtgtttgccagtaaagcacatgaaaagagtacggtggagcttttattggagaatcctgcaccacaatcagcaaaattttaaaaagatatttaatttatattagcctagtaaatcctatatactaaagatcaatttcaagaatataaagagcttaataactgtaaaatgctatggaaatacaagtattaaagaaatgcacacttctcagatcaggttcaaatgtcattcaaattttaaaatcatttggaactttacccaagttaacaattcccaactactggttaaattaaggtatatccataaaacataaaaaccatgagaaagcttgctawgtacggatatgaaaagatctccaacataaattaagtgaaaaaaacaaggtacctaagaatatgtatgccatcttttgtataaaaaagaaaagggaggaagaaaagaaattctggagggatatataagaaactagtaactgtgaaaggaagacaagtttgatgagaccaaggttagaaaaagacttcactgtagctcttctttgtattaagtttttttaaaaaaaattaacctactcaaaaatgtagtacatatttttaaaattaaatatatatatatatatatattttaagtggccagcctaagatcacatagatcaatctatttatcttcatagcctatactttttcttctacattaacctgctgactagaaatgaggtgtaaaaggaagacatattccacagcaatgtaccatgactaatggatgagtgagctgtaagggcaataaatgagttcagaaaaggagaaatagtatgtgttacagtgacttcacagaggaagtaaaatgtaacttatggcttacaggataggtaaggatagctttaggataggaatagaggcaaatacaaaaatttccagataggggaataacatgataaaagtagctgattaatccaaagccttcaggaaacaaaaaacaccatctctcccatacccaccctgttctctaccttagggtttcacagatcctctaactaaagccctggcaggggccttggatgtcatattgtcatcctcatcttataaatggtgactacagactcacagatattaaatttgtttttcttgactaaagttactgagaagaactgagactagaactcgggttttgtaatctctggtccagcactctccagtaataagaaacattatgtcttcagttgtctaaagtcaacaatgctctttgtacatatagatgcttagtttgattaagtgatcccactgcagaagatatagatttgaactcaagatttcagccttcgacaattaaacagcactcttgttaaacacagggatggctaaattcagtgataattttcttaaccatctttacttaggcaaactgtgaggaaggcagcacagtatacaaggcacctggaagagacctgcgctccaatgtctctgcatcctcactgtcaaatgagagttggacttgtttgtaaaacccttaactatcaacccaaactcatttcataatttagataagaagtccagctttgtgacagctttttcactgttagtaaggtctataaaagggaagtcttcttcaaaaaatataacaacaggctgggcatggtggcttatgccaataatcctagcactytggggggctgaaacaagaggatagctagagcccagaagttcaataccaacctggacaacatggcaaaaccccatctctatagaaagtacaaaagctagctggatgtggtggcacatgcctgtagtcccagctacctgggaggctgagatgggaggctgaggtgggaggatcacctaagcctagggaggtcgaggctgcattgagccatgatcatgccactgcactccaaccttggtgacagagggggtcccatctcaaaaattaattaattaattataatatatatgtatatataaaacaaccaactgaataaagcaacaatgaaacagtatttctaaaagaggaaaaaattgtgtactatctttaaaactttttatcagcaacctttctttaaagcttagacagtatctcaagtatttttttcttttttaagatttatttgtattttttaaaaatagagatggggtctcactatgtgtgcccaggcgggtctcaaactcctgggctcaagtgatcctcccacctcagcctcccaaagctgccaggattatacacatgagccaccatgcccagtctcaacaaggttttttgtttgtttgttttttgttttgaggcagagtctcactctgtcacccaggctggagtgcaatggcatgatctcagcaacgtctgcctcctaagttcaagcaatctttccacctcagcctcccaagtagcggaattacaggcacctgccaccacacccagctaatttttatatttttagtagagacagagtttcaccatgttggccagactggtctcaaactcctgacctcaagtgatccacccaccttggcctgcgtgctgggattagaggcgtgaacgactacaccttaccaaggttttctttttataaaaataaaatatacaagaaataaaatttttgatggccggaatataaactagtaaaaagaagtaaaagctcctccataaacttatacagcaatttatgctttttcaagtagactcataccatctattaatttgttttagcctctccacagggagaatagatattattgctattttacagacgaagaggctgagtcagagattaggagatgtgtcccaaatcacagagttttacgtgtagcaaaactgggattagacccaagcctcccactctggtgtcctttccatgctttgctaccttccctctgtttctggaaaaacagatagccctgccaatacaaagatggacacgcccgtgagttgtttctaaattttagtgatgtgctggtgctaccccagccccaccccatcagctccacagggcccaacagagatgacaggcactattcagcagagccaagttagtgccagtggcaaggaagtccacatacctagaagtctgggaccgttctctctctgggagccctcatctcccagcaccctatccctctgggggaatctgcactaagaggcactaaccccttctccagatgaggaagctgaaaagcagattaagacaaaagaatcagaaagaggactacaagttcttgatttgtaaaaggactgccccaaatcaytctaatcagggtgtttgcaagtttcttgaaaaagctgaatttatcccgcttcaaatgcctgttcctccaaaggccattctttcagcacccacataattgctaagcagctttgctctcattctgctgatctgaagaataaactattgttaccacaataacagatccatatccatgccagaaactcatctctccagttccctcatagctgtctgcagttgcctctgcagggcctctgctgacaagatgactaattaactgcatgagccctgctcgtgtggtctgttcctgttcagtggtttgcttgccatttaccccttttgagcattttactccagccatcatgaaaatgaaatcaaggatggtgaacagtgttttaacacgagtaagtagtgttcaccctcctttctccaaagacgtagagattctaaaaagttatttaaaacgtgccacccagtaacacactgtttccctttacaggatgtgcgtaatgggcaagattcaacactgaaaaaaaagcggagtgggggcagatttctattccaaaagacttatctgaactgacacaattatagacttataactcataatgggcaatctttttttaaaacattaaaattcctgtctgatttataaaatttcaagccaatggcaaattaccagaaaattcttcctaacaatggaccagcatgaccaatttcctaccacagctatgccctgccttaaaagcattgtctactctaagtcctgcccattcccgcatggactcattttccccttccaaacatcttttcatcctgcttgycactgcttaagtcttgcttgtttcctcttacctttaatctaaccagcctcaaaaatctcaaagtcattgttcacattgctctcaatccctaagtacaatcagttaccatcctagacacttacaccaaatcttcaagtaccactaacatcacgttatccccctgcctaaaaatcatcagaagactacagaagtaaaagctaaggaaatatgtgagttgtatatttaagtcactccacaggccagcccacttcaccttccttatttcttcccaccctctgcaccaaccatataaatccagccaaataagcttactaactgcatcccaggcaacttgtaccacatccctttctcccctgggcccttgctcaatttacccctacctcctttcctgcctaacaaaaatggcatctctttctgaagccttcaccacccaaaccaagatgatctttcttcactctgtttcccaagcagtacctcttgtgctaactaccacacatgatttctctctcctgtaagactgtacatttctgaaaggcccatatcttatacaacattgcatgcccatggcacctggcttgctgcccagaatccagaagactttcaataactgctaagtgaattctttctaaaaattctcttaacactaaagccgtgatactttaatattaacaataatcttagaaaatatactatttctatctcctcacttcacagataaaaagactgtggcctgagacttggcctaagtcacacaataattagcaacaaagtagggactagaactcaaatctcttagctctctgtcccacagtgatgccctgtgctggaaacatttctcttctgcctagtcacatccttcaagattgggtcattcataaactctaggaaatctttatggattaccaccctgccccatgaactcctattcagcatttaactatgttctgtttcagatactaatggtatctcaaatatctaacttatcaaatatcctcccttattgaagggaggaaataaatattttccttctgcatccttcagtgactagcatagggctaagcgaagattcagtaagagcagaacacttacagacagattaaggaaaagtaactcaaagtcatctgttggaatgctgtccacagaatatatgccactgatgtcatacagcatggatggcactggattacactctaactgaacyacctttttaaagttattttggataacttaccaacttacccctcttcagaaactaaacagaaaatactggtaaatttgaccacagaaaaatgcttatattttcttttaaaaagaaagaaaccataaaaaaacaaaaaaggcaaatagctccaatattcaaatcattcttgtggacacgaatagaaaattcacaaaagaaactaatcactaataaatagaggatacctttcaagttcaggtggaactcctgggacctttaacttttggattgtatggctaaggcataatgttgtttgttgtgtattatatttggtataacttttcttactgtttctctactaagaatgcctttaaatatggttattgtgatacttttttacaaggaaactatatttgagcagttccaaattgtacatactgtatgaaccttgtcctctgaatgggttccttatttctacacggaattgcgtagcttgcagtatcatgtaactaaagattaaacctcaccttttacttcaaaaataggcaaataaaatataggaaaagatgcttaatcttgctagtaatcaaaagaatgcacattaaaagagctactactttttgcctaagtaatacctggtgtttgaggagatataagggagtaaagactaccaatatccaacactgcagaaggtacagagcaggtttttctcaacttcagtactactgacatttttggctgaataattatttgtttgggggacagggcaggtaacctacgcattgtacaatgtatagcagtatcctgggttaaaaacatttaaaacatctcaaatacctgtgaataggaaatggttaaataaagcatgatgcatcaacacaatgaaagagttcacagtcattataaaggatggtgtctgtatctatatgcatttatacagaaagatgaccctaacacaatgcttaagaagagactacaggccaggcacagtggctctcacctgtaatcccagcactgagggaggccaagggaggaggatcacttgagcccaggagttcaagaccagcctgggcaacaaagtaagaccctatctctacaaaaaatacaaaaattagctgtgagcctgtggtcccagctactagggaggctaaggtaggagaatcaaatgagcccaggaggttgaggctgcagtgagtcgtgatggtgccgctgtactccagctctggcaactgagcgagaacctgtctcacaaaaataaataaataaataaataaataaataagaaaataaaagaggatacgaaaggatacagaatatgaccctatttatacaaaaggacatatatgtctgtgtatttacatatgtgtatatgcatgtgtgtacatgatgggggaagggagaaagagagatatataagaaagatattcactgaaaagttaattacaacctgcctttggtggtagaatttgaatgttttactttggactctgtactttaatacattgtttgagtattctatgtattacctttcaatcagaaaatgaagcttttatcttttaatattttatatattttaaatagaaaattaaaaaattaagtagggtggagggcttgctatggtctgaatgtgtcccccaaaattcatatgttgaaacttaatctccaatgtgtcagtattaagaggtgaggcctcgccgggagcaatggctcacgcctgtaatcccagcactttgggaggaggccaaggaaggtagatcacgagatcaggagatcgaggccatcctggccaacatggtgaaaccccatctctactaaaaatacaaaaattagccgggcgtggtggtgtgtgcctgtagtcccagctactcgggaagctgaggcaggagaattgcttgaaccagggagtcagagattgcagtgagcagaaatcacaccactgtactccagcctgggtgacagagcaagacaagactccgtctcaaaaaaaaaagaggtgaggcctttaggtggtgattaagagagcggaactctcgcaaatgggatcaatgaccttataaaagaggttgaagggagagagttccctagtctcttttgcccttctgccatgtgaggatacagcaacaaggaaccatcttgggagcagacagcaagccatcaccagacactcaatctgctagcatcttgatcttggactttccagtatccagaactgtgataaataaatttatattatttataaattacctagtctgtggtattttgctgcagtatcaggactaggtgaaacaaggctcctgctagaaagcaccagtaaaattagaaaatgaaaagatcattgtagaactataaagttgataaaattaactcctctgagccacccacaaagcatgctttcccatacctctttaaaaagccaccctatggaggttgtggcaggccgagatggtgctactgcactccagcctcggcacagagcgagactccatctcaaaaaaaaaaaaaaagaaagtcaccctaatggacaacaaagtcccccaatttgggacagcctcctgagagtccagccccccagtgaaatattgcacaaatgtcttttaagaaggtaaatgatttgtgaggagatttaactccagcaagcttctttatctttctcactactctgtaagttccttaaagagagagtctgtattttagccatctgtgcaatacgtattttagccatctgtgaataccaaaacctaatgaagtacctaatgagagagctgttcaacaaatgtttgctaaattagtcccatttaagaatttccaagaatttttttctttttttaaatttcattttgctactttaccatcttcatctagatctgggtctttgcatttattttactatactaccatgtttctagaagaatttttaattggaatctctagttcagatcactttcagagtgaaaaacaatgcctccattagttcttaacaccaccagaactagccaagcacaactcgtctggcctgagatctagtagagaagtccagtttcttaaaattcaagtacagacttctgagaaaaggacacaataagaattaacaagcaggtgtgagagaaggctctataacagaagagggggctctgagctccttgactatcacctccttagaagtttaatttagtacactcatctccaagagaaaatgtgaagtcacagtgtgcattcaaagtggtgacaaagaccacaaatctggctggacgcagtggctcatgcccataatctcaacactgggaggctgaggcaggaggatcacttgaggtcaggagtttgggaccagcccgggcaacataacaagaccctgtctctatgaaaaatataaaaattagcaaggcatggtggcgcacacctgcaatcccaactgctcagcaggctgaggtgggaggaccacttgagcctaggagttcaaggttgcagtgagccataacagcaccactgcactccagcctgggtgacagtgtaagaccctgtctcaaaaagaaaaattttttaatttaagaaagatcacaaatctgaagtcattaaaatatacagaaatcaaaaatatataaaataaaattaaaaataaaagaatgaaaaaaaatcacaaatgtgaggtttccctcggctgccccaccttctcaccaacctgaccccgcatggtccctaaaatatgacttctatccctatcaatctcttgaaattgcttttctaaatggattctgaggtagacacagagatgcaccactcagatgccccctcaagtaggtaactgctacccagctacaaggactgtgttaagctgatagcctccagctactttcagggtcccagtgacagagcggggtggtaggatcacttttcctcaatgtgggagtcycataaggggcaatctttgcttcagagctcctggttttgccaaatccatatgatggtttgacagttccttttcccaatttcatttcctctctcccaccccacaggtaacacttttgtattcctaacagtgtcttaacattggcttcctggagaacccatgctgggacagataccttctggccaagtcactctcccaaaggtctggcagttggcagtctgaatcaccccctcctcttagacgtttttggtccctgacataccattttcttttcttttcttttctttttcttctttttttttgagacagggtcttgctctgttactcaggctggagtgcagtagctcgatctgggctcaccacaggctcgacctcctgggctcaagcaattctcccacctcagccaccatcccccacccctcacccccagcagctgggactacaggcacctgccatcacacccagctaatttttctattttttgtagaaacaggtttcaccatgttgtccaggctggtctcaaactcctgagctcaagccatccacctgcctcagcctcacaagtgctggaattacaggcatgcgccagcgtacccagcccagacagaatagtttctaagttcttcaaaggtaaatttatgcagtcacatccatcatccctcattctcccaatctggtcatttcccaaagatcaattttcaaccctcagttctactttaatttcttcttagaaagtgcttttgaccaggcacagtggctcacacctataatcccagcactttaggaggccaaggcaggtgatcacttcaggccaggagtttgagaccagcctgccaacatggcaaaaacsctgtatctactaaaaacataaaaattagctgggcgtggtggcacatgcctgtaatcccagctacttgggaggctgaggcatgagaatcacttgaacccgggaggcggaggttgcagtgcgcacagattgtgtcactgcactcctgcgtgggcaacagasgaagaccctgtctcaaaaaaaaataaaaataaaaataaagacaagacattctgtgtttatgaatcaaaagacttaaattttttcaaattttatattttataaatctaaacatttataaaaagaaaaaagaaagtgattttattctgacaaccttaagtcatctctattcaaatgattcatagatctctttctggtcttaacctctccagtaagctctggtttatatcactaaacaatactagagatttctattctaaatctgcctcacgtccaaaagatccaaatgagatctcatcacttttctccccaaaataggtttgccaccctgattctgactttggtatcaccattgccttaacaaaactatggtctcttcttatatctctttttcatacagtttgtccaccttctggatctaattcagccccagccaatgccaactcctgtctctactgcgtgagccgctctgtcaccttcaggctaaccaagcagagagtgtgaggctggggaaacaagggctcctcccctcacctcccagtacaaggtcccattctcccctctcaggtcctgtcaaagagttgctgcagaacaactactcctcaggatataaccatggtaaacacatcaagctacaaggttcagttagaaggctaaacctcaaagagcatgtctgccaccctacattttacaaatgaggaaactgaagcccagcaaagagaagtgatttcccattaccacacaagtaatggagtacaggtaactctccttactccccaactcctctctctctcaacacttttcatgttcctctaaaggttttactttctgaatctttcatcatagtattctcacaggggaatttcatacatccttttcaagttagtgacaaatgtctcctcctctaggaagcattctctgagctaactcctcatgtcctcaccccaagctaaataggttcccttcctctgcattctgccttctgtatctcactgtatttgaattgccagtttgctcatctgtatcactcacaagattttaagctctacaaggggagggtacatatctgttttaatttccatagctaccactactgacccacactcaccaacttacccagacttcatagcaccccactaacaagtcccccaatctccagcctctcacctttagtcattaaacctacatcatcagaataattttaaaaccgtatctctgccatatatctacctaaaaactttaaatgacttaccctctttacagggtcaattctgaactaattctaagacagactgtcagtcaataaacatatattagccatatattctgtgcaaaaacattcaatgacatctaaaatgtagccccatctctctttaaatcctaattctccactatgctttaaaacaaaccttctactccactcacagtatttcctttctgctcaaatactccaagttgaggctcttgctcttaatttacagtgctaccaccatatttgtcacctttctgcaattatactggacaagatctgccccattctctcaagaccttgagagcttgtctggaggttctagcaggtaagcacagctactcatatacccttgaccgaagactggtcctcctctatcgaggatggtcgttctctttgactgagcacacagcattgggagggacrcacatggagtggtgagggaggaaggggacaaccacctagccagccagatcagcgaaatcaaccctggtgatcaatggggtgacagatatcacagccagatcaccctcacattcgccattctctcaagaaacagctgaagtactatctccttcatgaaactttgtctgcaactgtctatatccttttctctatttgccatggaaatataccacaaaccacatatgaaatttagaatttttaaagcctcattttaaaaaaagtaaaagggaataggtaatattaacttaaatactatatccaaaatattgtaatttaaacatgtaatcggtatttttaaaaatgcctgcaatcccagcacttcaggaggctgtggcgggtggatcacctgaggtcaggagttcgacaccagcctggccaacatggtgaaaccctttctctactaaaaacacaaaaattatccaggcgtggtagcgggcacctgtaataccagctattcaggaggatgaggcaggagaatcacttgaacccaggaggcggaggttgcagtgagccaagatcatgccattacattccagcctgggtgacaagagcgaaactccatctcaaaataaataaataaataacgagatatgttactcttgttttggtactaagtctttgaaatccaatgcatattttatacttaaagtacatatcaactcaggctcatgaattttcaagcagtcaacagccaaacgtggctactggctaacactggatggcacggcttagagtggtcatcttctacacactctagaacttgtttatatattgcgtcattgtggtcatttcatgtattatcttcttgactacatcacacaatcctcaacttaagggacaaggctgcatgtttttttcttcccagggtgcctaacaaaaagtgttcagtagcctgaaaccttcaaattcatataatgttttatacattagttttcttcaacatcattgtttggtagaaaataagaaagaatttctgctgtcacatataaaggttgtgagctctattataatcttaaaatataaaaagcaggccgcgtgcagtggctcatgcctgtaatcccagcactctggaaggctgaggcaggcagatcacaaggtcaggagatcaagaccatcctggctaacatggtgaaaccctgtctctactgaaaatacaaaaaaatttgccaggcgtggtggcgggcacctgtagtcccagctactcaggaggctaaggcaggagaatggtgtgaacttgggaggtggagcttgcagtgagctgagatcgcaccaccacactccagcctgggcaacagagcaagactctgtctcaaaaataaataaatacataaataaaaatataaaaaataaaaagcaaaggaagcttcccaaagtcacccaggtaaaggacctcagaattccaatgtagtctgatctactaattgtctgctgtcctattacctaacagtgtttctcaaatcatcactgaagacgatcactgagactggagtcagttgctcatcaagctacaaggttcagttagaaggctaaatttcaggaaaacagccagctagctgagtatccatcaccctaggaactgaaagaattgatggagatgtgctgcctgccaaggctgacatgccccatccttccagagctgtctgtagagtggaatgtaataccttccaacactgtccatatgaccagaacaactttcatcctaactagcgtcacttctggctgatacaccatgcccacataacaccattctcctccttcaaatcaaatgttgtaaagctaattattcctaaagaagcaaaaggtacagaaaacagaagagtcttaagatcaaaaaaattagtgtttctaatattgcagaaatctctccttaaccgcaagatctccttatatgaaattcaagtatacacacagatttccatttaaatatctctccctcaactgctgaaaactgcagtttccagtagacacagattttgagtttaaagaaaaggaacacgaaggtaggatgagaagaaggaaatgaagcagaaagtagagcaggaaaaatagtttcatgaaacgcagtcttggggaagaaaaaggaagctgaggcaaggatctaccttaggcttgtgttgtgggaggggaacaaggacatgcctaagagggactaaggaagcgagtgagagtgctaatgtgctaataatcaccactgatgggactaaggttctataaccctcacggtgggaaggaatgagaaatacctattgagtgatggcatgctgagtacctgggagaaggtcgcctaaagcctcttctgtctctagctttgttactatgtacctctgggactgtgatgagaccccaaaggaaatacaaaatggagatcagagaggttaagaactctgagtcctaagatcagaaatgtactattaagatggaaggtcaaataccaaaaaaaaaaaaaaaaaaaaagcacctcacagtttacatgttattttcgataaaagtacatgtatttcccaaaaaaaaaaaaaaacataaaaatgtccaagttatctcactgaaaagtttctagcaagtaaggaatagaaactagaaataatccaacattcattatcctattttaagatatctaaatgtgtaattttctctttatttagagagctgcccttactattttattttggtgatatctacataaaaaatatttacaaagactttaggctgggtgcagtggctcatgcctgtaatcccagcactttaataggctcactcaagactctgatccccaaccccattttaaaaattgattgtttttgttcctcaatagaaccttttaccatagaggttagcagaaacacaacacaaaagattaggaagggaatactatacatgccaagttcacaaaagaattaactacatttgtatattgtgttccacaaataaaaaccctgtctcataatttgcttcctttatattttcaacttaccaatggcctggctgaattacctttgtaactagcaagtaaaatttttttaggctaaatgtctgtatgggaacagaaaacatggtatgattcgtaagatatccaaaccaattgtgaggcaaaagataaaaaaactaaaaaaagattttagttgaaaatctatcattgagaaaatactaaagatttaaactatccatgttgttcatcaaaatttttttcatttagatctacaccagagttgtaaattcttttatttcaaaaaggtacaataaatttttttaaagctgtatttctaaaaacaacaggataaaaatrcacagacaatgagttcatttcaagacatttccagtgctgacatgtaattcaccctgcaaccataactgcaaagtaaagctataacagaggttgcaaaaaatatcactagattttgctatatttaagaggaaaacatttactaaacaataagggtattaattttaagcttcattttgatctctcaaaggaacagaagaagctasaaataatggttacctccaggacaggggactaatatgggccaagggttaagggaaacttacttttcatttttgtaaataccctttagaattttataaaatttatatgtgtctatatgagatattaaaaaagcttctttttaatatacatgtttaaataataaccttttttcttagaattgtatgtactgtatttctaagtaacactggagatttagcatctttcagcaaaaccactgaaattctaaataattttttaaaaaaattgttagcaccagtagaagagaaataattattgcttctacttcaaataagatgccctattcctatttccattatgacttctgcaaatttataccataatttaaaagtaacaatgtctgtttcaggtgccacattaataaggtttattattattagagagtatagaatccacatacgaatagctctcattaaaaaaaaaaaagagagaaatacagttggccctccgtatccctcggttctgcatctgtgtgttcaagcaagtgtggactgaaaacattccccttaaaaactgcatctgggccaggcacagtggctcacgcctgtaatcccagcactttgggaggccgaggcaggcggatcacgaggtcaggagaccaagaccatcctgcctaacatggtgacaccccgtctctgctaaaaaaatacaaaaaaaattagccgggcgtggtggcgggcgcctgtaatcccagctactgaggaggctgaggcaggagaatggcataaacccaggaggcggagcttgcagtaagccgagattgcgccactgcactccagcctgggcaacagagcaagactccgtctcaaaaaaaaaaaaaaaaaaactgcatctatacttaacatgggcaaacttttcttcctgtcattattccttaaacaatgtaacttaacaactatttacacagcatttatattgcattaggtattataagtaatctagagataatttaaagtataaagaaagatatacataggttatatgcaaatattatgccattttatataagagtcttgagcatcctacgattttggtatctgcagggagtcctggaaccaatcccccaaggataccaagggacaaactgtacaaacaaaagaagagcaccaaaaccaaaccaaggggaaaaaatggtggaaaaaatgtctaacgttgaattcaactacatttactcagctacctatgtgcacctagcaccttcctataaagaaaacccctttccatctctctcaatacagttttcagtctaccatcagttaacacagaatatactaaaattgcaatcaaaacagataatacagtcttaaactatacggtttgttctaagaaaggactattcatgaatacaagtttaaaagcaagtagaaaatgtgtttctggaagtctgtttccccactattagcctattgctatctacttcagctgctgaaaagcaagtaaatctttgcttaagaaaaagctcaaaacaatcacttagtgttcctggttagttcagcctgaaaaaccaagtaacaccaaatcaacatgacaatcagttgtmttttaacaatccaattrcaaatcaagttaacagagctgatgacttctatgaacgtgcacaggatgggtgcagagataaaggcctaygtactctcaactcaggtggggagccagtcaagttacaactggagccagagagrcagagctccccggtagaagrcgcacagattgccaggaagatgcccagtgagattacagggaatgcaagaaggaaggagaaaaaaaatcaaggtaaggaaagggaagcagacagaagtggttccctttttggggagaggggtggtgtgcggaggagggcttaaagattcgagaaaacctactgacctgcaatgaccttatttatggctataaatatatataatatatataaaatataaaacagttgttttaacaagaaaacattactgtgactagacaaccagcaaacatctgtttctattgtagtttatgtaagccataagaggtctttctccctttctccctttccctccctctgtccctccctcctccctcctctctctctctctctctctctctctctctctctctctctctctctccctctctctctctctctctctctctctctctcgctccctctctgtttctttccttctttttctttggatacagggtctcactctgtttcccaggctggagtgcagtggcacaatcatagctcactccagcctccatctcctgagttcaggccatctcctgtctcagctacagaaggaacttggactacaggcgtgtgccaccatacctctctaactttttaaatttcttgtcttactatgttgcaaaggctggtctcaaactcctgggttcaagtgatccatttgcctcaatctccaaaagtgctagtattacaggcatgagccactgcacctggcctaggagtggcttctattttttaaatttaaaaatttttttttttttttgagacggagtctcgctctgtcgcccaggctggagggcagtggcataatctccgctcactgcaagctctgcctcccgggttcacaccattctcctgcctcagcctcccgagtagctgggactacagccgcccgccaccacgcccagctaatttctttttttgtatttttggtagagaaggggtttcaccgtgttagccaggatggtctccatctcctgacctcgtgatccgcccacctcggcctcccaaagtgctgggattacaggcatgagccaccgcacccagcctatttatttatttttgagacaaagtcttgctctgtcacccaggctgcaatacagtggcactatctcagctcactgaaacctcctcctcctgagtagctgggaccacaggtgcccaccaccatgtccagctaatttttaaattttttgtagagataaagtctcactatattttccaggctgttttcaaactcctggcttcaagcaatcctcctgcctcagctttccaaagttctgggattatagtcatgagccactgcacccagcttcccaagggttttttttaaatctgtgttctatagttcgattttattgataagtttgacaaaagtctgtctgcaacatgtgatattatgagacagagatatacatagataaatatatataggttttcatccatggtccctggctcataacgccatagcccttgttataatgttggggtgctttaggcctcagaagcaggtctcagaaaacagaatctcagccaggtgcagtggctcacacctgtaatcccagcactttgggaggccgaggtgggcagatcacttgaggtcaggagtttgagaccagcctggccaacacggcgaaactcggtctctactaaaaaatacaaaaattagccgggtatggtggcatacaccygtaaccccagctacttgggaggctgaggtaggagaatcgcttgaacccaggaggcagaggttgcagtgagccaagatcatgccattgcactccagcctgggcgacagagcgggattccatctcaaacaaacaaacaaacaaacaaacaaataaatcaatgaaaaaagaaaacaaatctctctctctctctctgaccttctgcccttttttcgcctgctcctttttctccccaaggcaggccgtagaaactaaaaatataatctcatctcccccaacctttctatcttggagctggccataaagaaattctctgaccttccttgtctaattgaaggccacaagaccttcatttcagaaggggtcctcccccataccctggaggaaggaaagctacacagagagaccaagaagaatctgaacagacaatccttgctggattttcccactcagtctattaatattagatcatacccttttttgtctaatcacatttctacatggttgtctgtactttaatcatgactatccaataaagtctccataagagacggaagaggacagggtttgaggagctcccagagagctgaacatgtagaggcttaaaggaaggttaatgagaactcattcatgtaccaggagggcagtgcaccccaactccatgaggatagaagttcctcgccctgtgtctctcttcatctgtctatttgtatcctttaaaatatattctgtaataaatcagtaaacatgtcaccctaagttctgtgagccactctagcaaagtaattgaacccaaagacggggtcacggagaacccaacttgaagctggtccatcagaagttccagaggcccagatttgcaactggtaggaaggaggaggaccgtcttgtgggactgagccctcaaactgtgcgatctgacactctgtgggatctgacactgtctccaggtagatagtgttggaattgaactrgaggatacccagctggtgtccactgcagaactgattgcttacttggtgtgtggggagaaacctccacacatttggtcaccagaaatcttctgtgttgattgttattgtggtgtgagagcagagaaaaaaacagtttgtgtgttgtttccactgacatactattaaaatgatatctaattatgttgttaatttttcttcagattttgcttcaaaatttacttggatcatttttcttttacttaataatatgctatttgttaaaaattaggtatataaataagctttgtctgtactacactgggggccctcaaggccaatatttactaattatagcaatgactcaagcacatttatctaaacgaataccattctacaaagtaatcttcttaaaaatgaaagatacaggctggatgtggtggctcatacctgtaatcctaacacttgtaggtggatggactgcttgagcccaggagtttgagaccagcctaagcagcaaagtgagaccctgtctctacaaaaaaaaaaaaaaaaaaaaaaaaattagccaggtgtggtggcatacacccgtagtcccagctactcaggaggctgaggtgggaggatcacttcagcatggaggtcatgggtatggtgagctatgatcgtgccactgcactccagcctgagtgacagagtgagaccctgtctcaaaataaataaataaattttttaaaataagtaaaaaatacatttattccaaagatgatgtcaatattccaagcttttcataatttatctttagagaagaaatatgaagtttatgggacatggaaaggaagaaccaacctgattactttacaatcatatatatatatatatatatatatatatatatatagacacacacatatatgtatatatatatttaaatatattatttataaatattattttaaattatatttaaattacatttaaattatattatattataattatatttaaattattatttaattatatattttatactataaaatatattatataaaatatattattaaaatatatattattaaaatatatattttatatattatataaaatatagaaaaatatataacatataaaatatattatatattataaaatatattataaaatataattatattataattattatatttaataattaaattaaattaaaattatatttaaattataaatataatttatttattttatatattatatattattatattatatatttatatatttatatttatatatatttataaataataatatattatatttatattatatatttatatatttatatttctatgtatacatagaaatatatttatatatttctatgtatacatagaaatatatttatatatttctatttatatatatttatatagaaatatatttatatagaaatatttatatatttatatagaaatatatttctatataaatatatttatatatagaaatatatttctatataaatatatttatatatatttctatatatttctatatatttatatatttatatatatatttatatatatttatatatatatttataaatatacttttatatatttatatatatatttataaatatatttttatatatttatatatatatttataaatatatttttatatatttatatatatttatatatttttatttttattttattttatttatatatttatatttttaaatatatttatatatttttatatttatatttataaatatattttatatatttttatatttatatttataaatatattttatatatttttatatttatatttataaatatattttatatatttttatatttatatttataaatatattttatatatttttatatttatatttataaatatatttatatatatttttatatttatatatttatatatatttatatttatatttgtatatataaaaaacaataataggccgggcatggtggctcacgcctgtactcccagcactttgggaggccgaggtgggtggatcacaaggtcaggagttcgagaccagcctggctaacatggtgaaaccccgtctctactaaaaatataaaaaattagccaggtgtggtggcaggcacctgtaatcccagctactcgggaggctgaggcaggagaatggcgtgaacccaggaggtgaagkttgcagtgagccgagatggccccactgtgctccagcctgggtgatagagcaagactccgcctcagaaamaataaataaatgaaaataaaaataataataaaaaattaactctcaaaggtatgagaccatgttttccttaaaagttttctccctcagctccagcgttgccccaaaggggttcttatctctgatttctggtcctctgcttttcttgttcctctcatcatctaccatagccattccccaagactgtcaatggctcttttctcctctttttccaagcttcaactaccaaattccttactgacaaccccaaattttcccaggaatatcatctccagctgaacatacacccatcaaggacctcaaaaaaataaataaataaaacaaaaaaaaacttttcgtgttcaaaactgcatcactgcataaacagctccttcttgtggcttttccatttcttttaaaacccacttctattaaaaaccattatttaaaaaaatcaaaaccactactatacatctggtcaactgtagttgacatctgagacatttctgaatctgtcctttcccgtcctcctcccacccaatcatgggtcaaggctcataccttgacccacmatttccctcttgtccatcttcactgtctctagtccctattacctcttatcggggctattgcaatggtttctgttatcttcccaatccactctagccagcacatctgctatgtcgccccagctggagtacagggtgagatatcggctcactgcaacctccgcctcccaggttcaagtgattctcctgcctcagctcccaagtagctgggactacaggtgcgtgccaccacacccagctaatttttatatttttagtagagacagggttttgccacgttggccacactagtcttgaactcctgacctcagatgatccactcacytcagcctcccaaagtgctgggattacaggtgtgaggcaccgcacctggcaagtaactttctaaagtgcaattctgatcacaactcatcattctctgaaaacctggggggcccctggcatacacctaatttgtgtggcaatcaaagctttctatgcattaaccccaatctatttctgtagctttatcaccagcaataactctctctcatacacacacaggaacacatatgtgtatgttctacactccaatcaaagtaagttacacagaagtccccataaatacctgattcattcccatctcttgcagtagatcagtgttccctagggataacagcaatcaataactatccattaaataaataaattaggctgggcgtggtcgctcatgcccataatcccagcactttgggtgaccgaggcaggtggatcacttgaggtcaggagtttgagaccagcctggccaacatggtgaaaccctgtctccactaaaaatacaaaaattagcgagacatggtggtgcacatctgtagtcccagctacttgggaagctgaagcagaagaatctcttgaaccagggaggtggaggttgccactgtactcaaccctgggcaacagagcaagactccgtctcaaaaaactaagtaattaattaattaatagaatgggcttaatcttcccccattcctacataatcacatcctaacttccttcggagttcatttcaaagaagcttttttcataaagcaatcacaccagtgagaagaaatcgcttcttcctttaaaatctcatggctccatatcttctgtcacactcagtatctttaacccaatatttctgtttgttaccttcaccaccagactttatgttttttaaggatcagtaattgtctgagtaatataatctctatctggagagagagagtgtgccttctttaatggtcatttagccttttaatttgcctaccaaagtttaaactctttgaaggcaaagattcatatttgtttcttttttctctgcctttcaccaccatatcccttatctagtgaatatatccattctctgtgtcaaaagttgtgaagataactcaaaaaggcaagtatcaaaaatattttagaatacccatatagctttccaaagcaatacattttaaccatcattttggatacataattattagtctgctgtttaacaaatcaattatttgacatttcctccaaggagatattaactcttaagagcctaaaaatactaatcttctgactaaattagcatggtaccttacacatagtagacttacagaaggttactgtatgagtgaatgaatcaatcaacaaattaaggcaaaaactctactcccagccaacagaacacagaactagggtcaaacacaaaaggagacctaaataaaaatgtttaaatattttcaattmtacgaacactggcaagatgaacagaactgaaccaatcccaaagtctcatacagacaagagagagacaaaatacaattgcacagttgcattatcaacatactgtgggtgaaatctatgaactgggatttaacatttcctgccaagacgcttttcctataagcagccataaagacaattttgaataaagtatcatcaaagtaatccaaaaaatctcatttatgccgtcaattggaagagaagaaaatgaagaaaccattggctttaaagtgtgaaaataggccaggcatggtggctcacgcctataatcccaatgctttgggaggccaaggcgggtggatcacctgaggtcaggagtttgagatgagcccagccaacatggtgaaaccccatctctactaaaaatacaaaaattagccaggtgtggtagtgggyacctgtaatcccagctatttgggaggctgaggcaggagaatcgcttgaacccaggaagcagaggttgcagtgagccaagatcgcaccactgcactccagcctgggtgataragcgacactccgtctcaaaaaaataaaaaatacaacagtaatagtaataaagtgtgaaaataggatgggtgcagtggctcgtgcctgtaatcccagcattttgagaggctgaggcaggcatatagtctgagctcaggaattcaagaccagcctgggcaaatggcaaaactccatctctacataagtacaaacattagctgggcatagtggcctgtgcctgtagtcccatctacgtgggagtctgaagtgggaggactgcttgagcccaggaggttgaggctgcattgagccatgatcgcgccaccgcattccagcctgggcgacaaaaagaccttgtctccaaaaaaagagaaaaagaattataaagagttgtctggacaaggtggctcatatctgaataccagcactttagaaggccaaggcgggcggatgtctttgagctcaggagttcaacaccagcctggacaacatgacaaaaccctatgtctacaaaaaaatacaaaaatgaactgagcatggtggctcatgcctgtgagcctagctacttgggaggtggaggctggaggatcgcttgagccaggaagtggaggttgcagtgagccaagatagtgcaactgcactccagcctgggtgacacagcaagaccctgtctctctctctctctctctctcacacacacacacacacacacagaagtgtgaaaatcttggttctagattagctactacttacaactgtgactttggacaaatcactaaacatatcattgcagttgctcacacctgtaatcctagcacttctggaggccaagttgggcaaattgcctgagctcaggagttcgagaccagcctgggcaatacaatgaaaccccgtctctactaaaacatacacacaaaaaaattagtcaggcatggcagcgggcacctgtagtcccagcactttgcagggccaaggcgggcagatcacgaggtcaggagtttgagaccaccctggccaatatggtgaaaccccatctctactaaaaatacaaaaattagccaggcttggtggcacgtgtctgtagtcccagctactcagaaggctgaggcaggagaatcgcttgaacccgggaggcagaggttgcagtgagccgagatcacaccactgcactctagcctgggtgacagagcgcaactccggctcaaaaaaaaaaaaaaaaattaagaggtcatctgggaatatctggaaaaaaagaataaaattttcttctcctcttaagatctttaaaagagaaatgatggttgaaagcaaaaaatttaatattgtctgatggggatttcaatgtatgtagattaataaatatgacaattacaacataaagcagtgagagtaaagggacctatatggtgataagttttctacattctccttaaagtggtaaaatattaactctaagtacactatgaaaagttagggatggatattctaactcctagagcaagtactaaaaaaacctacatgaagaaatatagtaaaaaactctattaaaatgaaatattggccaggcacagtgggtcacacttgtaatcctagcacttcatgaaaccaaggagggcagatcacctgagctcaggagttcaagaccagcctggccaacatggtgaaaccccgtttctactaaaaatacaaaaattagctaggtgtggtgacgcacacctgcaatcccagctacttgggaggctgaggcacgagaatctctagaacctaggagacagacgttgcagtgagccgagatcacaccaccgcactccagcctgggcaacagggcaagactgtgtctcagaaaaaaaaaaaacaaaaaactaaagcatattcaaataatcccaaagatggaagaaaaagagaggaaaaaaaaaaagcagaaaccaaattataataaaatggtagccctaaatcaaaccatatcaataattacattaaatgtaaatggcctaaatataccaattaaaagacagagattgtcagaatgaataaaaaaaaagacccagctacatctatttattaaaaacttactttaaataaaatggcataggtaagttaaaagtaaaaataaaagtaaaatgtagacctactcataactcccccgaactggaaataacacaaattctcacagatgcatggctaaaaactaccatacatccatgcaatagaatattacttagcaatttaaaaaattattggtacacacaacaaaatggattaatctctaaggcattatgctgggtaaaagaaatcagtttcaacagttacaaactatatgactccatttacatggcacttcggaaaaggtaaaactatagcaattaggaaagatcaatggttgccgacagttggggtggaggcagggcaacatcagggagttttttaggatgatggaactgaggaagccatggttgtggtgatagttatataaatctatacatatgttgaaatttatagaactgtacaccaaaagtcaattttactgtatgttaatatttaaaaatgaagtaaaataaaaattacgtggatgatctccatggacccttccagactatgattctatcagtgagaaaaagaaaggagaggcaaaaggaagacaaggagaatgttaagtcctactggcataaaagccactactcagaagaacggsattactgtacaaaaatatacaaaacaaacccaatcttcagaatttattcccagaaggggctaagaaaaccggacattcggatctaaaatatgtatatttttaaatgcctatgaatagcttttcttgtctgtttctatatttttttactttgaagaagctgccaatttctgctggcttaatgccaatttcgctgcttggggttactcaatttacaagcatccctttatttataccctatactctagggtctccggcagtcacaataacgactctgaaaaagcagtcgcttttgcagggtgccagaaagatcagcgctcctcacccggaactaaggtccctgtgggacacagtacaccccgtccactagttccaaacttaaaagacgctgggcggaaggtcttcccaagtcaaaaagcctcccaaaggagaaggaccctggaggccgggcttcggggcatttctgcgtctccggactgccctgtcgcctccggggcagctagccgttttgaggactgtcctggtgtggggctgtgggctgcagaaggttctgcccagcgaccttgggcaagtcccttcctctcctggagtaagaggaaaattctgggaaggctgtgtaagggagcttcccattgccgcctcagaatccactttctgccccccgctctccaacgccaagaaggaatcacacttggccctccagacttcaccccagccttatgcccgccacccttcccagtccctgggagacccgcgggaactaacacatccaaccgagggcatggcccgaaggcaagggggaggcagtaaacaccaaatcccggtctcagacccactccgccccaagcgggcctaccgggcgcattccgacccgccccgccctgcggtcacggcccgccaggtcccgcttccacccaagggaagtacagagcgcgccggggagggtcgggtggggggccgggtcaggaggcgcccaccttgagctgggacttggagaccttgccgctgtggtcctggtcgagtgcggtgaaggcgtgccagatggctttgagcagctcctccttcaagctccccatggccgcggccctgctgccccgccaasccctcctgcccagccagcccctccgcgcctcggacgcccctcaacctccgcagccacagcccgccgcgcagtcacctgacccgccaggccccgcccccgccaggccccgccctgctgccggcgccggtccggtgccgcgcccacagccgccagagtgtgggttctgcgagtcaagccacgcctggtggcaagaatgcttggccttcagtgtcagccaggacggtaaacacatctccctaatgtttcccagaccagttcgggccattttgggtgctcgagtacaacacctcacacaaatgaccgcgtcttgaggaaaaacccgagagattaggtgagcagcctacccgcctcctcccagcgccccgcagtgaaaaagggatccctggtcctgtcctgggaacggagtcactgtctgagaaggccagagaagaccccgaaaagtccccagaccaggactgaaatgatagcgcagtcccaagtcggggagatgcagggcggcggggaggcaggaaggacctcgagggaagtttgttggttcatttcgcaaaagtttattcatgcatactctatcttgggttctagggacacagcgacgacgtttaaggggagtttagaagtcagggtcaggcagcattttcttcctaacgcctagctgttgttcaattcacatcttaggaggggtttgacctgggtaatacctctctgtagtgtttctctgcttgcagaataggagatctgggccaattccaaatcactccacccattttactaatccaaagagatggaccatttaaaagaacgtattcggccaggcgtggtggctcacgcctgtaatcccagccctttgggaggccaaggcgggcggatcacctgaggtcgggggttcgagaccagcctgaccaacatgaagaaaccccgtctctactaaaaatacaaaattagccgggcgtggtggcacatgcctgtaatctcagctactcgggaggctgaggcaggagaatcgcttgaacccggtaggcggaggttgcagtgaaccaagatcgcgccattgcactccagcctgggcaacaagagtgaaactccgtctcaaaaaaaaaaaaaaaagtattcgattgcagctgttgaattaatatctgttcgcggtggtcacaatggtcacttgatctctttgggcttcaaattatcccgtataaaaagagcagggttgcaccagatgttctggaagggttcttgcagtactagcatcctaggataataactattgccggttaactaaggtctgattaaatcgccaggctcagtacctctcctctccaatcctggactaattggagagaacaataaacaccaagagtttttaaaatgaggtggttctcagatgaagtttggttttgttttgcttttttaagttccttaatgcacatgtttgccttattaagaaaggaaaagatcttcataagaaagggatatttggaaagagaagaacaagaaggagcctcttcagtgagtttgagatcaaaaaggaactggtggggaagaggagaggatggccccactgacgaaagaaggggcaggagcaaaagggtggccagcccctcactgtgactgtcctgaaggttctaccccatttcatcaccatttgtcaggacttttcttgccctaccagaatccaatttctatcatttatcttccccatttccagcccaagtctgccagtcagcaaaaccacatggtttaacctctgatttattcatgcgaagtcagcttaccctgagtagcaaaaaaaaaaaaaaaagaagaagaagaaaaaagaaacgaagaaaacctcctaattctcaaggttcagtttaaccactatatgacccttcttctctctcagtatctggaagtaccaaacatatttcaaagccttttttttatgacaagaccaggacattgtggacttccaaattcctacttctcccatcatcctcattcatacaatccaaacgcattttttttctttttttttcttttcttttttttttgagacagagtctcactctgttgcccaggctggagtgcaacggtatgatctcagctcactgcaacctccgcctcccgggttcaagcgattctcctgcctcaacctcccaagtagctgggattacaggcgccagccaccacgcccggctaatttttttatttttagtagagatggggtttcgccatgttggccaggttggtctcaaactcccagcctcaagtgagctgccctccttggcctcccaaagtgctgggattacaggcgtgagccaccatgcccttcctatccaaacaaattttaaagtagcatgatgtcatagaaagcgctgtgcttttcctgggtgcagtggctcctgcctgtaatcccaacactttgagagactggggtgggaggattgcttgaggccaggagttcaagaccagcctgggcaatgtagcaaaaccccgtctccacaaaaaaattgaaaataagaaagaaagaaaagtaaagagttgtgcttcagaatctaacagattatattaatctaatgctgtgtaaccaattaacccaaaatttagcagcttaaaactatagtaaacattatttcatattttctgtaagtcaggaatttagaagccacttagctctatagttctggcttgaagtgtctcaggaggttgcagtaaaatatagggctgtagtcatttgaaggctaggctgatgctggaaaatctatttccaaggtggttcactcacatggatgggtcgtttacagaaggcctcagttcctctgtatatgggcctgtcctcaggctgcttgagtatccttacaacacgtcagctggctttcaattgattcaagaaagagaaagatggaagttgcaatgtctcttacgatccaccatcaaaagtcattcaccatcatttctgcaatgctctactgattgctcaggtcaaatctatttgatttgggagggaaactacaaaaggatatgagtaccaatgggcaagaatcatgggggtcatcttggaagatggctaccacacagatgtcgggaagaatccgggcttccccattgactcatctatgagtaaatataaggcttcatttcctcatatgtaaaatgagaatgctaatatttattttgcaacacttcttttttctttttttaatttttttttttttttttacagcccagaggtcctttatttttttttttaacacctattatgccatgaattcataggaaataggttccagcagctcaggctgcttcccgttggttctcacaaagtgtgcttctctgggtggagcaggctggcgctttagttgaacccaggtacctttctctttggcgtctttctttttctgatcattttccttcacgtgtttcaggaagctatctcggctcttagagtgcttaatgtgctcaatacgcaccttaattctcttggcaagaatcttgcccttaacttgtttgtttacaacaatgccaacagcatgctgggtaacattgtagactcttccagttttgccatggtaacacttgtggggcattcctttttgagcagtacccattcccttgatgtctacaatatcagctttcttatagattcgcatatatgtggccaaaggaacaactccatgttttctaaaaggcctagagaacatatatcgggtgcctctcctctttccctttgtgttcgtcattttggcgaattactggaagatggcggttccggccgaaaggaaactttttttttttttttttgagacgaagtcttgctgtcacccaggctggagcgcagtggcttgatcttggctcactgcaatctctggcacctgggtttaagcaattctcctgcctcagcctctgaaatagctgggattacaagcgcgtgccaccatgcccagctaatttttgtatatttagtagagatggggtttcagcatcttggccaggctggtcttgaactcctgacctcgtgatccaccctgcctcggcctctcaaagtgctgggattacaggcgtcagccaccgcacccggcctctttttttaatttttatttttttgatgaggtctttccagatgagatctattttgcaagactggtatgaagtttaaatgagagggtagtatgtataagacacagcatcagcatcatggtatctgacagtcactgatgtttgtactgtgtcaattaggtaagttgaaatctagttcctcaaatgtccgttcccaatgtggatccaggataggattcactacagaagaatttcgtgtaagtttggaaggagcaggtaagatttatgtaagatttggaagcagcagcccttgtgttctgaaggttgatgtaaatatcacatgccgctgcagatcatagagtggttactgatctgctaacatactttgttggtacagagcattaactggcccacagctccttcaactcccaccaaattttctatttcagtgtctccaagccttggcgcaaggcacgtgtagttccatggtaaaggcattagcttatgctacatatcgcatgctcgtcaatgtgaaagatagctgtgagttccattttgtcttcgtgggttccagtttgtcctgtggattctagtttgtcctcactctccctcaatgcaatccaacttttcttcctgattgctagccctgatgacctatcataaacttcaggcccattgctggatgcagagggaacagccttccatgtactcattcgtcagctttcctttgtgatctctggttagtgacttttctgattgtccagccatctcctttcagaccttttcttccctagcttctcctgcaactgtattgtatccaattctcagaataaagcctgtattccatagtggtggccacttccctgatcagcccataactgataataaaactggtgaagttagacactgcaacaatgaaaagcatgtgttggccgggcgcggtggctcacgcctgtaatcccagcactttgggaggctgaggcaggtggatcacgaggtcaggagatcaagaccatcctggctaacatggtgaaacactgtctctactaaatatacaaaaaattagccgggtgtggtggcgggcgcctgtagtcccagctactcgggaggctgaggcaggagaatggcgtgaacctgagaggcggagcttgccgtgagcggagatcgcaccactgcactccagcctgggtgacagagcgagactctgtctcaaaaaaaaaaaagaaagaaaaacatgtgtcatcggctttggacaggggtgggcggaagccaaaaggacctcaagagaagtcttgaaggacagtgagggaattgctattgaaggtcggtgctttgagttgacttgtgtccccaccaaaattcatattgaaattctaactcccagtacctcagaatgtgatcttatttgctcttgtttttgggtttttttagcgacaggatctcactcagtcacccaggcgggggtagagtggtacaatcatagctcgctgtaaccttgaactcctgtgctcaagtgatcctcctgcctccgcctcccaagtacataggattataggcacataccaccatgcccagctaatttttttactttttttgtagagacagggtcttgggctatgttgtccacactggtctcaaactcctggcctcaaaggatcctcccacttcagccttcccaagcactgggattacaggcatgagccactgcacccagccagaatgtaatcatatttgaagatagggtctttatagaggtagttcacttaaaatgatgtcattaggttgggtcctaatccattatgactggcgtccaaattttggacacaaacatgcacacagaaagaacaccatgccagcctgaagacagagatcagagtgatggatctacaagccaaagaatgccagacattgctgccagcaagcaaaccacgagaatctaggagagaaacatgggacagattattgctcacagctcttaggcaggatcaacccaaccaacaccttgatcttggacatctagtccagaactgtgagattgcc

SEQ ID NO: 97790 - DNA, 36510 bp, Homo sapiens
  misc_feature (1)...(36510): n = A,T,C or G
ggctacagcgtctgcatcttcacctatggccagacaggcaccgggaagacctacagcatggaggtgggacagagctcacgccccagtgggagaggccccaggggccctgcatgacttggatgtgagcccggtgtgcaccccaccccatcctcagggccctcctgaggaccccggcatagttcctagggcgctgcagtcgctgttccgggagatgggggccggccggcagcaccgggtgacactcagcatggtggagatctacaatgaggctgtcaggtgggctactccaccagggaggccttctccccacccctggcccagggcccttccggatttccagagaattctggaaccaagaccttcccctttctcaccagggacctccttgctccagggcctcccgagcgcctggccgtgaggcagggcccagaaggccagggcgggatccaggtggctggcctcacccactgggacgtgcccaacctggagacattgcaccaggtagggctgcaccgctctccgagaccccgccccgtgcttccacttgggggcggggaccctgcacctgaccagcccttcgccccgccttccagatgctgaaactggggaggagcaaccgggccaccgccgccaccgccatgaaccagcgcagctcccgctcgcatgccctggtcacgctgacgctgcgcgcggcgtctccaccgcgcgctccaggcaccgcaggtaccacggccggtgcctgagccctgcggagtctccagagcacccgaggcccggccttcccccatgtcgggctcgctcgcccctctaggcacgctgcacctggtggacctggcgggatccgaacgcgcacggaaggcaggggcggccggcccgccgcggggagacccagacggcgcccggcgcctgcgggaggcccagaccataaaccgctcgctgctggcgctaggaggcgtgatggccgcactgcgggcccaccggccgcacgtgcccttccgcgactcgcagctcacgcgactgctgcagccggcgctgggcccaggcaccaccgcggtgctgctgctgcaggtgggcgccggggcggggcaggtgtgtgcgtgccggtcgccgcccacccgggcccgcccacccgcgcctcttgcccgcagatctccacgcggccggaggatctcggggagacagtctgctccctcaagttcgccgaccgagtgggtcaagtggagctggggccagcccggcgccgcagggtcccgcgctcctccgggacgccttcttccctcagcaccgacactccgctcaccgggaccccctgcacccctacgccgtcccctggcagtcctccatgccccagtcccgacaacggctcgggctcggctctcgcgcccgcagagggcctgcccctctagtcctgggtcgcggccctgcccatggggtctcaggccaggtctctgctggcagaggcggtagtaaagtccctgtaccccgtctcccagggcacaagctccctagcctctttggatccattgcccctgagctcccagagtcacccctccacctccgcagccagtgaagtgtgttgtgcctgctgaagtgatcaccccccgcccccagccctgcatcaggccacaggtcttggctttctccttatcaccatttgctgttatcacggcacacagcagggaatcccaggcccccccgccaagtggttacccaagtcaccactcctgacccaaaaatcaggcatggcattaaaacgttgcaaattcctttactgttatcccccccaccaccaggaccatgtagggtgcagtctttactccctaacccgtttcccgaaaaaggtgctacctcctttccagacagatgagagagggcaggacttcaggctggatccaccactgggctctccctcccccagcctggagcacgggaggggaggtgacggctggtgactgatggatgggtagtgggctgagaagaggggactaggaagggctattccaggctcagccctgctcctgcagctttgccgctgagtgtaggaaaaacaggcatgacagaccagggtgagggttgtgcccagctgggccacggccatgcgtggggtggcccaataaacaccgtggactcccagcaaggctgctgcctggtgtttcgaggctgctgtggtcgcagacagccgcctcgccttggctccctgtcaacaaggtgggggtgggagcgggagggaggagcggcccctgtcttaagagcctcacaggctgcaccaggagagcagccagcctgggccaggggccgccaggtcccgagggtggctgacccaaacgtcgtagatgcttttgttgggtggcaccccttggaagagggcgtctagatcgcagagcagccctgggggccctcgggtttcaggggccaccccccagtaggcagggctggttgacggacactggggacaggaggtgggtggtggtgccaagggcattaccacattgggagtgtagataggcaagtaggaggtgggcagctgcccccagagggaggccctgtgtcccccgctggaccgtcccccaggaactgcggtgccctgcagtaagtggagaggccaggccctaggctctggggagagggttgagggcccgatggctcccccctgcacagtctccccctccactctcgtggggccaggaagggggcagaggggccacagaggcctctcagaagagggaaggggtggggtgggcaccgcctcctccccactgttccctgtgcctgcaggaactgggctgctctgtggagctagccccggccagggtgccccctccccggaccctcctagcagggacttgatgctgaagccctcactgggtggtggcgggggactgggcggccggtatggccggccgtgcagcacgtaggggcccaggtccttggcgaaggctccacgcgcacctccgttctgccagcgccggcacagggcggtgttctgcagccggagcgcctcagctgggatcaggctcacgtcgaccgcccagaagttgcccttggcctggggctttgcagggtccttgggcacctgggtgtgggggtcagacatgggtggggctgcccaaccttggatgctcaggacttccgcgcgcgctccgcccccgggctccgaccctggcctgccccaccttgcggaagcatcggttggaggaaaggttgtggcgaatggagtctttccagccctcgtagtcttccctgaagaaggggaacacggcctggacctgacggatgatctgaaaccgccaggcggccggccggcgccgtgagcccagacggggagggggtagcgccctacccctcccccactaccgggctcaggggcgcgcggtgccggcccctgctgtccccgaagaaggacatttctgcgcggaagcgcggcagagagggcaaggggctcccggagaagggtcgtgccttgaggccctcagctctcaggactggtcccactggcatacctgggtgggctaggaaggggtgggggtcagggcttgaacctggaagtgggtggggaacgagtctggggaaagagagagtgggggccggggcccgctcacctgggccagcttcagtctgcgggagggagcggcctgaatcaccaaggcgatcatggccaagtaggtgtaggggggcttgtcatgtcgcaggtacctcttcttcctcctcttagggggctgggagggcgactctgcctctgggggccccaggcgggagccgctgcagggccccatgcgggacggtagacagcgtgggcaggggcctggccgggtggagggtgcagggcggtggggcagtgtagaaggcagggccgggacctgaggccgggctggggcaggcgggctggggcctttatcattcggatggaagggggaggggagggaagggaggaagaggctgtgggggaggggagcatgccgagggcttccacaattagcaggttttggttaatctggaagggaggggcagagagcattctagtgggggcttctcctgaggcctcagtctccacccctgagttgcctttgggtggccaggcccggcttcaaaggggctgcgatgacccatggctactttatcccgtcttccctggtcaggtttcaggaccccatttaacaaatgggggagtatttagcccatgccaagctcccaaggcgtggggcgctcctggagttcaagatctagcagctgctagtaggccctgaactatgggggctggatatccacccaggacatgatcaggtggagcttcctggaggagaaggccatgaagcccgcaccctaggaacaagagggggacacattgactcaactgatttcctgggagttgcttcaggagcccaggtggaccgctcacctcctcctccctagccatctctgctcctccacccaagcaaggctggtattgtgtatcctgccccaaagcccaggttctcctccctcacaaggggcaagtttgcccaagaggatagcagctctgggaattagcagcggtggttggtgctggcaccaggccaagggcccccagacacacgggggcccagggatatgcttttgcccttcactctgagaattcagcttttcttgtgcagcctccaccacgataacctcaaagggctgaaaatctgcagcatacggtggggtccagcacaccctgaggtgtggaggggagggacaggcagcaagtgtccaggaggaggaggcctgggccgcaaggggccttgtatgtggggtaccacactgctcctgccccccacacccccggtcgggtggtgccccttttccttctatctctgactctcccctcagacgccacgtggtttccctcaggactcctgccaccacctctctgctgtgttccctaggttatggctgcacaatcctgtgcctcatgaggctaatacttgtggccacttcaccccattcggtcagcaaggcgtcgttctttcctacaagtgtttgttgttgttgttgttttgagacaaggtctcactctgttgcccaggctggagtgcagtggtgcgatctgggccccgtgcagcctccacctcccccgctagggcgatcctcccgactcagcgtcccgggactacaggcgtgcgccacagagcccagctaatttcttaatttttggtagggaccgggcctgcctatgttgctcaggttggtctcccgggctcaagtgacccactggcctcggcctcctcccaaagtgctgggatcacagacgtgagccaccgggccgggcctttcccataattttttttttttttttgagacggagtctcactctgtcgcccaggctggagtgcagtggcgtgatctcggctcactgcaagctccgcttcccgggttcatgccattctcctgcctcagcctcccgagtagctgggactacaggcgcccaccaccacgcccggctaatttttttgtatttttagtggagacggggtttcatcaggttagctaggatggtctcgatttcctgacctcgtgatctgcccgcctcggcctcccaaagtgctgggattacaggcgtgagacaccgcgcccggtctcccgtaagttttaaggcacccccctctccactggcgcttccttggtggggcgctggaggctccccaagttctgaccgctcttctccgaccgcactgtcctgggcccgaaaccacccccaaagctgccacccattccgctggcgcccgtcccgttgcccgcgatgactcggttttgtccagcataaatcaatgaccaccgtcccgggagccttggagcactttgagccattcccgtcccacccacgccccaaggaggtcccagccgcggaggactcgcccggccgcccgcagctgtccgcgttggcccccacccccgaccgtccctccccaggccccgcccccgacatttcctcctcccaggctccgcccccggctcccacggggcaccgcggcttccggctatgggtaccgcgggccggaagtgtagcgttgccatggcgagggccgggygcggggcccgcccccgcagcgcctcagggagcgcggggcccactgacccgcggaagccagcggacccacttgtgcggcgrtcggcgcggggcgcraggtgaggcgcggactcccgggtcctgcggcgggagcggagcgagggagaggggccccggccagggasagcagtggcgggcccgggaaggaggggcactgggtcgacaccgagagaggaggccgggccggggaaggatgaggcagaggagagggaggaggccgggaagggcgggaggaggaggagaccgaagggagagaggaggctggcgacggaggaggccggggaggggccctcgggagacgcggctgccggcacgcgggcgcccagggcacaggtcccgccgggccgccttgggcgttgctggctgaggcccagggcagcaggtgccaacggtcaggaaaggcagggagccgaaggctgccggtgggcgcttcgcgttttgttccaaggcraaggtgtgtggattctccgcagcccgtcggtcaggtagacagctccggaattgtcttcattttcagatgaggaaatcgaggccgcagagaagggacttacccaaacttaagctttgtgtgggccttggagctaggctgaaggagaaagtggagtctcactggggcaagttccttcaactttcagggattcaaatgacctcacttgtagtgcggggcgtccggaccacccctcaggaattgggatcagggcaagaattactaactaagcaagcaccccgcctgggagggagcgtccaggactggtgtgggcccctgtctgtaccagagcggaggcccggggcacggtgggattaatttccatgggtgcagagaggggagccgtgtacggagtcattctaggcttaggggagacagagcaaagttagccttccccaaacctctgtgccttccttttcttcctggattcctacctgggggtggaggtggaggcgggggtaccgctgcctttctcaaagtgtgtctagtccagcagtgagccctcctgggcgtcttggcgccccagttgcttcctggacgtattggggtttctctgggagaagggtcttgcctgcagtaccctgggcctcctgaagaggcctctggttgcgctgcctgattcagggacccagagccacgactcgccgagaggagctccggcggcgtgcggctgggttgcctgaggggctgggggctgcctggtggacttgcacacatgctggctccatacctgtcactgtggtggacgctcagagctctacagggccagctgcctgcccctgccccaagtcccccgggctggggttgggatgggggtggctttagggggtccttccccctcctggtgctcgagctggatttcctccctgttggctggggccatccctcgtgtctctgattggcctgtcctggcctcatccctcacctgcttgggatgcacttggactcygctttgccccgagggttgcctgggctggcacctagcaagggggctcctcctgtatgactgtactttggggtctgtgttctagggattcttgaacctctggtctgaatgaacagccgattgatacagctctccactgcatgcagcttaggaacctcagtctcaggtgaccccacagactaccagcacccccagctccacccttgctcttccccgagcgtgtcctaaccctagcacttgtgccacatctatccattggccaaaatgagaactgggtggcagttccaggcccttctttcatgccgaggctctcctggcactggtgcacrcacacctaaagggaggccttttcatcagacttgctcagccaggagctcagagccttccatgtcacatcctgtgctgggacccctgtgccagaggctcagcagctgttcacttgttcagctcactgcacttactgagtgctgcctatgagtcaggaactggccaagttcttaggatgcaacagggaaacaaacagtaactggcatgtcaagaattaaaacaaggtgatgagataagagaatgacaaggtaaccacagaagatctctgaggaggttgcacttaagatgtgatccgagtcccacaaaggagcatgctgtcctaagatccggtggaagaactttccagacagaaggagcagctgatgaaggtggcggtgatgatgaagctggtagcaccaaataaatgtgctagaccaggggttggccagcttttactgtgaagggctaggcagcaaacattttaggctttgctgaccatgtggctttctgtttttttgtttgtttgagatggagtctcactctgtcgcccagactggagtgcsgttgcacaatctccactcactgcaacctctgcctcccgcgttcaaatgattttcctgcctcagcctccccagtagctgggattacaggcacatgctaccatgccagttaatttttatatctttttttttttttttgagacagagtcttgctctgtagccaggctgcagtgcagtggtgcaatctcagctcactgcaacctccgtctctcgaattcaagtgattctcctgcctcagcctcccaagtagctgggactacaggcgcatgccaccacggccagtaatttttgtacttttagtagagatgggatttcaccgtgttggccagaatggtctcgaactcctgacctcattatcctcctgccttggcctcccgaagtgcggggattacaggcgtgagccactgtgcccagcccatgctttgattttttacatcaaactttattgaggtgtaacttacagtaagatgcacctattttaatgggttttgtgtgatgggttttgtttaatgggttttgtttgatrggtttttttttttgacggagtctcatgctgtgtcgcccaggctggagtgcagtggcacgatcttggctcactgcaagctccgcctcctgggttcacaccattctcctgcctcagcctcccaagtagctgggactacaggcgcccaccaccacgcccggctaattttttgtatttttttagtagagtcggggtttcaccatgttagccaggatggtctcgatctcctgacctcgtgatccgcccgcctcggcctcccaaagtgctgggattacaggcgtgaccaccgcgcccggcctgtttgatgggttttgtgaacaacgtcataatccaaatataaaacatttccgttgcccccaaaagttctctcgtgctcctctgtggtaagcccttcctcacacccagcccaggcaatagtgatcgctttctattactgtaggtttggcgtccctttttaagaatttcacattggctgggcgtgggggctcacgcctgtaatcccagcactttgggaggcnnnnnnnnnnnnnnnnnnnnaggcgggtggatcatctgaggttgggagttcgagaccagcctgaccaccatggagaaaccctgtctctactaaaaatacaaaaagttagccaggcatggtggcgcatgcctgtaattccagctactcgggaggctgaggtaggagaatcccttgaacgtgggaggcggaggttgcggtgagccgagatcgcaccattgcactctagcctgggcaaaaagagcgaaactccatctcaaaaaataaaataatttcacatcaatggaatcatatggaatgaatacttttgtgtctgatttattttgccagatgacaatgttttagagattcaagtggttttgtgtatccgtagttgattccctttttcttttttcttttttgtttttttgagacagagtcttgctctgttgcccaggcgggagtgcagtggcacgatcttggctcaccgcatcctccgcctgccaggttcaagcaattctcctgcctcagccttctgagtagctgggactacaggcgcctgccaccatgccctgctaattttttgtatttttagtagagacagggtttcaccatgctggccaggctggtctcgaactcctgacctcgtgatccgcccgccttggcctcccaaagtgctgggattaccagtgtgagccactgtgcccggctgccgccgccgccgccgcctttttttttgagatggagtcttgccaagtgcagtggtgtcatctcggctcattgcagccttggcctcccgggttcaagcgattcttctgcctcagcctcccaagtagctgggactgtaggcatgtaccaccacacccagctaatttttgtatttttagtagagacggggtttctccatgttggccagactacctgaagtgatctgcctgcctcagcctcccaaagtgctgggattataggcatgagccaccgctcctggccagtttatagttttcttattttttattttatttttatttacttatttttgagatggagtcttgctctgttgctcaggctggagtgcagtggcacaatcttggctcactgcaacctccacctcctgggtttaagcagttctccctgcctcaacctcccgggtttaagcatttctccctgcctcaacctcccgggtttaagcagttctccctgcctcaacctcccgagtagctgggactacaggcacatgccagcatgcccagctaactttttttttttttttttttgggacagtctcactctatcgccaggctagagtgcagtgatctaggctcactgcaacctctgcctcctgggttcaagcgattctcctgcctcagcctcccgagtagctgggactacaggcgcccgccaccacgtccagctgatttttgtaattttagtagagacgggtttcaccatgttggccaggatggtcttgagctcctgacctcatggtccacccgcctcagcctcccaaagtgctgggattacaggcgtgagccaccgcgcccggcttatttttttgtatttttagtagagacgggtttttgccattttggccaggctggtcttgaactcctgacctcaggtgatccgcccccctcaactcccaaagtgctggaattacaggtgtgagccaccgcacccggcccaactttcatttcttttgcgtatgtacccagaagtaggatatgccttcttttttatgttgtgtggctgacagagttacgttctgttctgtaacgatgttcacatgtcagtctttctatctacagaaccaggcagtgtgtgtaaagtaggtttcctcatctgtgggtccagtgtcccaattcctgcctcctacaaatgatgttcttggctggcttcaagttcaaaggctttcctcctgtttcatgcatcatcagtctccttcatcacgtgaattttttgaactttgtcatcctatgtgttgtgtcgttctgttttctttatttctttttayttattcatttatttttgagacgaagtcttgctctgtcgcccaggctggagtgcagtggcaccatcttggctcactgcaacctctgcctcctggattcaagtgattctcgtgcctcagcttcctgagtagctgagactacaggtgcatgccgccacgaccggcttttgtatttttagtagaaatggggttttaccctgttggtcaggctggtctcgaactcttgacctcaggtgatccacccgcctyggcctcccaaagtgctgggattacaggcatgagccactgcgcccggtctcttttttttttttgagacagagtcttgctctrttgcccaggctggagagcagtggtgtgattagagatcactgcagcctcaaactcctgggttcaagcaatcctcctgctttggcctcccatatgttgggattataggcgtgagccaccatgcccagcccttccctgttttctttttccttggccaccttcccctgctcatctctctgctctgacagctcctaccatctttccttccaacttctaggaatgtgctggctgactgtgagctctctttcttggaaatgcctttccagctcctgtcccaggctcacaggcatctcagtggcttactgtgtcacctgcgccctaggttggttgtctagaccccacacctctgttgtcctaaggctggggaccctcacggtcccagtgctgcctccttccacactcccaggccctgtgccactggcacgtctgtccgcaggtccccttcccacagccccacctagaccgaaaggtctgtgtctctgtgaggaagtgaataccgagtcagagcaaatcctgggttacagcgccgacccctctgaagctcacttttgtgattttggtttcctcaccattgtacttgacagaccttagttgccacatctactccgtgggggttatggcccattagagctatgaggctgaatgaggcagttcatagggaaggctgcttgtggccctggcttctagaaaggtgtgatttgcaggggctgctaggagccctccctgccctctcttccctttcttttggtctasggctggcttttatcttcagytctcgttgagtctcttttcaaatgcagatgcctcaggctgccagcttctttcatttaggcatctgggcctttgacaccttgctgtgagttagtttattcratttattttgaagccaggtggcaaggggaaaggaaattgaagagggagatgcaacgcktcccctggtttctggggagaggcttccccaattctccagcccctgacagacattgcgtgagagctcatggttagcgggccagtccctggtgtggtccacgcgtatctcctgtcccgggctggaagcatgatgtgtgcaaatgtccaaatcacggggtcttccctccctcacagggctttagccaggcagctgttactgaggtaaataatgatttgtgtttgtagataaaaaatagtggaatagtttcaatttcatatggttctgctgctgggtgttatgcagggggaatctgaggagcactgagatcactgggaaagaggccgggtgcgtggctcacrcctgtcatcccagcacttcgggaggccgaggcagaatgaagaatctcatgccaggggccagaaaggaggctgagaccagagtgtgagtaggagtcagccccctcagaggtgggaccagagaggaggctccttaggaagccatagtgaggaggacatgtgggacaggctcaaggattgacaaaagaaccagtaaaaaagaatagaatctcaaaaaaaaaaaaaaaaaaaaggccaggcgcagtggctcatgcctgtaattctagcactttgggaggccaaggtgggtggatcacttgaggtcaggagttcaagaatagcctggccgacatggtgaaaccgtgtctctactgaaaatacaaaaaattagccaggcgtggtggcacacacctgtaatcccagctacccgggaggctgaggcaggagaatggcatgaacccaggaggtagagcttgcagtgagctgagattgcgccactgcactgcagcccgggcaacagagcaacactccatctcgggaaaaaaaaaaacaatagataaagaaaaataaataaaaaaagaaaagagatggctcagagatcccttgtagacttccygggtacccatgtggtaacgttgcacctgtcaatggagtacagcagttcaaggggatgttgacaccaatgtgctccattgaccttattcagatttcacagctttccatgtgtctacctgtgtgtgtgtggtttagttctgcgcatctgtcactgtagggtttgtgtgagcccatggccaagatgcagcacagccaccatagggacctcttgagctgccctcttgcagccacagccacctccctttcccagcctgaacccctgagagccactggtatgttctccatctgtatggtttcaccattacgagaatgctccataaatggagtgctgcagggtgtgggcgttgaggtcggcgtgatgtcctgaggtccatccagttgtgtgcactactagtgtgttcctttgactggaggaaacgtctatggtatggatggacggaccatcatgtttcacctgttacaagacatttggttttttcccccagttttttgctattatgaataaagttgccatgaacatttatgtagttttttgtgtgacttaattttttttattttttgagacagagcctcacactgttgccaggttggagtgcagtggtgtgatctcgcgccaccacacctggctaatttttgtatttgtagtacagatggggttttgccatgttagccaggctggtcttgaactcctgacctcatgtgatcccgcctgccccagcctccgaaagtgctgggattacaggcgtgagccaccacgcctgacttaaattttcatttctctgggataaaggcccgtgagcgcagctgctgggtggtttgggagttgcatgttgagctgttttggtttaagaaacttccacactgctctccagagtggtggctgttttatttcacaggttttcatcagctcctgtgagattcctttgtcctcacatccttgccgtttggattcgtgggcagcggtatctcgctgtggctctaatttgcattttacgaatggcgggtgatgttgagcatcttgtcacggacgcatttgccatctgtgtatcctcttcagtgaggtgtgtcttygcatcctctgcccattttctaattggatcgtttcatttttactgctgattttttgagactygtgtgttcttgacagcagtcctttgttctgtgtgtggtctgtggatatttactcactcagtagctgtcttttcatcctcctctcagggtttttagcaaggcaaaagtttttaatcttgtcaaggtccagtttttccgttttccgttttatagactgtgcttttgcttttggtgtcaccactctgtagaagtgctattattttacctttacgttagatttgcatttcacctggggtgggggtcaagattcttttcttttcttctgtttttttgttttttgattattttctgtcacccagtctggagtgcagtggtgtgatctcggctcactgcaacctccacctcccagattcaagcgattctcctacctcagccttcagagtagctgggactacaggtgtgtggcaccacaaccggctaattttttgtatttctagtagagacggggtttcaccctgttggtctcgaactcctgatctcaagcaatccttccccctcagcctcccgaagtgctgggattacaggcgtaagtcactgcgcctggccccagcaccatttattgaaggcttttccactcccagcagtgtcataaattgcatgtctacacatgtgtaggtttatttctgttttgttttggggacaaaacaaaacagtcagagacagagtctttctctgtcccccaggctggagtgcagtgttgatttcggctcactgcaacctctgcctcccaggctcaagtgatcwtcccacctcagcctcccaagtagctggaactgcaggggtgcaccaccatgcctggctaattttttaaattttgtagagatgagagtctccctgttttgcctaggctggccttgaatccctgggctcaagtgatcctcctgcctcggcctcccaaattgctgggattgcaggtgtgagctgcctcatctggcaattttctggactcaaccgtattccattggtttatttctctatgcctaagccagtaacttaggtcttacttaccaaactgtatataataagtcttgacatctaatagtgtaagtacttcaaatttgttckctttcaggcttatccctagtgttcttggccttttgtgtttccatataagtggagmattagcttgtgagtctcacactgttggggttttgattgggactacgtcaaatcttggatgaatttggggagaaatgacatcttttcagttctgggttttgcaacatataacgagatgtctcctcctatatcttcccataaagatatggttgtggtttactctgtacatcttttgttaggcttattccgaggcattgaggcttttgggtgctattctgttgttcagttctaagtaggagtggacatcctcccctgacagcctctgtctttccagggaatttgctttgggagggcaggagagaaaaggcaagggaagctctttccaggggatatgctttgggagggcaggagagaaaaggcaagggaagctctttccaggggatatgctttgggagggcaggagagaaaaggcaagggaagctctttccagggaatttgctttgtctgggagggcaggagagaaaaggcaagggaagcagatttctgcaagcgtcagagcccttgagggagtggctctgctatgttcagagtcactggggctgtgggagcaggagggcatggggcaaggtgagggcatggcagcgagggaggcactggagtgttggagtcagggcttgtagtagcgagccaggcagagaggaggcgatgggcagagagtgggatgttgaatggaggtgacaggcatgggctgcagttactggtggtgatggagcacagctggccagaagataaggacactggtgtagagaagaggtcaaggctcagaggggataggcagtccacaaaggtttgtccacaagaacattagaccaccaggaatttgggcaacgatgggcgggggtgaagccacagtgagggctggtgctgggtggttggtgcctgatgatgtgtgctccagctgggatgctcagggagaggatgggagggggactccaggcctcagccaggagcacaggggttggggaaagagggccctcagtagggaggacatggtgtcgctggggacagagccccaggggagggtttcaggatggagggtggagagagcctggatcagaagccccctcctggcctggtgcagtggctcacccctgtaatcccagcactttgggaggctgagacaggcggatcacttgaggtcaggagttcaagaccagccttgccaacatggtgaaacccgctctctactaaaaatacaaatattagccgggtgttgtggcacacacctataattgcagctactcaggaggctgaggcaggagaatcatttgaacccaggagctggaggttgcagtatttcatgcctacgcaggtgctttgggatgaacttcttagggttggactgggaggggggttggtctgggaggggggttggcctgggaggggggttggnnnnnnnnnnnnnnnnnnnnttgattttggcttttggttaaagagcctttggggggcataagggggccccccggtggagcaagcaaaagaggaagcctggatcccgacaggggccaccggcaggtccttaacaagcgagatgcaacaggttcagagggcaaggggaggggcggctttggccaggagctgacaagagaagctgagcaagggcgctgacccgggggccacttgctcccaagctcccgggcgatgttaaaaggacgggaccactgggcaatggatcctcttcctgctgcacaacgtggggctacaggcgggaaggaccgtccagcagctgctgtcccagaaagaggatgacatcaccctgtgatagccagccccagtcccccaccgttgacctaagatcggggacgtcatgggaggggggttgaaatgggaggggggttggtctgaggggggttggactgggaagggggttggtctgggaggggggttggactgggagaggggttggtctgaggggggttggtctgaggggggttgaaaagggaggggggtttgtctgggagggggtgagctgcacactgggccctggaggacactcagaccctccctcctgaccccatcaccactcactcgtccagccaccacttcccctaaactgctgcttccttggagcagtctgcaggccccggggatgccctgtgtgtaggaaacttaatgctggggcctccctcccagagcttcatgtggctgcagaggcccctccagagcctcctcttctgccctgtacaccccgatgccttctgtgctgacctcagtagacgtggtgtgacgtgctgatgtgcatcctgcaactcagctccagtccccagatgtaggctgcttaagtgcagggcctcctcccactgtccctccccagggcgcagccagacaagtgcaaatggagcctctccagcagccaccaacctgctttatggctggtgctgtccttgtcacatttcaggaggtctctagacatttggcttcttttcagagtggaccctgtgagccgcgggccatgggccatagggagccttggcctgagcttgtcccctccttggccgcactgagctgtgcctgccttgccagcatctgcctggctccctcggtccttcacaaagactgatgaaggccccttttccaggtactggcacacggatgaggagtcgtagaagaggggcctgcagattgtgctctcagcaagcctgtcgtctagtggaagacactggccgggacacagagcccacgtgtggacaccgctgtgggttggtggcaggggtcgagcaggtgccatcaggcacatgaacggtggagtcttcaaaggtgagctgctggggccgggcgcgatggctcacgcctgtaatcccagcactgtgggaggccaaggcaggcaaatcacctgaggtcaggagttccggaccagcctggccaacatggcgaaaccccgtatctactaaagatacaaaaattagcctgtgtggtggtgggcgtctgtaatcccagctacttgggagacttaggcaggagaatcacttgaacctgggaggtggaggttgcagtgagccaagatcatgccactgcactccagcctgggtgacagagcgagaccctgtctcaaaaaaaaaaaaagaaagtgacctgctgtctgcccagccaagggctggggagagaccagcagtctggctggagaagcctcccatccagccttccaaatgaacggtgaacagtcactctggcgggacatccagcactggggttggttatagctgaggtgaggcatgtctccagagactgcaccttcagaaggtcagcagtccttctgagagtccagcactgcagccactaacccccagacagcctctctgcccatgcaaataagtctggccaggcatggtgatgcatgcctgtgatcacaacactttgggaggctgaggcaggagggtcgcgtcagcccaggagtttgagaccagtctgggcaacatagggagaccccaactccacacacaaaaaagacaataacaaattagccgggtgtggtggcgtgcacctccccagctactggggagggtgaggtgggaggatcgctggaccccaggaagttgaggctgcagtgagctgtgacggcagcactgcactccagcgtggggacagagcaagaccctgcctcagaagcaaacaaaacagaatcaaacaaaccagtctgtgtgtgtatgtaacacctttagccaggctctggcagcctctgcacccacgggcaagataccatagccattctcccatggacattgagacccacctcatcttgttaacagacgtatatgtatagatgttattctacagaatggctacacagatatttttcccagaatgatgggcatctaggtattttcccattttttgctccgtatctcatagatattgctacaaataaaatcaaatctggtcgggtgtggtggctcatacctataatcccagcattttgggaggccaaggcataaggattgcttaagaccaggaattccagacaccagcctgggcaacatagggaaacactgtctctacaaaacaaattwaaaaattagctgggtgtaggccgggcatgctggctcacacctgtaatcccagcactttgggaggctgacatgagcggatcacgaggtcaggagatcgagactatcctggctaacacggtgaaaccccatctctactaaaaatacaaaaaattagctgggtgtggtggcaggcgcctgtagttccagctactcgggaggctgaggcaggagaatggcatgaacctgggaggcggagctcgcagtgagcggagattgcagcactgcactccagcctgggcgatggagcgagactctgtttcaaaaaaaaaaaaaaaaaaagttagccgggtgtggtggtgcccacctatggtcccagctacgtgggaggccaaggtgggaggactgcttgaccttgggaggtcgaggctacagcgagccgtgattgcaccactgcaccccagcctgggcaatagagtgagaccctgtctcttaaaaaacataataaaaaatcaacaacaaaacaaccaagtcttttagttataagttacaggaaccaactccaccaagcctaagcataactgggctattaaagcccccagagccagctggagggcaggcaatgtgggggcgctgggctggcccccagaaccagccggagggcaggtggtgtgggggcactgggccagcccgtcactgccggggctcccgtgctgaccgcccagatgccacccgctgcactgtggcactcgggctttcaccctgcgatgtgcggccagagggcaggcaggctcacttcyctctggctccccagcactgtgagtccctctagctgacctgctctgggggttttagtagggtggcgtcctagaaatggggctgtcaaaaggtgtacttttttttttttttttttttgatatggagtctctctctgtcacccaggctggggtgcagtggtgcgatctcagctcagtgcaagctccgcctcctggattcaagtgattcttctgcctcagcctcccaagtagctgggactacaggcgcctgccaccccacccagctaattttttgtatttttagtagagatggggttttaccttgttagcaaggatggtctcgatctcctgacctcgtgatctgcccacctcggcctcccaaagtgctgggattacaggcgtgagccactgtgcctaggtgcacattttaagtttggaggtgcaccttactgaggtgcaccgtacacacatccctgtgaaaggggagcctacagcaggtccccggcctttcgctccgcctgtagaagcaagttcccatcctctttctgcaccctcctcaccatttctctgagactcttccttcccctgcccctttcctctcttttctttctttgaatggcatgcggcctctacctgtcccttgtccctatctctgggtgaatagagtgacaccgcccctcaggctgtgggctctcgtcgcaccatggacactgggagatgggtactgtggtaaagtagtgaccggggcagctctgggtttaggcttggccttggtctccccatgtggaagatggggtgatggcaggtgcctgaggcagtgatgggagtagagagggcactgaggctctcgggcctggagctgtcctcacgggggctcctgggagcttgggctgggcctcccttcctgaatccacatggcccagcggtatgtaggcagtgaggggacggtgggtgggggtcggggacagtgcccagtatcctccatggggctcctcccgcctgggtcccacactcaggcagctggcctgggctttgaggagtggaatgaacccmccgggttatctgtttagaactggaatgaaccgacccgggaatctgtttgacattccaaggaggtttgggggaaggtttgtggagtagagggagccgccctgcccagccccctcagcctgggtgtgtccatttggtgggactacgagctggccaccaggctctcatggctcagycaaggggcaagtcttctcagctctggtgggctgttcctggtccatcttgtggctgggaggagtagacaaagcttccactagaagttctgctagggcagccaaggttcaggtaggagggaggcagtctttccttctggagccctcagcccactgccgtgggccttcggctggctgcttccttctgagggtgattcctgggcagggaggccagagggggacgcttagggctcagcctggggggaggtgggcactgggacaccccctggcacccactcttggggggccctgggctcactttgggtacctcgttttctcttagaggaggcagttggaccctcgagcaggacaggaacctgcccagagtcccatggagacattgggcagcttccagctaggaaggtgggcctgctagggtggggccaagtgccctgtgagccgtgctgggtggggtgggggaggtagagcctccccgcccgtgggcctccctctgcagccagggggactgggggggttcccactgtccagctgctgttctctgatgaattttcacggatgtgcctcggaatgagaaacaagacaggcgttccgtcgggagtgtggctgccatgctcaggctttctcttctgtaggacatgggcaacagaacatcttttttcctttttaaaaatctgttttaatttctcttacattaattattttttaaataatataaattgagatggggtctcgctgtattgcccaggctggtctcgaactcttgggctcaagcgaccagcctgcttaggcctcccaaagtgctgggattacaggtatgagccactgtgccccgccgatcttttgttctgtaagatgctggggacagtaggtggtgtctgttaaatctttttttttgagacaggatcgccctctgtctgccaggctggagtgcagggtgtgatctcagctcgctgcagcctctacctcccgggctcaagggatcctcccacctcagcctcccgaggaggtgggaccacaggcgcatgccaccagctaattttaaaattattctgtagagacagggtcttaccctgctgcccaggctggccttgaactcctgggttcaagtgatcttactaccttggcctcccaaagtgstggcatgagccactgttccctgacggttaaatcttaatctttccttcccgtggctggagagagactggggatgggcaagggcagcctgccttgctcttggcttgtgatctctttgggttggggtgggggtgagtagctactgcccaggtgggttctctggcaggtccagagatgctaatgacagaaaggtgaggatctcctcttgccagccctgtcaggaagagggtgtgggctgtgagtggctggcagggagggagggctctggcatgccaggtgtggtctgcctcctctgtcctcatggatgcggacctggcagcatgcctgcaagactggctctyctgcctctctggtacccatgctgtgtctctagagggcaaggggaggacttgggagcctgggcagggtgtctggccagtgtgtgcttgccctggcctctgcggtctacagagctggccaggcttaggagcaggctgctcggagggagagttactgcctggaaaagctctttacttggcaggcagaaagccaggtcagggccactggccttattggccgtgtcctcaggaagcctctgaggctaggcctacagggggggactatgtctagagtaggctgaacctgtaaagtggggctcccagataaattgggggcccctgagcaggaaggacctgactggcttaatttgacctggcccaggacagttccctttctgaaagaagggggcrttctatgaaacacctgggtagaagtccagcagtgaagagttgggtcagtgtgtagatggccatgaggcctggctgggtggagaataggactcctggcaggcatcttctgcagagcacggagtgccttctttcttttctttcttcctttctttctttctcggagtctcgctctgtcacccaggctggaatgcagtggcgtgatcttggctcattgcaagctctgcctccctggttcacgccattctcctgcctcagcctcccgagtagctgggactacaggcacgtgccaccacgcccagctattttttttgtatttttagcagagatggggtttcaccctgttagctaggatggtctcgatctcctgacctcgtgatccacccgccttggcctcccaaagtgctgggattacaggcctgagccaccgcgcctggccaagcacagagtgccttctgaggtgaggcctgtggccagcccagcaaccacacttagtgtgtcgggcaggactagggccatagcaggtacataggcagggttgtgccccagccgaagctgtctgcctgcctgtctgtccccataggcctcaagccaggcaccaggtgggggcttttattgcagcctaggatggcagaggcattgtgggagcccatcaaggaagaggtctagagactgggcagtgagaggctggggtatcagtcaggacaggaggaggcggggcctacccttggaaggcaggagaggtggaggcccaggaggcggggcctgcccttggaaggcagtagcctgcaaagccctcaaggctgttccacgagacctcaccctgcccagccttagggcagcgcctggccctggaggagcagcctagcagggaacgcctcgctggggtgggcggccctttctggaaagggtgggtgggaggagcctgacatgcctttcccccgcccctctctgaacstggggcagaatgggggcagagtagctccccgtacccccaggactgttgacctgcagtgctctctgtggacaaagggtgggcctcacacagggcaggacctgagacagctggaagcctggtctcacctgaggcccagggcaggggctcccccgggccaccctgcctcaagccggccttgatatgcttccttgttccccacttctcaggtgtgagcagctgctggaagaggaggtgctcctgaagacactgcggccggcccgcctgtgcccttggtgccctggctgcctagagagcctcacccctgggccctggggccaggactccaggactctgactacctgccctcccccagcctcagcggctgcacctcctcgttagtactgatgcactgacctcggcacacagctgggaggggttgggggctgggtcatggctgctcccaggccccacccaggctcctgagcctagaaggtgaaaagaggactctcaggggctcacaggggctctcactgctggttggccctgccctcccttccccctcagcagggtgcccggaagctggaaccttgttatctgggtaattagtttcagaccctgcactgaggccggccaggtctcggggctgcctcccataggttgtgcaccctgaccccgagagggaggcgaggcgctgcttgtcgacagctagaggctggcctggggagcaggtttggggtgccctcccacactgccctccctgccccggcccatgccccccagggctgcctgggcctggttattgtgtggggcctcctgacccagccaagggcacgaagctctgggaaggggatgcccccgagggtgccagtccagctagctgccccacccctcaggcccagcctggcccccaagctccccactctggtgccccgagcagccctgtgggcaagcagccgccgccatggccgagcacctggagctgctggcagagatgcccatggtgggmaggatgagcacacaggagcggctgaagcatgcccagaagcggcgcgcccagcaggtgaagatgtgggcccaggctgagaaggaggcccagggcaagaagggtcctggggagcgtccccggaaggaggcagccagccaagggctcctgaagcaggtcctcttccctcccagtgttgtccttctggaggccgctgcccgaaatgacctggaagaaggtgagtgtggctgagcccagagcagctcccagcagacggcccactccctgctacctgggtgccgtctcatgccaaggctgggggctgggcctgtccacagctcctgggctccagcccccagatcttgcctggtctcttcaggctgggtggcccagggtgcccccatcaggcaagccccaagcagtgggcagccctgaggtgagcctgtgcgggacagccgtccttcaggcgggggctgcatgcagagggctcctgctgtgaggtgagctgaggccatgagtggacccccaggagcctgcagaaaaacctagtgcggggccccacgggagcaggggtggccggtagtcattgctgcttcttgttaggctgctcaggagagccctggtctccacctccgtgaaatagggtgggaccagccacctctgtgggtgagagagccaggccctgggcaggcacagagctatgcaggtggccccctctcagtgcctgccctaggctctgcttgtgactctcttctcctcacctgtgccccacgcttgcagccccagctgtgtgggttccacttctggtgctctggagtctkgggggaagaggcactgtggtggcccttgagactccttcctgcctccctccggagcagagagtaaagaggagccggcagtgtctggcctgcatctttccatgtggacaggagccctcccgggaggcctggaggcagagggaagaggcggagggtgccatggtccacagggagctgtgggaaggtgggagccctcctgctgcaccccaggcaccgtcagggagaaccctggtgacctgggcgagagctgggcccgagttgggatctttgatggggaggggagtgagagcagggatgtgctctggtggtggggagcctcaggtcaggtcccagaggacccaggagagctcatgaacacagggctggcaggttgtcagggaagagccgaaggagctgtggtagcctccaggcagggagctcttcctgggctggagggaggtgtgggattgttggagtgctgctctcacacaggagcacggcctgttctgggggtcggagggctggagcaccaccatgaagggcctgcaggtgggtggaggcagagggcttctgggagtgtgaccggcctgggccagacagatgcctggtgcttctgcccccacccctgggctctggtgtgcctcctgccatcggcaccactgtcttccttgtccttccctgggtcctgggccgaagcacagttgacaggacctgaccaggggcaggaccctgtcctcacctcgccacctttttgcagtccgccagttccttgggagtggggtcagccctgacttggccaacgaggacggcctgacggccctgcaccaggtcagcctgcactgggtgtgggcagggtgggggctggcccccgtgctctggycgctcacgtggcacggtttgcagtgctgcattgatgatttccgagagatggtgcagcagctcctggaggctggggccaacatcaatgcctgtgacagtgagtgctggacgcctctgcatgctgcggccacctgcggccacctgcacctggtggagctgctcatcgccaggtaggrcctgttgggcgtccttggcagggagaggcttcctctcagatggccgctcaggaggctcctcttgggcagtatctgtggctctcggcctcctgtgttcccgccttcacctttgctgaccctgcctgtgtcctggcatggagagcagggcctggggctccaggggaatgggcatgtgcccagggcagcgcggtccctgcctccccagcattcgtcctcctgccgagagggcaggcctcgggcccccccccagagtgtgcacagagaaatgtcttggtcagtgaggagggcagaactgctaaggagggaagcagagtgaggaggccaggtggcttgggaggagagggtacctgagcacaggtagggcctttacctttaacacagagggacgtagagcggggggaactctgagcagggagggtccatgagcctcctcccttcccctttgctccaggcatctgtagtgggagagaggtcagggctgcggtcattctcgagtgcccctgtgaggccgggtggggtgtgsatggcggtcgcgtcacacacaggcgctgcggggcaggcggggatgtggggtgtccacaggtaggcctgctcctccactgcacacagacacccccttctgtgttctgggctccccttcaccgcccttcttccctggggccatgctccccacagctcagcagcccctcagcgtggctgcctggtcctgcacccccgccaccctgtgctccctgctccccagcaggcaggcccatccaatgcatgtttatgggggcaccgctgcccctggaggtgccaggaacctggatccctggatggatagagactgcaggaggcctgtctggcttaatgacaggatctaggacagccgatgggccccaaggctgcctctcccagcagcaggtggacagggtgcctcctgaggggcagccctgggctgaggggccctggcggggacttctccaagtgaggagcctggcaagcggggaagggccttgtgcccagcaccccgtccgtcttccctgcagtggcgccaatctcctggcggtcaacaccgacgggaacatgccctatgacctgtgtgatgatgagcagacgctggactgcctggagactgccatggccgaccgtggtaggtgcggcggtgcggctgtgggagggctgccggtcgcgctccctctgagcctgccgcctcgcaggcatcacccaggacagcatcgaggccgcccgggccgtgccagaactgcgcatgctggacgacatccggagccggctgcaggccggggcagacctccatgcccccctggaccacggggccacgctggtgagggctggggggtgaggggcacacggggctgggggcctcgctacttggaggtgggggatggggccgaattcaggccgggcgcttgcctgcagctgcacgtcgcagccgccaacgggttcagcgaggcggctgccctgctgctggaacaccgagccagcctgagcgctaaggaccaagacggytgggagccgctgcacgccgcggcctactggggccaggtgagtgcgggcgggagcaggtgggagggggcttccagcgcagcagtctgcagctccggcctgccgtccacaggtgcccctggtggagctgctcgtggcgcacggggccgacctgaacgcaaagtccctgatggacgagacgccccttggtgagcttgcggrgcccacctccacctgggggagaggacaggcggrgagggcgcccctgacgcctgcgcccacttctcagatgtgtgcggggacgaggaggtgcgggccaagctgctggagctgaagcacaagcacgacgccctcctgcgcgcccagagccgccagcgctccttgctgcgccgccgcacctccagcgccggcagccgcgggtgagcgccgcccccagcaggccccgccccgggcttggccccgcggacgtcagccccgggcggagtgccagccgaactgggggcagagtccgagggggtgggcggggtcctccgggcactccccttcccctcactccctctcctctctcctccccaggaaggtggtgaggcgggtgagcctaacccagcgcaccgacctgtaccgcaagcagcacgcccaggaggccatcgtgtggcaacagccgccgcccaccagcccggagccgcccgaggacaacgatgaccgccagacaggcgcagagctcaggccgccgcccccggaggtgagcgccccgtccctgctccgcccagcgcaggggtgggcctggctctgccctggttctctctccgcttggaccccctcctgcctgtgtcaggaatggtgccctgcaggggccagcttttgccccatctctcctgtctgtcccttcatgaccrtacagcctgaacccaaggccagggaggggggaggagcctcctgatggctctgggaccttcactgcccgcaggaggacaaccccgaagtggtcaggccgcacaatggccgagtagggggctccccagtgcggcatctatactccaagcgactagaccggagtgtctcctaccagctgagccccctggacagcaccaccccccacaccctggtccacgacaaggcccaccacaccctggctgacctgaagcgccagcgagctgctgccaagctgcagcgacccccacctgaggggcccgagagccctgagacagctgagcctggcctgcctggtgacacggtgaccccccagcctgactgtggcttcagggcaggcggggacccacccctgctcaagctcacagccccggyggtggaggctcccgtggagaggaggccgtgctgcctgctcatgtgaggctgttgctcagcatgcaggggccctgtckcgggcacagcccaaggctgcctccccacggtgcgtgccctggtgctgcgggtgcagcacggaaaccccggcttytactgtacaggacactggcccctctcaggtcagaagacatgcctggagggatgtctggctgcaaagactatttttatcctgcaactcttgataaagggctgttttgccatggagcctcgttgtgtgttgtgtgtctcagctgggtcgctgtcccacagtggggagtgggttgtgctgtttggctggggtgccacccgtgcctgtgagcatgaaagcctgtaggtgcgcgctggggcatgtggcagccctggctgtgtgggagtgaggctcacagccactgggctggaagcctgggcctcacccactccctcccgtgctcagcctcctggagcctcctccgtaaccctttgctctcctgagaggagccaggtgctttgaaggagcctccatgggggccagggcctagggtgtctgtgctgaggggcggaaggtgggggtcccagggaccatggcttggaaagggaggtggtgttttccacaagactcttgtgtcagagccagaggggcaaaacaagcacaaggctgtgtcagaagctccctgggggggttgtgggtccccagttcctggcacgcagccttaatcctggggcctggctgccagcttccgcctgggctggcataggggacacgcagttggccactctggctctgagctggcttggcacaatgtgtcagggtgagggggccccttaggggcctcaagcaggagggctgagggcaccgctggttcgtctgttcatggtgggcggctttgtgtggccaccagtgctgggtggtgtgggtttgggctgttctccctcctggctcagcacgggcccgtcagcccagtgtcctttgggcctgcccttcccctagcatccctggttggaagggtgtcctcacagggctgtgggcgggccagggctggctgctggttaaatttagtgtggggggtggggcagctgcccaaggtccacctgccaccagggctgccacttggactcccttgccagggggcgggcaggggctggctctgcctggggccaggcccatgttaacctgtgccccggcctgggggccagaggggcaggcctgcgcacggggaggctgttgtggcagcggaacagagacgtgcacggtgagaggcctgggggccggctgtccagggctcccgatggcttttctcccagccagcaggatcagaggagccaaggtccgacttgggcctggctggttgcccacagccctgctcagagggccggctccctgacccccatggttcaggtttcggtgcccgacgctggggtgggccagcgtggagcctggcctttcagctcagcaggcctgtggaggtggggctctgatggcctatcccagctcgtttcctactctctcctccaatcgggaacaagagggctggagagctcaggtcacccctagcctcgggtgtgtcccaagggcaacccccagctggtgcctggtgaaagggcatgacagcagccacggtgtgagctgtcccagggctcagggctggactgcctggctccagccccctcccccagcccctcgcagtgctcatcagggaccaaggtccagctacagagctcttgcagcctctgggccatagctgccagctctggagggtccagatggaacccagagcctgaacacccctcccctccccccagcaccccctggattcctgaggcctggctcagttaataggagacaggtccgctggcccaagcaaagatgcgggtgccacgagggccaggcctcggccaagccctgctggggtaaatcccagcagcccaggctccagtctcgcctcgggggtccctccttgccagctctgccagcccgtcaggccggctgggcaccccttcacctcctgagcaccccaggtgctcagccctctccccctccccccatgtctagtccctcagagctgtccggactgacgtctgtacctaccccccatgtgggtctcctgctctcccttcgtggggacactaggcaggcactgggccttgccccaagccccgcctgccacctcacccactgcctctgcctccctggggcagagctgttcccagacgggtggggcggggcccaactgtccccagctccttcagccctttctgtccctcccagtgaggccagctgcggtgaagagggtgctctcttgcctggagttccctctgctacggctgccccctcccagccctggcccactaagccagacccagctgtcgccattcccacttctggtcctgccacctcctgagctgccttcccgcctggtctgggtagagtcatggcctcgagcacaggtgaccggagccaggcggtgaggaatggactgagggcgaaggtgctgacgctggacggcatgaacccgcgtgtgcggagagtggagtacgcagtgcgtggccccatagtgcagcgagccttggagctggagcaggagctgcgccaggtatggcccagggcccctcgctgccctccaggtcacaatggggtggccgagttggccccagccccactggcacatgggacaagggctgaggggttaggtagggcacagtctccctgcctgctcccctcccctcccagggtgtgaagaagcctttcaccgaggtcatccgtgccaacatcggggacgcacaggctatggggcagaggcccatcaccttcctgcgccaggtgaggctcctgcactgcccggagcacccccccacccccagcccatgtgccctggcctcagcactccgtcttcccaggtcttggccctctgtgttaaccctgatcttctgagcagccccaacttccctgacgatgccaagaaaagggcggagcgcatcttgcaggcgtgtgggggccacagtctgggtgagagccagggccaggaggaagcagagggccgccctgccactggaggagggaagtcccttgggagagctgaggagaacttcacctgtacttcccatcctgtcctgcccgagtccaggggcctacagcgtcagctccggcatccagctgatccgggaggacgtggcgcggtacattgagaggcgtgacggaggcatccctgcggaccccaacaacgtcttcctgtccacaggggccagcgatgccatcgtggtaggctgggcatgggcaccaagacattcctgacactgcagagggggcgcccagggtgggggacaggtgcggccccaggcctcgccaaccctgccttccccttcctttccgcagacggtgctgaagctgctggtggccggcgagggccacacacgcacgggtgtgctcatccccatcccccagtacccactctactcggccacgctggcagagctgggcgcagtgcaggtggattactacctggacgaggagcgtgcctgggcgctggacgtggccgagcttcaccgtgcactgggccaggcgcgtgaccactgccgccctcgtgcgctctgtgtcatcaaccctggcaaccccaccggtgcgttccccgccgccccgccccactccccccgcgcccacgttgcgttccccgccgccccgccccactccccccgcgcccacggtgcgttccccgccgccccgccccactccccccgcgcccacggtgcgttccccgccgccccgccccactccccccgcgcccacggtgcgttccccgccgccccgccccactccctccgcgcccacggtgcgttccccgccgccccgccccactcctcccgcacccacgtgcgccctggcccaggcagtgccgggtccgctggaccccggctgcccagcggagggcagtgcgcccccttggctcacccagcactgctgcctccccggcaccccagggcaggtgcagacccgcgagtgcatcgaggccgtgatccgcttcgccttcgaagagcggctctttctgctggcggacgaggtgcgcggcgcgggggagcgggaagccgggcaacagtccgcccccgtgacgccttgcgcccttccaggtgtaccaggacaacgtgtacgccgcgggttcgcagttccactcattcaagaaggtgctcatggagatggggccgccctacgccgggcagcaggagcttgcctccttccactccacctccaagggctacatgggcgagtgcgtgcgtacgaggcgggtgggggctcgcgggccatggccaggccctcctcgcccgatgggccaccccctcctccgcacctgacctggccgtgcgcaggtgcgggttccgcggcggctatgtggaggtggtgaacatggacgctgcagtgcagcagcagatgctgaagctgatgagtgtgcggctgtgcccgccggtgccaggacaggccctgctggacctggtggtcagcccgcccgcgcccaccgacccctcctttgcgcagttccaggctgtgagttgggggcaggagggggtccaggtgacctaatcaggggtgggggatgccgagtgccgtgccctgatgggccctccctccgcggccacaggagaagcaggcagtgctggcagagctggcggccaaggccaagctcaccgagcaggtcttcaatgaggctcctggcatcagctgcaacccagtgcagggcgccatgtactccttcccgcgcgtgcagctgcccccgcgggcggtggagcgcgctcaggtcaggcgggggcggggcctgcggggtgggcagggggggccgggcatccctctctgacggctctccgtccacaggagctgggcctggcccccgatatgttcttctgcctgcgcctcctggaggagaccggcatctgcgtggtgccagggagcggctttgggcagcgggaaggcacctaccacttccggtgaggcctggccctcactccctgtcccgccaccctggcccttcactcactgtcaactcctttcaggatgaccattctgccccccttggagaaactgcggctgctgctggagaagctgagcaggttccatgccaagttcaccctcgagtactcctgagcaccccagctggggccaggctgggtcgccctggactgtgtgctcaggagccctgggaggctctggagcccactgtacttgctcttgatgcctggcggggtggggtggggggggtgctgggcccctgcctctctgcaggtccctaataaagctgtgtggcagtctgactccagggaggaagcgttggcagctgcgtggcccgctcccacctgcctacccttcttgcaggcctgagtcccttcagagaagggaccttccacggccaccacccacctcttcctcctgaagaccccgtgcccaccataggctgggtcttccctctggcctctggttgtggggcagagcccgtcagatcacacagaaatgggttgagagggtccagagtgtgaggaaagcgcaggccccacacccctttgtggaagcccccaagaatctagggagccaggggcccaggtggccacccgaagaaacacagcctttcctgaggaaggcacagtgaactgcctccttcctggctccctttcctgtgaggtccatgtcttccctggggcagggggaaatactaaaccagcatggtgctggctggtcagggtgactgacagctcaggaaggaagtcttggttctcttacccaaggaagcaggggtggggccactgtctggggggccagagaccacctttggtgtcattgtgtggtgcagtccttcggctgggtggagtgggaggcagagggagaggataagggagcgtcccaggggagggctggggctggaggaggcaggggctgggctgagcgggagtgggcagcgctgtgtcctggcctggggagcatggctgagcacctactacatgcagacactgctggggggtcactcaatctgcacagatgctcttctgaagtaggcatgatagtccccatttgatagacgtggaaacctgcaacccaaaaacctgctgagctgacaagaaaccccctcagaggcctcggcagccagaaaaatgcgttgggtccagtgccctcaagtccgccaaggacagggctggctttagagactcacaaacttgggagataggactggccaagggcacctggtttttttcgctctggagatggttcttaa

SEQ ID NO: 97791 - DNA, 49777 bp, Homo sapiens
  misc_feature (1)...(49777): n = A,T,C or G
ccgacacacatcaccttttcttgcgcacagaactcacggacacacaacattcgcagtcacgcaacaccccgggcacacaatcgcccatcctacgctcagacacacacagggagcacgctcgtaacgcccggtcactcaacactcacactttcttccgagctacgccacgggccccgaggctcggcggggcaggctcggtccggccgccgcgcgcttacctgccggagtctcggtctccggcgcgcagagctggaaggtgagtgccagcacgagcgcctgggcacgggccatggttggagcgtcgccgcccgtcccggggcccggcgcgggggacgccgcccccggagcccgagcccagcccgaggcgagccggagcccgagccggagcggagcggcgcggcgcggagcgggactggcgccgagtccagagcgggagccggagcaagcggggcgctgacgtcaggcccggccgcgggttcggcggtctcgcggcgctccctgctggccacggcgggtgctgcagcgggtccggccgcccgctagccctggcgcgcccctcccccgctcccgcatcctccccgccatgaggccccgcggctgggtctggacgcccacggacgtctccacggaccgggcaccaacactgccaggcgagcacgctcatggcccacgcctagctcccgtacagcgctctcagggacggtgacccagggacacccggcctctgtcccatccgatgcctgaatcccttgtaccttggcgccttcaaatgcgtgttctacatacctccaggaacagggcgctcatcacctggccaagagcggttgttggggctttggaaacgccggcttttagaaagtttttcatttcatgacgtgcaagtctacctccctcactagccctcactggtcctactctaccttctggctacacaggttaaatgtatttgggcctctacccagaacgagccctcgcactatgatctgcaaactcgttgctcattactatgtaagaccaggtaccttctatgtgtttaacccacatggactcatttaatcatcatatattaggtatgcaacaattatactgcataaatactgttatgcaacagtatttgacagcaccgagatttgaatcaaagttgtttggtttgaattgaataggggctgagaccttcctcccatctggacacctattcattcaacaaatatttattggggtctattcatttattcaacaattactataggccagggtagagatataaaacagacaaaaattccctactctcatggaccttacattccagtgggaagacaagaacagtaaacaaccaaaaaaacaaaaacaaaaaagcaaaccctctggtgtacgtcccttatcactgtctcatacaccaggaaatttgggggtggtggggggacagggaagggaaggggaattgttgcaatttcaaatagagtgcgggctatatgatgagttcattatctgtctccacctctagaaatgagctcccttgggaaaagactcatcttgtatttccgtgcccagtatatggcatgtttttattattttattttattttattttatttcaagatggagtttcactcttgttgcccaggctggagtgcaatggcgcagtcttggctcattgcaacctctgcctcccaggctccaacaattctcctggctcaacctcccaagtaactgggattacaggtgcccaccaccacgcccggctaattttcgtatttttagtagagacagggtttcaccatgttggccaggctggtctggaactcctgacctcaggtgatccacctgcctcagtctcccaatgtgcagggattacaggcgtgagccaccgcgcccggcctctggcacgtaattgatgctcaataaatactgactggatggaatgaatgaaagggaaatggtcctagccttcatgaatcttacattctattaggagagcccaacagcaaacatgtacataaatatatcattaccatctaagatatgcaagctaaaggaaacgagggagtataatgataaagaacatagggaaggggcatctcctttagataagtggtccaagagggctttgctatagaagtgacatggtgacatttgaactgagacctgaagtatgagaaggagccaacctcatgcaaatcagtggagaggaacattgcagtcagaggggacagcctgtgcaaaggcaggagctggtgggtacaagcagctgcaaggaagccgggcagctggcatggagtgagtcaggggcagaagggagccaggtgcagctagacaagtcagcagggtctgtaggtcaggcaagaaactatgagcaaggaaggggcttgaggttcaaccctaagagtaattaatgggaggccactgaagtggagtaattaagcagaggagtaataaggagtaataagttctgatctctgggtttttttttttttgtttttttttttttacagctccagctataaagactgctgaagtagggaaagccatgggcagatgggtctgaccactgggcagtgacactgaacaaagcgtaggagttcaaggtatatgtaggccctccctgtgccctgcccctcctagctggcttcatgctgagatggacacaccttgaagctgccctggggctggaggaggtatcgctgggttgagagttcctgggctcttggtctcctctcttgtgagagctgatgagctccacactgagttaggaaagggaccaaaagacacagcaggcaagaattagacacagataattaaatagggagagggaggcagaagcaagaagaaaccaaggggaaaccttagggaagaaactaagatacagagacgctggagcagagaggagccagagaggcccacccagaaaaggaaactcaaggagagaaaaccagtgaacagaagaaacaaccaagggtgctgtttgcagagggctcttgagagagcctcaaaataggagttttaccagtgatcccattttacgggtgtggaaactgaggttcagagagcatatgacacttgcctaaggtgacacagctagtaaatagacggcgggccctagatttgaacccagatctgactgattccacatccctttgccctttgtgcaggggaagatggcagagactataatggagggagaaagagaacacaagcaacaggtagacagatgagaagaggactttctgctttacttttaaaagaccacaaacttcagccgggcacagtggttcacacctgtaatcccagcattttgggaggcagaggcgaggtcaggagtttgagaccagcctgactaacatggtgaaaccctgtctctactaaaaaaaaaaaaaatacaaaaattagccagacgtagttgcgggcacctgtaatcccagctactcaggaggctgaggcaggagaattgcttgaacctgggaggcggaggttgcagtgagccaagatcgcgccattgcactccagcctgggcaacgagcaaaactctgtctcaaaaaaaaaaaaaaaaaaaaaaagaccacagacttctataatccttgagagaagaaggaagaaggaaattcctggcctggagtgaccagcccaaatctagggaaaaggagatggcaccacagaccgttctaggccatgaggaaattcaattacctgcaactcatggaatatttatgacacctaccctgtgccaggctcatatcgggtgctggtgttatggagataaaccaaacatggctccagtcttgcctggaggggaataaataagagacgatgtactaaaggccataacacagctccagagaaaacacaaaggcagcagcagatgacctagggagttttgaaacatcaaagaaatgacatctgaacctggagtttccgaggcagggaacagcatttcaggcagaaggagtggcctgaataaaggcacaagacacactggggaagacgggtatcagatgcagctggatcacaggctatgcacggtccaacaggagaagatgaagctggaaatgcagcgtgggagtcagagtgcaaagaatcttgaatgcaagtccaggaaattggacttgaacccctcagtcagtagttctcaaactatgcccctgcaagaacccagatggcctagactaaaagtgagggctattgggatgcacaggaggctaaagtccagccccaaggaggaggacttgctggatgattcttcaggcttcctgactgggctccccagaaattcagaggagccaatttggtgaagaagagaatgtcgacatctcaatgtcacctagggagtcttacaacagaaggttacgttgtacttcccagttcaagtaagcctatgtgtcactggggaaaagggtaagcaggactggtcatcgtgtgtgtgctggcacataaatgtggggccaagcctttcccccaccatgggacaccaactttctctaataataaaaacaagtacagacatttagtgagcacatactataagccagaccctagtctgagggttttatgtgtgatatttctcatttaatcacaataaccccctgataatatttatcaaatgcttccatgtgccaagcattgtactaaatgcttcaagtggataatatctcacttgaccctcacaacaatcttgaaacagataactagtattccttccattttaagagtaagaaagtgaagacacagagaggcctggtgacttgtccgaaatcaaatggctggaaaatggcagagctaggacataaagccaggtttgtccaaatctagctcacagtactttgctgtgctctcttcctcagaggaaaggcttggagatggcaagcttcaagtcaataaaatccaggaaaggaactcttccttatccttcaaagccctggctcagtatcttaaaacctgtttcctgggacacctgcatcagaatattcttgggagcttgtaaggatgtagattcctggaacccccatccgcaagattctaattcagtaggtctaagatgggacctcggattatttttatgcacacagaagattttgaatcacagggctggctctaacagcacctcctccaagagcccccaccccatcccaccccatcccagagcacttctcttcagactacagcattgcactctggcacgagccacagctcgatctggggttttagtaatgttcatgtcttccctacaccaaaaatcagactagatccttcatagggctacacctttttacaggcatttccagtgttccacttaatccctttctacactgtgagcattttgagagaggacccttctccttgtgattcctgtcttacatctgaacagagttttttacaatgcgttctcccacccacaatagcattcctctattatttcatccaatcctcacaacaatccggaaggaggcatattatccccattgtaccgatgagaaaaattcagagtttcacctgcccaaggtggccaagctaggaagtggcagggctaggatttgaacctaagttttctaactccaagccccatactcctgcctccacagcagctttcgtgtactctcctcagtgtagggaagtaagctttgcctccctatgccgttacatggtagtggtgattaaatgagataataccttaaagagcctggctcggtgagcactcaatatattatgtgaagggtaaactgaggccagggagagtaaatatttcctccaaatcaaacaccaaactgcaggctgtagacacgactttggactagccccagactctccttgttgagacaacagctttggcggcctcgcaagctccgcacccccggatccctccggggcccacacgcagtctagccaggcgccaccacttgggcagcgaaggaaggaaacgcccttcaaagggaccaagggggagtggtcacccggcggggcaggggcggggcgcaggcgcgcggtcgctggaagatgacgtagccggggcgtcaggctctgtgttggttggagcgagcatgtgggtctgcagtaccctgtggcgggtgcgaacccccgcccggcagtggcgggggctgctcccagcttctggctgtcacggacctgccgcctcctcctactccgcatccgccgagcctgcccgggtccgggcgcttgtctatgggcaccacggggatccagccaaggtcgtcgagtaagagacggcgccgaarccggggaaggggactggggtttctggaaggctttaacacgagctgcggactgggaagagagggacagggtccgaggaagggggcagagaatagcaaaccgaagccgaagcccagggcgtttttggtaggtcagaaagaccgtacttgaaggtagctgaagacccgagaggcaattatcagggtattaatggctgatgtttattgatcgaatattgtgtcaggcaatcccttgtttaaatggatgctctcatttaattgtcacaacaatgttttggggtagttattgatttatccccattttgcagatgaaaactgaggcagaagaggtaaaatcactcgtccaaggtcacacagccagtaagtgacagggtcagaattccaacctatgtctgactgacctgcgtgagttcttactattattattattatttggaagaagttttcagaatacttttacatccatttggatcttcatgtgtcagtaaagagtaggtcatagatcattgtttccagagggcaagggacttgcccagagtgataccgctaataagtgattggaacaggagactggaatccatggcttctgattccaaactcatgtttctctccactgcaccgtatatgcatcttggcttggttaaaaagagctgctttggtgccatacagacccaagtatctatatttggtcaaatacaggctcaacgtcttagtagctgtttggtcttagagaagtcattcaacttctcgttacttttatgactttgtcctcctcctaaaattctgttggatcttaattcatgctttttgcacgtggttgataaaaayagtatgtcagttgccaaccattgtaaatctgcacataaatagccattcagaagggctattggggccactgaagtggagctaaagcaaaagcacaggtctgggaatcaaaatacttggggtcaaatccttgtcctagctttgcatttggcaagttactgaggttctctgagcctcggtttcatcatcttaaaaaatggagacagtacagacaaagttcatagtggtaatcacctaagatctrtgtagtgctctccaccaaaaaacacctgcatactcttgtgcagtaccttctttttaactctttgattcccagcaaatagtttgattattttccaaaggatgggcaaatgtggtattactttaatggttaaaattcaggctagagctgggcacggtggctcacgcctgtaatcccagcattagggagactgaggcgggtggatcacctgaggtcacgagttctagaccagcctggccaacgtggcgaaaccccatctctactaaaaatacaaaaaaattagccgggcttggtggtgggcacctgtaatccctgctactcaggaggctgaggcaggagaaccgcttgaacccaggaggcggaggttgcagtgagtcgagattgcgccactgcactccagcctgggcaacagagcgagactctgtctcaaaaaaaaaaaaaaatcaagctagatgttttgacaggtggtgaggataagcctcagataaattcaaggtcatccaatcagcctagccacatcccgcattatagaaacgaaaagaatgtcaagaagacacatcagtcagtaaactccaaattgtatgttgatcgtaggtaataaagcattgtgtcagggaagacatctcactaaggactgcgttgtaaggaactggtacagctctgatgaacactcctccatttccaggaatgtaccccaaatgagaaccatgtagtgtctctcccacggacttgtagtttgtgtctgcagcaggacctgccacaaaacaggtgctcctaaaatgttagttcaatctaaatctaaatttccaaaaaaagtgaaccttttattaagttctgctgtggtgatgaggaaggcctgggaaagttcagctgaatgcagttgcctcctaattgattccctcctcttggagagccagagaagctggaacagaccggtctgtttgcagatgccacttaggaaaaaaaaaagcttctattatgtccttctgtggaacttcagtaatttccctctagttcaaaacatgatacttccaaccgggcgcgatggctcatgcctgtaatccctgcactttgggaggctaacatgggcagatcatggcgaaacccygtctctactaaaaatacaaaaattagctgggcatgggggtgcaagcctgtagttccagctactcgggaggctgaggcaggagaattgcctgaactgggaggcagaggttgcagtgagccgagatcgcgccattgaactttagcctgggtaacagagcaagacttcctctcaaaaaaaaaaaaaaaagatacttccacaaagcattatattcaactttggcttcacagcacagtcaccatttgtagtgcttttattttttgtatttgcccacataaaatatcagacagcttttattttatatatatatttatttatttatttatttattttgagatgagatcatgccatgttgcccaggctggtcttgaactcctgggctcaagggatcctcccacctcagcctcctgagtagcagggattgcaggtgtgtaccaccacacccagcttgacctgtagtgcttttagaaactacsgtatgtattcctaggccccactcctgaggtacttagtaggtctaggatggcttggagcttctgtttttttcaragctctccaggtgactctgctgcccaggccaggcttgagaaccactgccttgtggatacagattgtcagacaagcagtaattctctccgtgctccagaagggcaactttactttctgacccagattcaggcggctttacttgttctcgtatggactgaagccagagactgggattctctttgtagtcatgtcttacaaggtttagggtaaccacactgtcacagaaagaatcaggtgtcctttacacatcctggtaactggctgtctgggtcaggttacaccaggtaggggtcatgggactacctagagtctgaacagagcattgtcagaactagtgtggtttgtgatgcttgcgctgtgggccacacctctgcaagcaggagggaaggaatgaggaacagccttctcaggtctgaatcctcaaaaggaggcctccaggtttctcctgttctcacgtccctgttttcattcctgttggcctccaaacattgcagctgttctctcctaagccattttcccctgttgcttagtttctttccctttcttccaaaatgggattccctaaataagtatttgggccttttttatttaaaagattaaactgtagatctaagtaaagtaagactgtgcagaagaatgacaaacatttgagaaatttcagagttctccatagccactgtcccttgtgcagagttctagattccctatcagatagttcccagaaacccaggggccaggcatggtggctcatgcctgtaatcccagcactttgggaggccgaggcgggcggatcaccagaggtcaggtgctcgagaccagcctggccacatgtcgaaaccctgtctctactaaaaatacaaaaattagtcgggcacagtggtgcatgcctgtaatcctagctactcgggagaccgaggcaggagaatcgcttgaacccaggaggcagaggttgcagtgagctgagattgcaccacaccactgcactccagcctcagcgacagagtgaggctgtgtctcaaaaaaaaaaaaaaaaaaaaaaaagatagttcccagaaacgcttagttcttctcttgccttctttttttcctgaaagtccgctcagaactttgccattctctggatcttctggtgaaaacagctttcatttattgtatacctgctgtatagcaagcattggactaaatgctccctgtatattacggggttttaaaatcaaaacactccagtttggttattattacttccactttacagataaggaaattgaagctcaagtagattgaaaggcacttatccgagatcttacagctaggatgccccttctttattaaaagtccttgatatagacataggcctgaggaaacaacagcagtcacctcaaatgatttcttcaaataaacttttttaaatattttaaataaaaaatatagatggggtttcaccatgttgcccaagatgatctcaaacacctcagctcaagcgatccttctgcctcaacctcccaaagtctcaaatgatttttgagaatgagatggactataaaattkggaaaaaggtcagaagagaaggtgaaattgtaggtcattcaggtaaccccaaatttctacgctgtagaaagggcagccccaatcctgggaaagtttagaaataccattctctgtctcctccccttttcaggatcccgaggcttttgtaaaacagcatcctgatcatcttggctttctcacctgcctgctgctagtacaacaatgaaactaagctggagctggaaacccgtggacatatacccgttctgtcttttttttttttttttttttttttttttagatagagcctggctctgtcccccaggctggagtgcagtggtgcaatctcggctcactgcaacctccacctcccaggttcaagtgattctcctgcctcagcctcctgagtagctgggattacaggcgcgtgccaccacacccagctaatttttgtatttttagtgaagacagggtttcgccatgttggccaggctggtcttgaactcttgacctcaggtgatccacctgcctcagcctcccaaattgctgggattacaggcatgagccacggcacccggcctacccattctgtcttaagccagatggactttggaggagcaggtagtggggccccagtctgtccattctcactatagggcactgtttactctcaggaatttcttctttttacagttaatataaagcaaaactgcaggtgacttgatttttaaacccacattttagtactttggggaaaaaatagcattttgggtttggtgctctgtttagagctctttattgtggtcatgaatggagtgggaacagaaggcattgatatagtaagttggccagcatgtattctttgagagtttactgagtgcaaggcactgagggtacagagttgaatctgttgtggtcgttgccctcagagcctcacagcctaatccaggagaaaggccgccatagtccagtggggtaaatgctgtgatgggatatgttcagagtcctgtggacacccagaagggggttacctaaccccctcgggttagtcagagtgttctctgaagagacagggtgtaaactgagtgctccagagatccggtgagcagtgtatgaggagagaaagtggggaaatgtcccaagcagaggaacctgcatgtgcagagaccccgagggaagagaaaacatggtgtgtgtgatcagtccgtatttgttgactgcctactgtgcactcatgtaatcctgtgagaaaggtgtctgctgaaaccagctcagaggggactacccttagatcacagggctcaagcttaagcggattccacatcctataactcatacattaccttccatctggcctttagactaggctgtggagtttagggccaagccctgctaccctggttttctcactgttgcctctgaaggtgaaagctgcaggcacaccccctaggaatcacacaaaagactggggttttccctccgtccagagagtccgggaggaaagctgcccctcggagccactccaagttgtctcttgccctctcctagcagctctctgggatgaactggcctttcccaccctgggtgaggtgggaggggtcctcattttagagaaggaaaagcaaagatgacacaaggtgaacctgtgacttgggatgtttcytgcctgtgttccagtcccacctctgccactaattatggcagtgaggaaatcacgttagtctccaattatcttcagttactccttgataaaatgaagagagtgaccaaggtcagcagtggtaaatatgggtatgtgtgctgtccccatgcagaccttcacagtccctttctgtagacctcaaaacctacacacctctttatcacattctccccagacaacgctcttcctgccaagacaagacgggccctcaacatccttctcagcataacactgcagccatggaaattatcatgagacgtgaatcctctttgctccaacaattgtmcggctgtgacaattctakgaaagtaacacaggcattgactgcctgctcaccaatggttgttccagcagcctccagggagcaatgatttkgtttgaaatctgggatcctgggcacaagatgttaccaaggaccccctcttggcccttggttcattacacaatcaatagccctcccagcctccagccagacaggagctgcatggttgtgtttttacctgtcaaagagatccaagcagcttgcaggtagggactgtgcccccaagagttggtcctcagcaagttgagtgacagactgcaactcccttgtagtggagtttccctggtgtcagcagatgtagcatatcatggggcctgcagactttctggtcctcttagtttagggtaagtaggggattgagaaggtttctttgccaactgggtagaaacttccagaagttgccctaagtctctgattccttcagttcaaaacaattgtgctaaagagccaaaaaatgagtcctgaatggtgggagtcctggaagccgtaagaggygcagggagggtgtggctgtgtccagcacaccaaaccacctggaacaaaggagctttgctcaggcaaaggagctctccccgagagcccaggactcccttagttccctgggagccaggcccttacaagctgcgagctgaggaacttcattccttcacaattgcctagttgtgccctgcttattaattattagtcaaatcccagaacaatgtacctagcacaccaggcatttcactgaatcacagaaggcagtttggtgaccaggggaccacagacagactggggaggaccacaggagggtcagttacattcacccggtgccctgtgatgacacaaacgttcttgattctgtactaagtcggtgccctgtgatgacacaaacattcttggttctgtactaagtagacgagaaagtctctggccagtgacaatttctccctacctcttcttcctgctcaaaatgataktgaccgtttgatgtgattgagtaaaagatgaaagataagtacaaatgattgctaattaaatgtggaacgcaggaaagatatctcagcagagctagctaatgcccaccttacacagcaagtataactgtgccagtccccagggtactggcctcttttcccccctctcaaaaggctctttmttctgcctgcttttgtctcccttgtacttcatatggcatcacaggtgtacagccttggcctcaaaggagccattgtgaccttatccaggctgggatctgttgattgaggacagtggcatcccctcgagttgcatggcgccattacaytcacggaggacgtgaacggtatgggggaagcaatttgagatctagccaggctgggttgggtgcctcatttgtactccaaaacatagccactgtttcctttggtgagttttgtttgtttgtttttttaaagaacagggaagaaattgctatcattacactagaggtttaactcttggaattcagacttggtccctgttttccctcctgtctcagcagaatggtatccttgacaacatggttagcactgtctgcaggaacagcagtgtctgtggtattgatggcattccctggggcaggccaaggctggcctccctggtgagaggcagctggacccccccacccccaggcttgcagcaaatgtggggccagcccccgacaccatccacctgtgtttgcagcttcaacttaacttcccatctcctaaaccctcacccctgcttggccctcttcactytccttctctcccacttcagtgaatctcaaatggcagagctgctgggcttcccagaagacaaagaagagaacgaggggcccagagcatcgtttctcaaactgctgtttggggcaggctgtgctgtgaaaatactgtaatgttcccagcccacattaaatctggaaagctctggatgacacaggccacatgggtttctttattccgggacttctcagagcctttatgactaacgtgtagtcagaatcttagaaaaggggcttagtaggcagcatttcccaaacaaattggatcgcaggaaatacctaacagccaggtgcagtggctcacacctgtaatcccagcattttgggaggcccaggcgggtggatcatgaggtcaggagtttgagaccagcctgaccaacatgataaaaccctgtctctactaaaaatacaaaaaaaaaattagccaggcgtggtggcacgcacctgtaatcccagctactcaggaggctgaggcaggagaattccttgaacccgggaggcggagcttgcagtgagccaagattgtgccacagcactccagcctgggcgacaaagcgagactctgtctcaaaaaaaagaaaagaaatacctmacagtatctccaagaaaaattcagcacacacagcgtagtgaatgctggtgtagggttcaacagcctgcattttggagtctagcttaagatcaagactcttgagtaaattatttctstgagcctcagtttcctttccattaaatttgggtgataccaccctccacataggcattttgaggactgaacggcagtcagtcctcatgtatataaaatgttaagcatacttggagctcagtaagccatcgacataagttgtcatttcattgttcagtgaaatcacccagaataagtttttcgactctcctagactccacccacccagccaactcacagttstgtatgtctagccctgagcactctstgctstgtatccatactgcaggtcacstgtgtcccctctccaaatctactcttccttcctccctagctcagcattcagttgtccaagccaaaggcctgggagccatcaaagacttctcttccctcccgccacatggaactgatcaccaagtgacattagtgtcgcttatttaagagattttacattattgaatcctctccattctcctggctcttatgcagattacacctgttgcctggtctactcctgggtcagattctttgtcattccctctggcaggaaaaccttttgtcttttctccatccgccctgtaaatgcctatttatccttcaaactatggtatcctttcttccaaagacccttttctaatcttctgtttccttcctcccaccaggctagacactgtcagccaacctcagcaccacaagcctccctctattatagcccttctcccagtgtttccacggatgggttcccagtccatcaaggccctgagaaggggattttttttttttcccctgagacagggtctcctgttgcccaggctagagtgcagtggtcattcacaggtgtgatgatggtacacaatagccttgaactcctgagcacaagcaactctccttcctcagcctcccaagtagctgggactacaggtgcgtgctaccatgcccacctttattcatcatgaaaccccttggcacagtatctgatacttcgactgtccataaatatttgttgaattacgtttacttgaattttccaaaacgttgctgtcttcctttcagtgactcagtgattcttttcagaggtataaccagggaattgttccagaggtttccttggatattcctacaactgataacagctgtcatttcttcagcatctactgtgtaggtactaccataaatgctttacatacattaactcatttaatcccgtgaactgagttctcgtgttatcccattttacggaggaatattctgaggtttatctagctgataaatgaccaaggtaggattcaaacccagggctgtctgcttcactcaagatctgtgctctacccatcatctatgaactgagatctacctgtattctcatcttgaccacggtcatctagatttttaagaagtgcagtgtcactgcacgtgagatgtgtatgcctagactgaatgctcttaaggataatctccatctttatttgagcccatcttgcaggagtattttcctaaacagcctaaaacgaggaagagcaagttcaaatagctaagtccctttggtttgggccctgcgcctgatttcctaaatgactggcacttttttttcttttgagacggagtcccactttgtcgcccaggttggagtacagtggcgtgatctccacttgttgcaacctccacctcccaggttcaagcagttctcctgcctcagcctcccagatagctggaactacaggagcacaccaccatgcctggctaatttttgtattttttttttttttttagtagagacggggtttcgccatgttgatcaggctggtctccaactcctgacctcaattgatccaccctcctcggcctcccaaagtgccaggattacaggcgtgagccaccatgcctggccatgactggcagttatgccacattttctcactagtgagaaaagttcgatcccagacatttgctcaacagtgagttaagactaaaacttctctgccctctgggagctcacagtctaacaaggagatagcacatatacacatattctgactgcaraactaggtgataagtaaaaagagctctgaactcagagtctgaaagacctgaatccaagtttaaatttgtatctgcagttccaaaatcctgaaagcgctggaaactgacaggttttttctataactcatttgaaggaaacgatctaacgaggtttttatgtggtctttattcatcccacttagcctgagtattcctacattttgctgcagaaacattcatgtatctgatcacagggtgctacaacagcccccattgggtatgtagataatacatggccccaagagttttggaaaagggattgtgaacctatgtcttgtcctgatcaattgacaaaaaatgtatgaaatggcttcacaaactaaacattagtaaactcatatgagatagtcttaaatagcatgatgtataattctgtacaatgggaatacygagcaagtgattttttttttttctggactaggaagagggtcaaaagatatcttaagggaagtaaactttgaactgggccttgaagggtgagttgaattcctcacttcatagagaagctgtggaagaaaacattctgggctataggaagaacgtatagaaaatgtgcagaaaaaatgtctttaaacagcttgagcacatgaattttgtcagcttacagaaaaactctgatgatctgtgaaaatacaggagagaagcactgtggataatacaaaggggcagctagtccgaaatccatttgctctgggcaggatttttcttttgaatgcagacttaatacacacattgagagtgaaacatcactatctgggctgatgcctccttgcttagtgcccacctgttagcgctccctccatctccccataaggcaacggcagccggtccagcctgtgctcatttcactgccctctgcttggtgtggggtcagccccttacctgctggcttctctagatcacactgccaggttcaaatcaggtcagccacttgctactttgtagtggccataagcaagttgtttacctcttagagcctttgttcctcagctgtaaaagcagaacaatagtatgagagctattgtaataggaaggctggcaggtaaagcacttagcagtgtgcctgactggtaagcactgaataaacagtagttattactattacaagggctccccgtcctccagctatgtgtaaatacatacattccttaattaagtagctgggactacaggcacacaccaccacacctggctaatttttgtatttttagaagagatggggtttcactaggttgaccaggctggtctcgacctcctgacctcgtgatccatccacctcagcctcccaaagtgctgggattacaggcgtgagccacygtgcccagctattataaaacatttcttcaaaatcacacttttaccacaagatcaagcctccagtataattaaaaggtcagatttctgcaggaagtaggtggaattacatcagcttagttgggtgatactgttgcctaatgctaaaaaccttgttggcagttatatgtgtcttgggtaagtaaaaatgaattactacttaataaatgcatttgggcagagggaagcattgcaaacatgaaatctaaggggtgtggagaaagaaagaaagcagtcactggtgattaaaaagtcacaggccccatgggtccagtacactgaccagtagtatctggttggcagagctccttttttaaaaagcttttttgaaataacaaaagtaacacatgcacattgccacttggcctccctcaaaagccttcttgcaggttttgcccattaagcaaagtttcactgggataaagatgttgccaccatggtgtccaagacccaccatgagcagagggacttaccacttaacatggaagaggcttccagaggggatcaggtccaaaccaccactgcaactctgttttacaaatggagaaacagaagcctagagcagagaagaaacttgcccatggtgacccaggcatcctgcagtggagctttatacccaggaccttcagccctccacccagggtcttttctgccagacaagaatcctcctccagaagggacatcactcagagtgaatcacagccatccagggagttctttgtgaactacataggccatctccccattacgcccacactctgcaactaacagaaatatctcctctcccctgtatatgttaggaccaagaataaaatcaaacatgtggaggacatgtcagctagcctgggatttccaagataccccggttggtaagaactacttggggtgccctcatctggagattctggcttagtagatcagaggtgggcctgataatttatatccatgagcataccaggtaattcttataactaagcgagttttggaaaacacagggctcatctaggccagcagaggtttcctgtcccagagtgggcagtggggttgaaagaccgggcacagtggctcacacctgtaatcccagcactttaggaggccgaggcaggcagatcacgaggtcaggagttcaagaccagcctggccaacatagtgaaaccccatctctactaaaaaaataaataaataaaattagccgggcgtggtggcaggcacctctagtcccagctacttgggaggctgaggcaggagaatcgcttgaacctgggaggcggagcttttagtgagccgagattgtgtcactgcactccagcctgggtgacacagtgagactctgtctaaaaaaaaaaaaaaaaacactgtgggttttccacttgcagttaatgagagtcaacctctatcctatgttgatttcttttttttttttttttttttttttttgagacaaagtcttgctttgtcacccaggctggatggcacaatctcagctcactacaacctctgcctcccacgttgaagcaattcttctgcctcagccacccgagtagctgggattacaggcgccgaccaccacgcccagctaatttttgtattttagtagagacaggttttcaccatgttggccaggctggtcttgaactcctgacctcaggttatccgcctgtctcggccttccaaagtgctgggattacaggcgtgagccaccacgcccagcctcctgtgttgatttcttatggtacctctcttttataacagaaccgtaattcctgggcacacatggcagctcaraaatgttgcctgacctactttgaggagatgatttgagcgaaacacccattctagcctggatgacatgaacatctccgtttggctttgtgcttagactcaagaacctggagctagctgctgtgagaggatcasatgtccgtgtgaagatgctggcggcccctatcaatccatctgacataaatatgatccaaggtaaccttggtttctgtggcttatgttaattggcttttttgttcagctgccacctcattttcattcctcctcaggtgtgggtgtgaaatgcctgtgattagcagcagctgttctccagatgagccgtctgcaggctgtgtcagccctgtctggcctcccttttctggaatgtgwggctttttgagaagattgcagtggggagtaaactaagcattgtgaagtgcctgcgacatgctggtttcatttcatatgttacctgattttcatgataaccatgaacactaaagaatattgtccccctatacagacaagcaagctaaggctcagaggttggttaggcagacagtccaaagcagagcccagatcaggcctaggatggcgtggactcaagtccatgctctttcactgcccaaacatcactgrttgaccctttaatgctcttctycctcaggaaactacggantccttcctgaactgcctgctgttggagggaacgaaggtgttgcacaggtggtagcggtgggcagcaatgtgaccgggctgaagccaggagactgggtgattccagcaaatgctggtttaggtgagtttctccaggtgtcagctgcctattcrttcttccagatcctatttcacccactctgtcggcatccactgattggccsagtgtacctgggtaatgcagggtttattttttttatttatttatttattttgagacggagttttgctcttattgcccaggctggagtgcaatggcgcgatctcagctcaccaaaacctccgcctccccagttcaagtgattctcctgcctcagcctcccaagtagctgggattacaggcgcctaccaccacgcccggctaatttttgtattgttagtagagatggggtttcaccatgttggccaggctgggtctcaaactcctgacctcagggatccgcctgcctcggcctcccaaaatgctgggactgcaggcctgagccaccacgcttggccttgttttgtttttttttgagacagggtctcactttgtcacctgtgctggagygcagtgacgcgatctcggcttactgcagcctcccaggttcaagcgattctcctgcctcagcctcccgagtagctgggattacaggtgtacaccatcacgcccgacaaatttttgtatttttagtaaagagggggttttatcatgttgaccaggctggtctcaaactcctaacctcaggtgacccaccactcagcctcccaaagtgctgggattacaggcatgagccactgtgccgagtctgaattttgtttatacatggagatgagccaaaattcacttcatgtggaggatgtaaaatgaggaaagacacaaaggtgagattgggaaatggtggaaaatccattgtagcctcagcagagggtttgcatatgggagaggattgcacgagtgagaaagaaggccagaaaggcaggttcaatcacgtgagcccaggagttctaggctacagtgagctatgatcgcaccattgcactccagcctgggcaacagagtgagaccctgtctatttttttttaaaaaggtagcttgtgtccacatggggtaaggccctgcccaagccaagctaatgagtaggattttgtttgatatattataaggagtcataggtgagttttgtttttagcacttaacagttttcaaggcacrtctgttattgatcctcacagcagctacaagagggaagcagggcaggtattatccatccattggacataaattgaagcttgagaagtaaagccctggcccaaagtcaaacagcaaaatgagagtgcccactggattctttctcctgggttcccattacacaccagtgttatgatcttctgggttgtaacttacagcgacccagctcaaacttgctttaaaaaaagaagttggggccaggcgtggtggctcacgcctgtaatcccagcactttgggaggccgaggtgggtggatcacctgagatcaggagttcaagactagcctggccaacatggtgaaaccctgtctctaataaaaataaaaaaattagccgggtgtggtggcatgcgtctgtagtcacagctacccgggagactaaggcaggagaatctcttgaactcagtaggtggaggctacagtgagccgagatcatgccactgcactccagcctgggcaacagagtgagactccatctccaaaaaaaaaaaaaaataaggccaggcgcagtggctcatgcctgtaatcccagaacttcgggaggccatggcaggcagatcacctgaggtcaggagtttgagaccagcctggccaacatggtaaaaccccgtctcttctaaaaataaaaaattagccaggcatggtggcgtgcacctgtagtcccagctactcgggaagttgaggcaggagaatcacttgatcccaggaggcggaggttacagtgagccgagattgtgccactgcactccaacctgggcgacagagtaagactccatctcaaaaaaaaaaaaaaaaaagaaagttgatttgtggaactgggaagtgtaacagagtgaaagcttcgggttcagctagatccaggaaccccagtactatcagagttgtgtctctcacttgttcttagatgagatctccccacatattgatataatcaaaccaacaaatatttattggccactctctttgtgccaggcactgctctaagcacttcatgtatattaactcaattgttcccacaacatgagatggatacctcatcattcccactttgcaggtgatataacagtaaatgcagcagaaaactgtaaactgttaagcagtttgtccaaggtcacccagccaaaagtgatggagttagaattcagatccactctgatacatacctctcatagatggccaccagcagcctgaggttcatatcaccctaaaaacaaacaaatgagcatatcctccacaatcatgtccagcacaaccatatccatcccccagaagggccctgaatgggccttgcccatccctgaaccagtsccctggggcggggtagggccactccggttgctctgattgagtctctcaccctcctctgtgatacaggtggggccttgtggttgacagccccagagattaggaaggagcacttgtagagagaaaaagatactaggcaggaaaaaaaaaaacagtaataggagtctactacaagctctttgcttctctgagatcaggaaggctgccaagaatggctccaccgtctcctacacccacctggcrgtgaaggagctcagccatttgagcaaattgagagctgcaaggattcactggatcctgatgccagtgcttcgggccagcccccgtgctaagtgaaggtcctatcaaggtgagcagacagttcctgccctcagagtgctcttggctggcagtgggaggcccagaaatggaaaaacaacacttaatacaatacagtattacaagtgccataatcacaggattgacaccaagacaagagtcctctatcttggaaagcgttaagaaaggcttcccagagaagtgatgcttgaactcagtctggaagagctgctggaagtgcagccagtgggctaggtgaggaggggcttcccaggcacagagtgcagcgtgtgtgaacgtaagtgatgagagaaggcacagcactggtggggaactgcaggtagctcagggtggctggctcatgggtgcgagtgggagagaagtgagatggagctggaaaggtggggtggggctgggtcccagcggtcctgcatccacggtgcgaggggtaccaacagagagttaagtagaggaatgatttgataggatttgtgcaatgcagagaatggtctggaaaccattggtctggaaaggcagagggtggaggcagaaagccagtgaggaggtgggcaaacaagtcaggcttcagatgatgaagtgtgagggtctgaataagacagtgtcgtagggctggagaagagggcatggagtcaagggctaaagtaacaggacttggcaatactttcagtttggagaagagaacaataaaggatgtctgccaggtgtatgggtaattgtacatgtggtggtgggggtacccagaacagggattcttccctggagaaaaggtgattcttttgttttgttttgtttatcttttgagacagagtctcgctctgttgcccaggctggtgcaatcttggctcactgcaacctgcaacctccacctcatgggttcaagcaattctcctgcctcagcctcccgagtagctgggactacaggcgcccaccactacacctggctaatttttgtacttttagtagagatggggtttcgtcttgttggccaggctggtcttgaactcctgacctcaggtgatctgcccrcctcggcctcccaaaatgttgggattacaggcattgagccactgcgcctggccagcaggtgagtcttttaagcaaggtgccagccagagaggatgaggattttataattgtgaggactgcaattaactcagtgtattcagtaaacattttgtgagcatctgcagcatgctgggcttgaggacacagcagtgaacagacatggtctttcttctcgtgaagactgccatttagtaagagtggcaactattaaacaggtaagttcttagttggccacagcttggtcatttttcatggttctgagctgcctagctgttgctaagcccatagccagccttttcccacgtgcagccaatcccaggggagaccagaccagatggtgtggatagatctttgccaactgactttctccttgggaaatatgcaaaaccttcctgaggaagcacagagccgtagaaagtgcactggctttggaatcagggggcaagttctctttccagctccgctgtatgacctaatttaagtcacagctactttgagcctcagttttttcatctcgaaaatgggactaattgtcactgcctagcatgtctcagcagtactcaactgagaatatatgcaatgatctttgcaaatgccaaatttctgtatgcattagatcaggagttggcaaatttttatcttaaagggccaaatagtaaatattttaggcttcgtaggctatatcatctttgtgactacccaactctactatcgtaaacagccacaggcaatatataaacaattgagtgaacatggctgtgttccaataaaactttatttacaggaccaggcatggtggctcatgcctgtaatcccagcatgggaggccaaggcgggcagatcgcttgagtccaagagttcaagaatggcctgggcaacttggtgaaagtccatctctacaaaaaattagcgaagtgtggcagcgtacacctgtagtcccagccactggggaggctgacatggaaggatagctcgagaccaggaagcagaagttgcagtaagccacactccaacctgggcaacagagtaagactcttgtctcaaaacaaaaaaaaaaaaaaaccctttatttacaaaaacaagtggtgaggcagatttagcccacaggccacagtttgctgacccccaagttcaacaatggagatggttaagggtcagttgcatatgactgaggaattgggaatcctcagagctaaagtctgggaattagcatcattaaaggaaaacaatgtgtgttatacacccactgtgtactaggcatagtgatagtctctgtacaaatgtctttagtttaatcttcacactatgacataagtgttactctctgcatttcacagattagggaaatggaaactcaaaaaaggtgaagtgatcattcaaagtcacacactagtgagtggtagagccagggtttttaagcaggtctctccaacttcaagcctaagagttctacttgaaaccctgaaagcccttgtctctgaccacgggtgctgcctccctcccacccagagtctcttgagaagaggattagggactgctaagccccagaaatccatatcaagggttggatttccattgtcgtgccataaggggaattagaaaatgccctggatttcatacatagaaagccctgcactaagcatttggtgcacggtagagtacagtaagtgttagctgagatgaatgggaacgatgatttgaaggccagtccgggggaagcccacaggatgctggggcacttcctggattacagaggaatcctcgccttttcagtctcttattttctcagccatagacctactctaggattgacacagccttctataaaaagtgttcctgggccgggtacagtgactcatgcctataatcccagcactttgggaggccaagatgggcggatcacgaggtcaggagatcgagaccatcctggctaacacagtgaaaccccatctctactaaaaaatacaaaaaaattagccgggtgtggtggcgggcacgtgtagtcccagctacttgggaggctgaggcaggagaatggcgggagccttggaggcagagcttgcagtgagctgagatcgtgccactgcactccagcctgagcgacaaagcaagactccatctcaaaaaaaaaaaaaaaagtgttcctgcctcctgtccccagttcttggtccctaaagcccacattgacatccccgtttcctatagcacagttagtgattacccaggctgccccctgcttcccacagctgacccacataggaccaggacaccattagaatcccagcaactggatagtgagcaggcatgcccaagagctttggaagcataggccaagggcsccgagctgccactgtgaccagatgctgagccaacaaggctccaagcaatttccctaaggtgacacagtgaggacactgtggaaccaaggctggagtctctctgactccaaagcctaccctcttcaccccttcttcatacaagatcctgcctgtgtgagtgcagacccctcacgcagtcctcaccaaatcctattgattctgtctttaaaatagaactcaaatccatcttctgttcctcatccccactgccaaagtcccagactaggcagccatcatctcatacctcgacccccacaaagacctctggcttccacgctgcccctccccactccacagtcttcacccagcaataaagtgatcttaaagcatacatcggatcatctcagtctcctcttaaagcttgttacaggcttcccactcactcattcactaaaacaagatcagttctccataccacagtgctgaggtcatgttctcataccacaggttgtgacccattcgagaaatcaatctagtgagttgcaaatagcactttttaaaattaaagttgagcagaaaagaatgaaaaatagcagagtatcacacatagtaagggtaagtattctgtgaaacacaggcttgtgttacacgtacattcatgtatgtatatgtacgaattcacagtggaactcatggttactgtgggtcagaattctgaaagtctaatatcacctgcccggcccctgctgcatcagccaggccagccatgtctcaagccactcttcccatcactctccaccctgcggtgcagcatcatcccatcccagtcctttgtcctgctacagcatctctgcatctgctgcatgccctacctaagatgttctttgtgtgctctgagacggtagcacctctatcctttcactcttagcctgtcacctcctcagagaagtatccttgactcccatctaaagtaattctcttgatgttcctgtctctttataatttatcattatcatatctgctttttttcacctgttcgactccactagaatgaaactaaggaaactgtctgtattgttcaagtgcctgggtgcaagataaatatctgtagatggaaggaaggcagcccagatacccaggttccagctccaactctgcctagataagccagggggctctgggcaagtcacttcctcatttcctcccctgttgcrtgaggggttcaaagtcgatgttcgataagggccttctcagtactgacattctagaattcttttgtctggaactggaatgtgggctgggagttgatgctcatttctttcaagcttatagaatttttcatttccttatctcatttgatttctacagtagctcctggaggaggcgagtcaggctgttcttgcctgtgctatttacacattagagtaactaaaactcagtgacaggaattttctcaaactagcagaatagcaaaaccaggtttggcatctgtgctcttgacttctacttttatgctttgttgcctaaaactacctgagtcaggccgggcgcagtggctcacgcctgtaatcccagcactctgggaggccgaggcgggcggatcagctgtggtcaggagttcgagaccagcctggccaacatggtgaaacccatctctactaaaaatacaaaaattagccgggcgtggtggcaggtgcctstaatcccagctattcgggaggctgaggcaggtgaatcgcttgaacccaggaggcagaggttgcagtgagccgagatcatgccattgcactccagcctgggagacaagagcaagacttcatcttaaaaaaaaaaaacatgtgagtcaacctgctctggatgagaagaatgaggactgtgtaggaaaaagggggctttctcagcttctcytgccctggtggtaatgttactactgtcttacccttagattgcagcagtttgaggtcattaactacctgcacggtgacattaactaaatctaatggtaactcagagaagcagcctctctgaatcgcccttacaatggtatttggcatattttgttttggtttgttttttgttttttgggtttttttgagacaggttcttgctgtgtcaccgaggctggagtgcagtcacacaatcatagctcactgtgtccttaaattactgggctcaagcaatcttcccacttcagcctcatgagaagccgggactgcagggcattatgcccagctaattttttttttttttttttctgtagagacaaggtctcactatgttgcccaggctggtcttgagctcctggcctcaagcagtcctcccaccttgcctcccaaagtgctgagattataggcatgagccaccacaccccatttttactacatgtttaagataagaatgactgtctattttgggccaggcacagtggctcatgtgtgtaatcccagcactttgggaagccgatgcaggcgaatcacctgagaccgggagttcaagaccagcctgaccaacaaggcaaaaccctgtctctactaaaaataaataaattagccatgtatggtagtgcatgcctgtaatcccagctactcagggggctgcagcataagaatcacgaacccaggaggcggaagttgcagtgagccaagatcrcgccattgcactccagcctgggctacagagcaagactctgtctccaaaaaaaaaattaaaaagaataacaatctattgtgcataattatcatgargactcagacattcagaggaacgtccagattttcttctttttctaaacatcctggatgctatcctggatgcttccagtggatgctacccactatcctggatgcttcttggccaaggagggtgagctggkgttgaatgtgcacagggctccttccttatgatcctggcttcatcttctgactcaggaacctggcggaccgaggctgtgttcagcgaggaagcactgatccaagttccgagtgacatccctcttcagagcgctgccaccctgggtgtcaatccctgcacagcctacaggatgttgatggacttcgagcaactgcagccaggtaggaacccacaggttgggggagcaggccagggtytcgcarctagggtgccactcacatcctgaccccaaggccaggagaacttgcaaggtggaggttttgagggggtgatggacctctcacctgggtgaatgttgttgctttcacttagaaagatgttagcttggttcctaggaaacatgctgaaacctcaygaggagtacactctcgaaaactgctgcagggtcacattctctagagcttgggattgaattctgtcattcagcaaaaatgtgttgagctggggctaagctctgggatacaaaggcagacaagatagacacagtccctwtgttttcaataaaatgctgaacttagtgttaataattccactcagcgtttacatagcactttccagttcacagaagtgcgttgacaggcattatccccgttgagtgcatgaaatcttcacagcattgcagtaaggttggtaccatcattggttaagagctcaagctctgggcagataacctgggtctgaccccaggcttcacctttccctgactgtgaatttgcctctcaaatcatcagatttttcttctgtaaaatggagaataargaacgtggagggtgaaacactacagcataatacttcacacagtgctgggcatacagtgcagagactgtccgctgcttatattcttcttccctttcataaatgggaaaactgaggtccagaaaggtaaactatttgcatgagatcagccagggagtaaatgacagagccaagtgtttttatttgggtttctctgaaagcagagcctaagaccagcactgggtgcagagagtttgtttgggaagaagaaatgaaggggagtggggagagtgagacagagatggaggcaaagcccatgaagcccggttactgctgcgggcaactactgctccggctgtttttttgagacagtcgtgctctgtcgccccggcttgagtgcagtggcgtgggctcactgcaacctccacctctcgggttcaagggattctcctgcctcagcctcccaggtagctgagactacaggtgcctgccaccatgcctggctaatttttgtatttttagtagaaatggggtttcaccatattggccaggctggtctctaactcctgaccttgtgatccgcccacctcagcctcccaaagtgctgggattacaggcgcgagccacccacccccagccggcctgctcagtcttgctggggccctctgaagactctcagaacccactgcagaattaacccttaaggccaggcatggtgtctcatgcctgtaatcccagcactttgggaggctgaagctggcagatcacttgaggtcaggggtttgagaccagcctggccaacatggtgaaaacccgtctctactaaaaatacaaaaattagcccggcgtggtggcagcgcctgtgaccccagctactcaggaggctgaggcaggagaatcgcttgaacccgggaggcggaagttgcagtgagccaagattgcaccaccgcactccagcctgggcaacagagcaagacaccatctcaaaaacaaaacaaaacaaaacaaaacaaaaactaacccttgaatgatgagaggctgggccagttttccactaattctcacaccccattgtttaagggtcgccctaagggcattaacctcctgggctgcctctgcacaccatgcacatccatgcacatccgtgagccgcagtggctgtagaactcacccaagccacctctcataccagcgaagaaactraggcccacagttgttggagtgtgatgaaacatggtgcccagccactgtccaaggcctggctgaaagccgatgccagttcccacaagagaaatataggtttcttgcaactatggcagatggttcctgggagcctttggtggagaaagccagtggctgtgaccagggacctttgctggagtcctagtgcagcagacactttgtttgcttgcrtcccatgccctaaagccacctcccatttaggctgcagctgtagtaacagatctaggcatttcgacgctgcccaccctaagtacccactgcacacctctccactttcctgcctcaaggctgatatggcctgaactagatcactgttgaataaacttaggatcttgacacatggtaagaattacattttatattgtgatcagtttatacaaataggaatatatatataatggaaaccaaagtttcgtgaaatacccttactatgtgtgacatactctgttattttttattctcttctcaattttaactttaaaaaaaaaaggtgcttgcaaccaactagattgattcataatccactggtgggtgacaacctgtacgttgacccctggtgaagacgagtgggcattcttcttccaggaagtcctctatctctagtttcagcccgttgtgtgacagatccctgctgcctctcaaaaaccagatagcatttcaaattcaacaaagcactttcccggacacgatgcatttgactctaatcgggggcactttttttttttaatagagggagtctcgctctgtcacccaggctggagtacagtggcgcgatctcagctcactgcaacctccacctcccgggttcaagcgattctcctgcctcagcctccctagtagctgggattatattttaagggaaggaaactgaagttcacagaggtcatgacttgccctgtctgtttagttacaatcattggtgaaactgagactcatgcccagatctgtctcattccagagcccacatttttcccagcatgtcacaccgccttccccaatggccaggtccaaagctaaacctgggctttgccacagaactgtaggaccctgtttcaggggctgccagtttctccagcgcagctgtaatcccatttcaaggcagtgcacctttattaaacactgcagagaggaatagggcatgacccttccctctcaagaagctgcaagctgttgatagaaatggacctatatacaatgaagtgtaagatggggcagaccgtggtatgtgcattaatacagatgcccacagagcactgtgggagcacatagagggaacaatccaggaaggcttcatgaaggctgcacttgagctgcgcttcaaaggatctacaggatttcaataggaaggaagagagaaggagggaaacattgcaaaccaaggaaataacctaagtaaagacttgaggacataaaagttgggaggatgacgaaggctataaaatattttacatagcagggcagggtctaaattatatccagtgtagatgctgagttgccaagtcctgggaggcatcrtgagtgttgtggaagtttaggaggcattaggagaacagtgagaaacagtggaaggtctgagaagactcagcagccasgtcctgggtccctgttgagcctgaggactcccttgcctacagaaggatccccggctgggagcctttgacctattgcagatctatacagggcttgatttggttctcttcctggctccacaggggattctgtcatccagaatgcatccaacagcggagtggggcaagcrgtcatccagatcgccgcagccctgggcctaagaaccatcaatgtggtccgagacaggtgcgtggggaaggaggcttcatcccagaccatgtcttgggtctttcccacctcccatccctgcggtgcccagttgtccaccagagggckcccttgcataagcataaactggctttaggcatcgctaacagttggcggctgaaacagatgagtcagtcctaagaaatgaagtccagctggcttttggcgataggatgagtgaatctgacatgtraagagagggcaggaaggaggtggagactgcccttactgaatagctaagactttctgagactcttggcttgtgataacctcatgttttcaaaaccccagttgatatttgggaatgatttgagctgtattattctttctgtgaactgtctaacccaaggcccctttacccttgcttttgtgtggtacttggaagtgcgctaaatacagacgtgaaggagacaggggcaggtttgtcatctgtcttttacagatgaggaaactgaagtttcagggagcagcttgccctggaagacacagcaagtcagtaatagactcggtttcctcacttactctctttccatcatatcgtccagtttctctaggcctcactgtccatgaatgtggctgtggctgtcatggaagcccactcttagtataatcgacaccagcttcagttcctcagttgtactcgcaaaaataattccatttgccttaaccaaagagacccagagccactcctggtctagactgtgtatgtccaacactctgaagaaccacttgaaaagaggggggaagtggagtttgtcctttcagtagaagaaatcaggaagttaagtgacttctccctgggcacagatggcttctaacactattgagctgtcagggcctgtgaaaaccacccagtctcactctgttgccagtgaggagacagccaagagctattgaagctgcatgaaattaggtggctggtccctgctcaagcctggcttaaacctaatcccagcttcctgcaaaaaraagcacgggttctcccagctgtggcagagargtcctggggggctttggtggaaaaagctggcagatgtgaccagggacctatgtttggtttccagacctgatatccagaagctgagtgacaractgaagagtctgggggctgagcatgtcatcacagaagaggagctaagaaggcccgaaatgaaaaacttctttaaggtacctaggaagaggracattgcccctccagtccacgcacatstccctgaagaaagttgacatgcattagagaaactggggactggccccattgttcctctctggaaacctccctttgcctcttggttggttaaagcccattccccctagccaggcggcaggcagcacgcattaagtgcccagatgctgggagggaggcatgagaaacagagtttaggaaacccagtatgacttgcagtttaaacgtttgtggtgggccgcatcagcccacatgtgtgactcttagaactggcaggagaggacctgaggaaacagagacacagaaagagaaagaaaagaagtaacctttcccaaccacctgccttacattttatctgatgatttccacaaaagcttttcaaaggaactgttatctgttttacagattaggaaactaagactcagaaaagaggaaatgcttaaccaaaatcatatagtttataagggctccagagagtcagagctggcctcagtctctccgaactcaaagcctcttaaccttccagaacctccaccccacaacatgcctagtaagtgaccagaccctcagccccttttcactgaaccatctggaggaaccaaagacacacactcaagagcatgcgcttcttgcgaacatttctgaagcagtagatcagcatatataatatcagctgagtcaaagaactgaaaaggggggcacacagggagctgaaacccaccaaactgcatgcagatgccctttgcctattctttcccagagaagatgagttctgccaggtcctaaaatggacaacaggattaagttgctacagaaaaggcccttcttggctggatgaggtgactcatgcctgtaatcccagcacttcgggaggccaaggcaggcggattgcttgagtctgagagtttgagactagcctgagcaacatagtgagacctctgtctctacaaaaaaacatttttttttaattatctggtcatcatgatactcatctgcagtcccagctacttgggaggctgaggtgggaggattgcttgagcccaggagggtaaggtagcagtgagccatgattgcaccactgcactccagcctgggtaacagagygagaccctgtcttagaaagaaaaagaaaaaagaaagaaaagacacttcctaagcagagaaaaaggtgagttcaaaggcataaacacacacacatatacataagtacgtgcacgcaaacaaaggcataaacatctcatttactccctccttttaacacagcacttgggcaagcttcagaccccatatrtagagcggggatgctccctcactgcacttttgttgttttccaggacatgccccagccackgcttgctctcaactgtgttggtgggaaaagctccacagagctgctgcggcagttagcgtaagtcccttgggcctkcaggtccagctcgccagagctctccaggtctttagctgggaggaccatcaagtgactgagtcccatcgccagttcgagccaagtccaggtcagcacaatgttgagtggaaactaggaccaaagtcatccagctatttgggcactggtttctcagccttcccctttgcagatgaccaaaattttggcctatccagctttatttttccaagggaccccagaagtagactgctaagctgcctgccatagaggaatagtcaaggatttataacctagggatgtctgaaaaagtcacttagtcctaacttatttaacctttcaaaatttgtattagcttttaaaatagattctaattttaaaggtaacattatgcttattacaaaacattttgaaaacatgtaaaagtgcaaaggaaaacttaagcataaaagtttcctgttggctgggcactgtgrctcatgcctataatcccagtaatttgggaggccaaggaggaagcatcacttgaggccaggagttcgagaccagcctgggtaacatagtgagaccccatcactacaaaaaaaaaaattaattttttttttaagttacctggccaggcatagtggttcatgcttgtaatcccaacaagacaggcagatcacttgaggccaggagtttaagaccagcctggccaacatggcaaaactccatctctactaaaaatacaaaaagactagccaggtgtggtggcaggcacctgtaatcccagctacttgggaggctgagtcacgagaatcatttgaatccaggaggtggaggttgcagtgagccgagatcacaccactctactccagcctgggtgacaaagggagattccatctcaaaaaagaaaaaaaaaagttacctatcaccccactaccaagggggataagccctgttgacaatattaatgcatgtccttccattcttctttcccttaatataagcttctaggccgggcgcagtggctcaagcctataatcccagcactttgggaggctgaggcgggcagatcacgagatcaggagatcgagaccatcctggctaacacggtgaaaccccgtgtctactaaaaatacaaaaaattagccaggtgtggtggcgggcacctgtagtcccagctgctcaggagtctgaggcaggagaatggcgtgaaccccggaggcagagcttgcggtgggccgagattgcgccactgcactccagcctgggcgacagagggagactccgtctcaaaaaataaaaataaaagcttcttgagctagagtgtgtgtaaaaagacacttcctaattaaagcaggaaccccctcaatagtacggattcagctagcgcatacttgctgagcacttactagctaccaggtacagagagggctgcgacactgatgtgccctctgagaattcacaggcttgatgagcaggtgagtcacgtggccagagcactgtggtgagtattcaccatgcaccagactgtgtgcagcgcttgacttacccttcccacaaccacctagacagggggtgcagttctaacctctgttttatacttttaaacaatgaggcccaggccgggcgcagtggctcatgcctgtaaacctagcactttgggaggccgaggcaagtggatcacctgaggtcaaaaattcgagaccatcctggccaacatggtgaaacctcgtctctactaaaaatacaaaaattagycaggcatggtggtgggtgcctgtaatcccagctacttgggaggctaaggcaggagaattgcttgaacccaggaggtagaggttgcagtgagccaagatcrtgccattgcactccagcctgggcttcagagaaacagtgtgtctcaaaaacaaacaaacaaaaaaaaacaaggcccaaagaggtcaagtacctgtcccaaagtctaggcagcaggagagccaggcttgaccccacatttgagcacaccgcttcagccctatacctgacagacaacccctgcggcagacctcaatcccaatgtcattgcagggggaagcgttgttacgggtgtaggcactggagccagaatggctgggttcaagcccctgctctgtgacttactagctgtgggcctgtggaaagttaggcaatacgtgaaaaacaatccaggcctccgtctcttcatctgtaaaatgggggttatataaaccctctgcctctgaagggtggtctaacacgggtccccagcccccaggccgcagaccagtaccagttcgtggcctgttaggaaccaggtcacgcagcaggaggtgagcggtgggtgagcgagcatggccacctgagctccgcctcctgacagatcagtggcagcattcgattctcatgggcatgtgaaccctattgtgaagcacgcagggaagggatctaggtcccatgctccttatgagaatctaatgcctgagaatctgaggcggaacagtttcatcccaaaaccatctcccccactccagtccatggaaaaattgtcttccatgaaaccggtcctggtgccaacaaggttagggaccgctggtctaaaggacactgggcgatatacaaattgctgtacaaatgacggatggacttcagctttctcatctctaaaacaaggttgttacgaggattccctgaggcagtgcatgcaaaatgcttagaactgtgcctggcacatagtagaagcctggtaagtgtcagctagtctgattagatgaagtgcagcagggatacagaagagagagggcttggctcccaggagctactttctacagcaggtggcagtcaaggggcacttaagaccaaactacccagcagcctcagggacagaagtacctgccctaggacagcagctccttccatttggtagttttgaaagtctaccttgtgttgtccccaaatgtgcctgaggtcatccttaatcaacagactcctagaagagccagggagtggggaggtgaacataggttaagtcaagtgaactccaggcttattcacttaaaaattatgttagcctcaatcctgtatgtcagctgacatgggggtgtgggtgtcagacagcaggtactgagaaggcacctcctgcagtgagaagatgcttgtcattgttccctgcaccgtccacatcattccttatctgtagagctgtttcctcacgttgattcttagaatgagcactggcagatgaagagatgaggtctgggccattttcactgcatcaccctaggtcggacacctgtaagtgagagcagagccaaggctgaactcaggcctcgagctcatctggggagagcatgtttcttttcagcacttaatcaaagcctgactggatgggttagatcagtggattcccaatcctggctaaacatacaagtcatccagagcgggtgtgtgtgtgtgtttaatatacattctcgtctcctgattcattgagtctgggattggacctaggaatctggtttcttggttgttttgttttgtgttgagatggtctcactgtgttgcctaggctggaatgcagcagtgcaatctcagctcactgcagcctcaacctcccaggctcaagtgatcttcccacctcagcctcctgagtggggccacaggcatgtatcaccgtgcccagctaatttttttttattattatttatagacacagggtctcactatgttgcccaggctggtctcaaactcctgggctcaggcaatcctctcaccttggcctcccaaagtgctggtattacaggtgtgagctgccatccccagcatgcatttatttattcattcattcatttattttctgagacagggtctcactctgttgcccagactggagtgcagtagtgcgatcagggctcactgcaacctcaatttcatggcctcaggtgattctcccacctcagcctcctgagaagctgggactacaggcatgccgccttgcccagctaattttctgtactttttttgtagagatggggtctccttttgttgcccaagctggtcttgaactcctgggctcaagtgatccacctgcctcagcctcccaaagtgctgggattataggcatgagccactgctcccagctggaatctgtatttttcaacctttcccagagattctgagagcagggtttataaaggaaccagggttggagtagaagcgccatggcaggttcaggaagggctctgtctctgccttgcatccactctttgttctctttggacttttcaggcgtggaggaaccatggtaacctatggggggatggccaagcagcccgtcgtagcctctgtggtaagctgggtgcagagggaggcatgcctggagccgggccagacacctcagccaggccacatcccctggcacgacagctgtctaagcttaggcaatgccccgttcctggaggggagtctgtacccttaagcggtacctgaagttcttgccctcagagcccagcatgtccttcctgtgtctgcagagcctgctcatttttaaggatctcaaacttcgaggcttttggttgtcccagtggaagaaggatcacagtccaggtgagtgcatggcccagtgccaagagtcacagatgagggcagtgcctaaaaatggcagcagaaatgacyagctattctgagccctggaggggtgattgggtccccagccccacagaaggatcaaagagaatagccttagtccagctacagtcagcaaacagttattggactaaactgggttagtcttaggggcgcagaacaagacagacactgcccccgtcctgaagagctgacagtggggaaagatggatagccaaacagagagaatagactctggagccagcctgcctgggttcaaattctgcttccacactactggatagaggttctgcctagccagcagtgggaccttgagcaagttacttaatctctgcctcagtttaaatgtcctaagtttaaactcttgttagccgtgtttgacagaggaggaaattgaggttcagagtggttaagtagcgtgcccaaagtcacctccctgcagggaggtatgaggcacgatgtaaacagatcatctccctgttcatctcctggaggactggctccccagagcgggatctccaaactcaggacaaagaataacatggagttatccaagtgaaggggaggaaggtggtggcatgaaggcagtgtttcaggcagaaaatatcgaaaatcacacgtgcaactaggcactgaagcggttccgagcgacctggagcactagatctgagctggggctggaaaattgggtgagtgggttgtgaccaggttacagaggccttataaacctgattaaggcattcagactcatgggtttttttgctgttttggggggttattttttttgaaacaaggtatcgctctgttgccctggctggagtgcagtggtgtggtcacagatcactacagactcaacctcctcggttcaggtgatcctcccacctcagcctcccaagtagctaggaccacaggcacacgccaccacatccagctagtttttgtatttttagtagaaatggggtttcatcatgttgcccaggctggtctcaaactcctgggctcaagtgatccacccacctcagcctccaagagtgctgggattacaggcgtgaggcaccacacccagacaagactcacgcttaaaggcaactgaggagccagtatagatgactagatttgaaggctgaatgaatttatgtctatggaaaaacacttctcagccgaggccttcacttctcaacttcctgtaccatatagggtccttcgcaggaggcaggcccaggaaggggatgttggtggcgtccggtcgtggggttctaagggagtcctgggctctcagggagagctccatttcctgagcagagctcaactgttccacatcacttggcgtgccaggcatacccactccctctctgggcctcctctggcctccctgcctccgccatccttttcctcccaccattcagtgctcctgtctccactgtggccaggttctgtgagtctgtgccatcttagccaccactctgaagggtggtctctgcctgtctgcccctcagcccctagagccgctcctatgttcccctctccccaccttgacctcactgtcctaaagacaggcagggaccaggctgcctccacagccaccctatccttggcacagccaggactctcaaggctttattggagcttggtgccagctcctgcccatagggcagccccgtgccacatctcaccaagccccagctgctgttctcttgtctgatttcctccaacctcccgcagaccagttcaaggagctgatcctcacactgtgcgatctcatccgccgaggccagctcacagcccctgcctgctcccaggtcccgctgcaggactaccagtctgccttggaagcctccatgaagcccttcatatcttcaaagcagattctcaccatgtgatcatcccaaaagagctggagtgacatgggaggggaggcggatctgaggggctgggtgcaggcccctcagttggggctcccaccttccccagactactgttctcctcactgcctcttcctattaggaggatggtgaagccagccacggttttccccagggccagccttaaggtatctaataaagtctgaactctcccttccaaaaagtagaagtcatccctgtcgagaaggaccaacactgtgcactggtcagctcacagcaccaagaggcccccttcctgcttttctgtcatgtgttcccccagtaatcattttctgaccaccctgaaagcaaagcctgggtgggtactggcagtgcaaaggccagtaggccaccatccctggccccaagctgcacaagcccacagacragggtcctgtagaacaaacgctttgatgtgcttctcaggtagcctgcggcccagtccagggcttggggaggatcagctgcatggaagagtgaatgccaggctgaggtcatcagggccctgaggaacttggacgtggggtcttcactctcatggaactgcccttctaactggagacatagacaatataccagtggttctcaaccagaggcaattttacccccaggagacatttgacaatgtctggggatatttctggctatcacagcttatgaaggaggttgctactggcatctagcaggcagagtgagtgctgctgttaaacccaccacaggacacagaacagtctmctgcaacaaagaattacccaaggcctggcgcggtggctcacacctgtaatcccagcactttgggaagccaaggcaagcggatcacttgagcccaggagttcaaggtcaacctaggtaacgtggtgaaacaccatctctacaaaaaatacaaacattagccaggtatggtgctgtgcacctgtagtcccagctactcgggaggttgaggtgggaggatcacctgagcctgggaggtctagactgcagtgagccatgatcatgccactgcattccagcctaggcaacagagcaagaccctatatcaaaaaaaaaaaaaaaatctagccccaaatgttcaatgttcatgaggtcgttgataaaccgtgcattaaacaatctcacagtaattaccatagtgactaatgctgtaaagaagatatgtggggtgctgtaagagcagaataaagatcttgccctaggccccagggacaggggtatgcttccttgaggtgaagtttgaaggtgggctctcacaaatgagtgagctttattcaggccgagagaagagcttgacgtgactttttggtatttgcttcacgattcatttgctcaaagcaaagaacagaggcttcagggtgtctcccttatcacctggccctctgtaccctgcactcaggagcctcattcaggacgtatttattgagtgcctagtgtgtgcccaaagctaaggataccaatgaaagaagtgctgctggccctcaggttgcttagcctagtgcaagattgaccagtatagtataatgatgaggtcactgacatggaggtgttcagagggccttgagaggacacacaggggccccagttctgcccgagggcatcaaggaaggattcctagaggaagtgtctcccacagccagtcttgaaaaccgagcaggaaactgcgtaccaagcaaagccaacagcacatgagagtttagaggcctgagagcctggcactcagggaactgcagtcaagtgtagctgctgccttagacgtgggggaaatgtgggaactgaggtgggagacatgggtgaggtacagatcacaaaggaccatgatgtcagggcttaccctgaagccctagggaggcaccaagggattttaggcagtggagcaatatggaaaaaactggctcggaatgtttgtttttttttttgagacgaagtctcacactgttgcccttgctggtgtgcagtgggcgatcttggctcgctgcagcctcaacctcctgggttcaagcgattctccttcctcagcctcccgagtggctgggactacaggtgtatgccaccacacctggctaatttttgtatttttagtagagatggggtttcactatgttggccaggctggtcttgaactcctgacctcgtgatccacccacctcggcctcccaaagtgctgggtttacaggcgtaagccaccacacccggccagaaggtttaattgcatgccagtttgaacacggactcccagcataatcatcttttctttggaagcatcttttatgtccgctggaaaaaaggactcagcttcagcctggggctgggaaaggtctgcattgccctctggggaatatttgccaccttctgggctcaagatcagccccaactctttcctggtccctgtcctctaggttagtgggacaagtgattgtacagatgatcagtgcaggcaagtgaaaaaagccttagaaggagggaaggctgccagaggccacaggagtaaaattaagattaggttctttaggccaggtgaggtgtctcacacctataattagacaggcgtgctggtacatgcctgtagtcccagctactcaggaggctgaggcaggacagtcacttgaacctgggaggcggaggttgcagtgagctgagatcacgccactgcacttcagcctgggcaagagagagagactctgtctcaaaaaaaaaaataggattcttcaaggggaatccataaggttggggtttagggagagtggtgagcctgagtcctggtgaaggagcaggcccctggtgcccactctaagagcaggcatacaggaatgtttgtaacaccacgcttcaagatctggaggaacgtgcagaatgcctgagaacagtgaaggcaatgattccttgtacctttaggggtctggaggtgacatttgggctggtcttcaaaggatgattataatttattcagggaagggtgacaagcattacagacgaagagagcagattaggcagttacagagacagggtatttatgttagaactgtctcattttctccattctcttcctgagaattaaaacctacaacttttaggtgggtacatggcaggccggaataaacactgtttctctgcatcccttgcagctaacaagatctgcccccgcaagtgatgtaagcagaggtgttaggcgtcagtttcttaggaacctcttttttttttttttttttttatttggagagatgatggagtcttgctctgtcacctacgttggagtgcagtggtgcaatctcggctcactgcaatttccacctcccaggtccaagtgattctcctgcctcagcctcccgagtagctgggattacctgccaccacgcccagctagtttttgttatttttaatagaaacagcgtttcaccatgttggacaggctggtctcgaactcctgacctcaggtgatccgctggcctctgcctcccaaagtgctgggattacaggtgtaagccactgcgccctgcccaggaacctctttaaaatatagcaggcctgcatcctgtacctttttcttccccttccccttccaccctccttatagctgtggtacacagacatgattcctggagtttacccagccatctttgactacggtttttttttgttttgttttgttttgtttttttgagacggagtctgggtggcgcgatgtcggctcactgcaagctccgcctcccgggttcacgccattttcccgcctcagcctcccgaatagctgggactacaggcgcctgccaccgcgcctggctaatttttttgtatttttagtagagacagggtttcactgtgttagccaggatgatctcgatctcctgacctcgtgatccgcccgcctcagcctcccaaagtgctgggattacaggcgtgagccaccgcgcccggccttgactatgtacagcaagatcaaaggagcctggctccctgacacccagaatccccaactgcccacctcaggacttgttttacatgagaaataagcgtctgttttattcaagcccctagtatttggggtttcactgaacctaatcctaagtaatacaaattcaatggtttaacttagattgaaatcaagtcaatctgaagccgaaaaagggaatcgtggcagtttatgattcccagctaaggaatttggactttattgtgttggcagtaaggaacaaaagatttctgagacagaagatcagaactgtgctttgaaaaaaaatccctccagcagtagcccggaggacagtttggaggagggaagcactaaagaaagataaaatcagagactcccaggttctgaatttcaggtaggtaagcccaccccgcccccttccactaaatgtcaaagaccaaccaggggttgccgacatttcagaggccaacattggaaaggaaacagtgccaaaagagaatcggacttaaaatggatcctctcttctctactttacaagtgcaggagattgtttttaatttcagacggtccgggcacagcggctcatgcctgtaatcccagcactttgggaggctgaggcgggcagatcacttgagcccaggagttcgagaccagcctgggcaacatgaggagacccccccccaacccatctctacaaaaatacgaaaattgcctgggtgtggtggctcacacctgtaaccccagcactttgggaaactgaggcaggcagatcacctgaggtcagttccagaccaccctggccaacatggtgaaaccccgtctatactaaaaatataaaaattcgccagacacagtggctcacacctgtaatcccagcactttggggggccaaggcaggcgggtcacctgaggtcagttcgagaccaccctggccaacatggtgaaaccccgtctctactaaaaatacaaaaattagccgggagtggtggtgcacgcctgtaattccagtttttcaggaggctgagacaggagaattgcttgaactcaggaggtagaggttgcagtgagtcgaggtcgcaccattgcactccagcctgggcaacaagagtgaatctccgtctcatacaaaaaagttaacataggctgggcgtggtggctcacgcctgtaatcccagcactctgggaggcagaggcaggcagatcatgaggtcaggagttcaagatcagcctggccaacatggtgaaaccccatctctattaaaaatgcaaaaattagccgggtatggtagcgggcgcctgtaatcccagctactcgggaggctgaggcaggagaattgcttgaacccgggaggtggaggttgtagtgagccaagatcgcgccatagcactccatcctgggcaacaagagtgaaactgtctcaaaaaaaaaagacaaataggcattacctgctaaaaaaaagcttgagcgcacctgaagccctgcagcttcctgactctgccatctctccctgtcctcttctgggaccatccacccagtgactacctatagttgctgccacaatattggtaaatggaggccaggcgcagtggttcatgcctttaatcctaacactttgggaggccaaggcaggcagatagcctcaggtcaggagttcgagaccagcctgagcaacatggagaaatcctgtctctactaaattaatttgtactaaaaatacaaaattagccgggcgtggtggcaggcacctgtaatcccagctcgttgggatgctgaggtaggagaattgcttgaacccaggaggtggaggttgcagtgagccaaaattgcaccactgcattccagcctgggcaacagagtgagactccatttcaaaaaaaaaagtaaactccaaatccttcccatgatccttgaggcccctcaagatctggtctctccaggagttcgaggctagcctggccaacatggtgaaaccccatctctactaaaaatacaaaaattagccaggcatggtggtgtgcgtctttttttttttttttttttttgagacagagtcttgctgtgttgcccaggctggagtgcagtggcacaatctcagctcactgcaagctccgcctcctgggttcacgccattctcctgcctcaacctcccgagtagctgggactacaggcgcccaccaccacgcctggctaatttttttgtatttttagtagagatggggtttcaccatgttagccaggatggtctcgatctcctgacctcatgatccacccacctgggcctcccaaagtgctgggattacaggcgtgagccacctcgcctggcctgtggcgtgcatctttagttccagctacttgggaggctgaggcaggagaatcgcttgaacccaggaagcagaggttgcagtgagctgagatcgcaccactgcactccagcctgggtgacagagtgagactctgtctcaacaaaaaaaggaaaaaaaatttgataaatgtgttttcttgggatatgagataattacgcacactttcctcaggggaagactgaggccgagaagaataaagctcttgcggccaggcatggtggctcacgcctgtaacccagcacttggggaggctgaggtgtgcagatcacctgaggtcaggagttcgagaccagccaacatagtgaaacacagtctctactaaaaatacaaaaaaaattacccaggcatggtggctcatgcctgtagtcccagctactcgggaggctgaggcacgagaatcgcttgaacccggaggcggaggttgcagtaagccgagatctcaccactgcactctagcctgggcaacagagtgagactcggtctcaaaaaagaaaagagaaaagctcttgcgttaacctgtgtgtgccaggctgtacttgtgcatggaaactctca

SEQ ID NO: 97792 - DNA, 35959 bp, Homo sapiens
tttttcttttttttcaaattcatcatatctactgatatcttttagtagtttacacccaatgttcaagtctctaccatctttttattaaaaaggcaaaacagaatattttcttttacctgattcattttaccagagaatttcattttatttttcaatttccttttttattattaatactgtttttgattggaaatcacaatatacgtttatggggtacaatgtgatgttttgatatacgtatgcaatgtggaaagattaattaagctaattaacatatccctcacctcccctacctataattttttatggtgagacatttgaaatttattctctttattttgaaatatacaatacattgctattgactttagcctttttgctattcaatagatctcgaaacttattcctcctgtctacctggaacactgtaccctttgatcaacaactccccattcccttccatccctgcccctcccatacccccatgcctctggcaaccaccattctgctgtctacttctgtgagctcagctttattagattccacatataaatgagatcatgtagcatttgtctttctgtgtctagattatttcatttaacatagggtcctccaggttcatccatgttgtcacaaatacaggatatctccacttttaaaggatgaaatactattccattgtgtctataaccacattttctttatccattcatccattgatggacacttaagttgattccatgtcttggatattgtaaataatgctacaataaacatgagcatgtagctatcccttcaacatactgatttcagttcctttggatatatacccaccagtgggattgctggatcacatagtagctctatttttagttttttggggcacctccatactgcaaaaactgaatctttttttgtttcaaggattcacgtaggagaatctcacatacctttgcagctactgtctattctttcttccaaatttctcaaaagggggctctgcacttatttgttctacttcttcattttccatttgctcaattcattgcattgtggcttctgccttcattttctgctaatacagatcaaatcatggggatccataacctccatgttgccaaattcaaaggatacgttttttttttttttttttttgccttgaccttattggaaatcttttctgcatttgatgttgttgaccacttcttcccccttgaaagtctttcctctcttggatttcttccatgacattactctctcctgatccttctcttacccttctgctaattctcagctttcttcttgactgtctttttctgtgctggctcctaaacactggcattccagagttcagttctcagtccttttctcttctcactctatactcttctaggtagttgttggaatagtcctgttgaaccaggcttggttgctcacccctgtaatcccagcactttgtgagaccaaagtgggaagattgcttgagtgcaggagttcctgacctgctggggcaacatagtgagacccccatctcttcataataaacaaacaaaagaatagttctgttgaagaagggtattggattgagaaagtttttgctaggtcttgaatttgacttaggaattccacttcatgtagcatgtgggaagactttattccttatagattttccaaatgaaaaccgccatcaagaagaaaagaggtgtgtcagatcaatcataagaaaatttacaataccaaagcagtacttatatatagtggaggataaagctgccttcattccagaagtgtctttacttttaatagagatgaaagctctatactttcatataggtgacttgggtgccaactgcctagtaattctaattagctagactaccaaaccaaatagcataaagccactactcttggtaaatgactctagatggatttgcttataattcaattttttcctgataggtccaaggtaataattttcaaagtctgctgcctcagaggaacccacattggtcagaaccaaatgcagcatttgaggtggctcataggctattcattggttgctcccacaccatagaaagcatcagaagagggaagagattacagtagggaaaggatgggtgaaaggcacaggttgattccccattggtcaggagactttgcagacctcagaggagatcaggaattcaggaagatcgcctgcgggtcaaatacataaggaaaaagatgcccatgtgaactgcacatgggcatccctagctaattagagtcctcccttcaacctcatcatgcaatctatgtccttcttacctgaagagatttccctgaatactgcagccttcctgctcaatgagattgggaagacaaatattttggtgggctatctgtaaatgggtgatacttctggattttttttttcattttctcaaaaataaatctagatgtcattttttaaatctacaattccatagctaatcaaccaactgatcactgatttctgggaattctacctcttgaatatttattaaacctatgcaattttctccatccctagtcccaccaccagagtccaagccatcatcatctttaacctggtctcttgcttcctaactggtctatattcttccaattttgctttccacctatctattcttcctcaggagctgaaagcgatcttctaaaatgcgagtgtgaacatgcccctctcctgcttcaaacccttccatgattttccattgcccttaaaataaaggtcaaacccttagctcagcatataaggccctccttgatctggcactttcccaccttcctatttcatcttatgccattctccactatcacaactgttaggctgttcttgtgttgctgtaagtaaatacttgagactgggtaatttataaagaaaagaggtttagggccaggtgtggtggcttatgcctgttatcccagcactttgggaggccaaggcgggcggatcacgaggtcaggagattgagaccatcctggctaacacggtgaaaccccatctctactaaaaacacaaaaaattagctgggcatggcagtgggtgcctgtagtcccagctacttgggaggctgaggcaggagaatggtgtgaacccgggaggcggagattgcagtgagccgagattgcgccactgcactccagcctgggggacagagcgagactctgtctcaaaaaaaaaaaaaaaaaaagaaaagaaaagaggtttaatcggctcacagttctgcaggctatacaggaaacatagcaccagcatctgcttggcttccagggggtcctcaggaagcttttactcatggcagaaagcaaagtgggagcaggcatcccacatggctgatcagaagcaagagagtgtggggggagaggtgccatacactatttatttatttatttatttatttgagatggagtttcactctgctgcccaggctggagtgcagtggcgtgatctcggttcactgcagcctccgcctcctgggttcaagtaattctcctgcctcagccttccaagtagctgggactacaggtgcccgccaccatgcccagctaatttttttgtgtttttaatagagatgggatttcaccatgtggaccaggctgttctcgaactcctggtctcaagttgatctgcccaccttggcctcccaaagtgctgggattacaggcctgagccaccacgcctggccatgccacacacttttaaataaccggatctcacaagaactcactcatcatggggaagacagcaccaagccatgagagatccacccctacgacctgaacacctcccaccagaccccacctccagcattggggattacaattcaacatgagatttgatcagggacaaatatccaaactatatcaacacccatactgaccttcctgtatttctcctgctacttggaatacttttctcttctcctggctgacctctagctccttcatccctttccctcactgaattgtcacttcctatgaaagcctcctaaacttcccaggccaaattaagcccactcacatagctcccggtacatctccttcaagacactcatcacattcctaattacatatttaatgtctctttcccctgttaaatttcaagctgtatgagagacggaactgtatcttgtttcttgacctgttgctagcaccaaggacagtacctcatacatagtaattatttgatgaaagaaaatgaatgaatgaatgaatgaggacacttttgttcttctgggtaattcttcttcatctttcaagaacccaggtcagatgtcatttcctccaggtgagatgcagtcaaatctgattcgtctttagatccctagggcctggcttgggacctgatacatggttcatatatcataggcatttgtcaaatcattataaactattggttgtgaattcataattgttgaaactgaatgataggtatatgagggttcattatattgttctgtctgctttagtatatattggaaatttgccataataaaaagttaaaacatttatatttaccacaagtaaaataaaagtatattcaaagatgactttgaagcttctggcttgggaagccagtagttggtgtcattcattggaatggatggaatggagttgtgtccagtgtgggatgtgtgttgtgttgtgtgtgttgaagagggttctttttcaccccagtgaaactccttaaaagactaataaagggggatgaaacaataaattgaggctggacactgtgtctgacgcctgtaatctcagcactttgggaggccgaggtgggaggatcgcttgaacacaggagttccagaccagcctggggaacacagtgagaccccctctctactaaaatacaaaaagccaggcgcggtggcacatgtctgtggcccaggtactccgggggctgaggcgggaggaatctgagccctggaggctgaggcttcagagagccatgatcttgcccctgggtgacagagtgagaccctgccttgaaagaaagaacgaactcagatttggatatctttagttttaggcacctgagagggattagcatgtagaggctttctggatggtaatataacctctcattatccttgatggcctctgggtcactgatctgaccattgggatgtatcccactatccagggagggtctgtagtaagtattgcaccccaccatcttccttacatctttacacttttcattcacaatatccccttccttgtgaatttctaccgggaagcaatgtattcttgacattttccaggccttgatgtcagctttatgctcagcagcagaggtatttcagtgtcaagaaacatcggagttccagtctaaattcatcactaactgtgactgcgggcaagtcgctttacctctcttaatcttagcctcagcctctgaaaaatgaggataataattctggtgattttacagagctgatgtgaagattaatgcgcgttaacggtttaatagagagcccggcacggtgtaagtggtcaataaatacgagctattattatgagcaacgctgtgtcctcagagcctccccaccaggacgtcagggagcggtgcagcaggagcggcgcagagtgcctcccgggaatccttccccgcgcggccgcggcgccgcacagccgccgccattcgggctccagccccgtccgcgcgtctcccggcgtgggtgcgggaccagggcgctgcggggcgcgcagggtgagtctgtggaatagtagtggaggacggcgccgcgctaggcgggggtcccagggagtcggctgcaggggtgtctgctgggagggctggaccgcggggctcaccgaggtccgagggccgcccgcagggtgaggcccccaagaagctgcggcaagtgccgcgcccgccgagctcgctcccgcgcccgccccaagatggcgcccctccccctccccttgcgcgcgcctccgccgctcggggcgcggccccgcggcccgcgcgctcctgggcgggggatgttgtgatggagaagccgcggcggagcccgaaccccgcagcctgagccacctccgtcatctgggcccggggcctcaccgcgcaggtaggaggtgtccctgccccggcccagccccggtggctgcgtcccgatcaccagcggccggcggaccctgtagcccctaccctgcggcagcccgggtcccccggccggccccatcccccatccccgggtcgcccttccaccgcgcgcccgcagaccgtcctctcatacccaccatcgcagggtccactcgggccctcacaccgtcccttccgctgccctttacctcctgcccctcggggtgactaggggcgggtatggaggacgcgaagcgaggggcagtgggtgttgggggaggggaggcccaggtccgggaaggggacgtggggtggggtgggctggcaggccgcgccgattccagcaggggtcccaggccctggatctgtcaagccgcattctgttgccctcagcgaccgaggggtgtgccctggggcggctgtgtccccagctcagccaggaggcctagcactgscaagaacactgattagaagcagttttcccactgccaattcctaacctgttttgtatcrgcctgtgtatctcttgcattctgagcccctctagctatagtcccagctctctccgcccttcagagtcaacgcttgctgtcttcatttccttacttcccattcattcttaaaagcactccactctgtgtccctgacacccactgaaactgtctaggccaaggtcaccggagacctccttgtggagaactccagtggacactgttatctcctttacctttgagtagtattcggtggggtatgtcaactcactctccttgaagcattttcctgctttctgccctacagcattgtctgctcttctcaatctcatttgcttcctctcctcctctctttagatgctggtgaggctcttggctctgtcccgagctgtcttctctcagtatctgttctttctccccagatattttatctactcccaaagcttcaaatttcatatatatgctaatgattcccaaatttatatatccagcccagacttctttcctgaaatccagactcatatgtccagctgctctcttgacatctccttgaaagacaaacaggagttccaaacctatagattccaagctaaattatcttctgtggttttctctgtaccccacttccaaatctgttcttccttcgaatctcaaaaatggctctttgccaatctggagtcatgagcaagacttgagattaacccctctctcactctctgcatctcatttcaccaagttctgtcacatccactgcctaaatatttctcaaatccattcatttcgctctttcctcactgccaccaaagttaatctgggccaccaccattttttttccttgactactttaatagcataccctcttgcctacctccctttaactgttctcaacacagtacccagagtaatcctttgaaaaatgcttccaatcacttattcatgcaataaatatgatttcagcacctaatatatgccaggcactgtgttatgtcctgaagatataattgtgagcaaaagagactgagtccttggagctgacaatctaggagaaaaatcaaataagaataacattacaaatgtaatatgtaccatgaagaaaagctgtatggtgccttgagaacgcacaagagcagtagctaaactggtctcggggatagggagagagggttggaggacagcttctctgagaacatgacgtttgaactaaaatatagtggatgagtagaagttaattcagcttagagagtaggagaagaggtcccaggaagcatggaaatcacatgcaaacaccttgtagaaggaaaacacatgtcttcsaggaatcagaagaaggctactgaggctgcagagcagtgtgaccaaagccagggrcagggaggaggaaggcaggcgccagactgagcaggaaatttaggccatgttaagaatttggtcttaagggccaggcgtgatggctcacgcctgtaatcccagcactttaggaggccaaggcgggcggatcacctgaggtcaggagttcaggaccggcctggccaacatggcgaaaccccatctctactaaaagtacacaaaaattagccgggcatggtggtgtgtgcctgtaatcccagctactcaggaggctgaggcagaagaatcgcttgaacccrggaggcagaggttgcagtaagccgagatcttgccactgcactgtagcctgggtgacacagcaggactccatcgcaaaaaaaaaaaaaagggaattttgtcttaaggtctttgtccttgatggtagtggatgtggagagtagatgaagtccagaaatttttctcagagaggaaatcatcagtacctagagatggattgaacatagcaagtgcaggagaaggacatgtcaagatgtacccctacttcagattcacagaataggatggattctatcattccatgagccgggatcctgaaagaggaccagttagtgtgtgggagtgggaaacatgagtgggtctattagcttgagacatccaagtggagatgttgagtagaaagttgaatgtacttgtctggagctcaggtgaggggtctgaaatggagatttgaattgggaaatcatcagtgtataactgaagctgtgggcattaatgaatacttatactgattataggatgagaaagaggaaggggcatgagaataagccataagaaactccagcaggtaatggctaatagaggaagatgagccagcagaggagtctaggaacccagcaaacagtaacaagaagtgtaaaagatgagatgagatgaggagtgtggagatgasagtgtggaggccccggatagaggctggatgagagattcacggggtcagatgctgctgggaggacaaccaagacgagcactgtgtctgttggattgaatgacacaggggtcatgttgaccttggtaggagctgttactgagtcgtgttgggagtggaagcaggtttggaaagggttgagsagtgagtgggaggtgaggaagtggcaacagtgagtggagacaactctctcaggaagtttgcctgtatgggggaggaaagagagcagtgagtggatctggaggagcgtcaggtcaagttgggagaccgtggatcctattgagaaggagaggttgatcatatagaggagaaaatagataaacagtggtataaaattcctggaaaggcatcataggaagaatccaaatcataggtgaagcagttggttttgggaaggagagaaagggataggtgctgaagtttggttaggtttttatgtttgaggatgttacccagttggatggcttccctttcctctgtgaatcaggaggggagatcagcctctgagasgggtggccaatggagagtwatgtcctagtctcaggcaggcctttgctgatgtctkggctgtagtaagccccaggttcctgtaatgccctcctcttcctccttcatgatattcagtcaacaaatagggaatgctatgggtgccaggcactgttctagatgttggygttacactgcattgtaacaagttgttcaatgactgtttcccgctgaactgagaactcctccagaggaagaaccatttcttttgtcttcatcactctcccctgtgtctagcacagtgcctggcatatgggaagctgtcagattagacaactcctgactttgagcaagactcaaccccaacccctgtggtctgatgccaggatcttcaggcttagtgactacttctttcacttcctgccccgaggcccctgcccaactccctgccttgagccagaacccagttggctctttgcatcctttggtaactccaatgagaggggagagattaggttgtgttccttctttaaaaaattggactgagatcatctttttgacctcgagcagtggggtgttggtgaccacaccacctcaggctagatgctcaggcttcagcacttaaacagtttcaccattcttcctctaatacttcctgccctggtgaccagattggcggggctgccctgaggtcaacttggctcttcactgtttcagcctcacagtgcatgcactcttctcagatcatatctcctagtgcctaggaggttggtctctgcctgacctttgagaaacctggctctgtacactactgcttcagagaagggtttgccatccttaaggtcctctgagcatggcagagtygtggagtcttctgcttcctgacacccatggagatgccactcttgaacagtgtctgtgccaagatgttggtttaagctacctccctcgctcccttttcctagatctcagccctcacctctccaggattcctgtcccatcttacttcccactcagggaccctttggcattctctgacaccctcccaaacactccctttgctcctccccagcccattgggccacacagcctttcttggtatttattcccagccagttctgagcttcctggatcctcccaccccctgtgtctgtcccgttcatccgtcctttccttctgcaacagcccagtctgtgtcggcacacggcacactctctttggtaatgggaatgtgaaattgaataagacaccgtctcagatattctgatagaatgtggttctgggtgttgtgagacacgaaggagagaacagtcacttgatggtggggagagaacaggaaagactgcttaggagctgtaactgctgaggttagttttgaaatacaagcagaggttctcacaaggggagacagaattccaggccgagggagcagtataaacaaagacccagggctttaagagtgtgcgacatgtttcagaatccgccacgcttcatgtggctagagtataaggtataaaggaggcgggaggtggggaggggactgacaggttatagaggccggcttaagagggctcttgggtgtctgcgaacgagtgcaggcgttatccgaaaggcagtggtgagccctctcattttctgaaccagggagtgacacaatctggtttccatttttggaagattactgtggttctgggaggaggtagagctatttttttcttcatttattccagtggctgtgagttttctcattggccaggaggagtcacactgagcagatcaacagccccacgtgaggcagacacgtgcgcagaaacctttttcatcttacagatgtgtgggtagcatagcactagtgtctgaggaactagagacgtagaaaggtgagctatggggccgggcgcggtggctcacgcctgtaatcccagcactttgggaggctgaggcgggtggatcacctgaggtcaggagtttgagaccagcctggccaacatggtgaaaccctatctctacttaaaagaaaaaaaaaaaaagaattacaaaaattagctgggcgtggtggtgggcacctataatcccagctactcaggaggctgcaggaggttgcagtgagctgagatcgtgccattgcactccagcctgggcgcaccgcacctggagagatgggcaagccctgctcaggtagctgcaagacctgtgctcagcgctgagaacacagagggaaggggggtagtggtgagtcagggaaagaaagaactccttagtagaggaacagggagatagggaactctcagataagacatcaaggagaaaggtctgtacagtgggaatgagaaagagcacagtgcagtgtttgttgggatggtcagtgagggagaattgtctgttgggggaagggtcgggtagggcaagagaatcagtgaggccatcgagggaggagagagtaatgtggtaggggctgtctgaaggagggcttgcatggagggctcaggatgagagagaagtgggcagtggttggtcagggagaaataactgaaatcgggggctggtgagggtccagggagagagcactttctcttgggggtccgggaaggagagcagcagagcaactggaaggtcagggagagtggggaggatggaatggggccgagggtgggtccctgggtggcgggctggaaggatagttgggactcaaatggttgcggagaaactgacccacgaagggctgtgaggaggcagagggagsggtctggagggggagctgtccttgyggaacaggacgtcctcttacctgagaggcaggtggagtttgtttggggcaccatraggcatagtaacgtaaccaaagtgttttctgacactggcagaggagatgccaaagcgaagcctggaggaaatggggactgattcatacattcattcagcaaatattaatggagttcctgctctgtgccaggactacgctaggcactaggcatactgtatttaaccaaaaaggcaaaatcctcaccaacatggaaattataaattatagtcatgaggagacaatcattagacaaagtaaataataaattggcttgtcagatggtgacaggcgctggggaagagtttagggattgctgaggaggggcggaggtagcctgtggttttaaaatgggtgttcagggaaggcttcactgaggctgtgacatttggtcaaagatctgaaaggctgggccggacgcagtggctcatgcctgtaatcccagcactttgggaggccgaagtgggcggatcacgaggtcaggagtttgagatcagcctgaccaacatggtgaagccccgtctctactaaaaatacaaaaattayctgggcgtggtggtgggcacctgtaatcacagctactcaggaggctgaggcaggagaatcacttgaacccgagaggcagaggttgcagtgagccaagattgtgccattgcactccagcctgggcaacaagagcaagattctgtctcaaaaacaaacaaacagacaaacaacccccaaaaaacaaagatctgaaaggctgaggggcccaggggaaaggctcccatagtgatccaggacagggcattatgagggctggcagagggaccagtgcccaaggggasctacttcatggaaattgtcaccaagatgtagcttcatctgsccagagaagccatgaattgcagccgagcgccctccctctgtgacctgccttccagtgccatgccctgtagggctggttctgcagcttatttgctcctgtcctcacagtccctagtatggggtgggcttgggggctggttgagctgagtgatttatgggaataggaacacagccggaggagcttacagtgatggggcttgggatggaagtgcggccggagaggggcagtcagtgatcagtgtccaaaacacacgagcyggtcccactctagtggtgttcctggcacagtaagccccgggtggatgagctggggggtggggaggcacagagagccattgtgtggaggccttkctggtgggaccragggcaggcgccagctgtgccatcccagaaagctcagggcaggggatatagggatggggtgggcctcagacctgggcctggactgtgatggggatgatagtgctgggacagaagttgaacccagtcattctcataggatagagagccatgggtgctagcctgcttagtgcagggagatgaggaggcacagggcatagccctggggcagaagcagtgatgctgctgttctggaccagaggctcaacagcatctcccctccgcaccccacaggagctgccaaggccatgtctgttccatcatcactgagccagtcggccattaatgccaacagccacggaggccccgcactgagcctacccctgcctctgcacgctgcccacaaccagctgctcaacgccaagctgcaggccacagctgtgggacccaaggacctgcgcagcgccatgggggagggtggtgggcctgagccaggccctgccaatgccaagtggctaaaagagggccagaaccagctccggcgggccgccacggcccaccgtgaccagaatcgcaatgtgaccttgaccttggcggaggaggccagccaggagcctgagatggcacccttgggccccaaaggcctgatacacctgtactctgagctggagctctcagctcacaaygcagccaaccgaggcctacgaggacctggcctgatcatcagcactcaagagcaggggccagatgagggagaggagaaggcggccggggaggccgaggaggaggaggaggatgatgatgatgaagaggaggaggaggacttatcttctcccccagggctgcctgagcccctggagagtgtggaggcccctcccaggccccaagcccttacagatggcccccgggaacacagcaagagtgccagcctcctgtttggcatgcggaacagtgcagccagtgatgaggactcaagctgggctaccttatcccagggcagcccctcctatggctccccagaggacacaggtaccttgtggagcttgacatgggcatgtgggagggtgtgagggcagaggttaggactctcatacagaggccagtgccagcctgatgtgagctgagagcccataccctgaggccacagcaggccatgtccaggctttttcattcagagagtgcttggacattctggtagatctgaccatcatgcatgcccggatggatggatctattcattatgcatgccaccatggttgataagtggactagtttactgggcactgactaggtaactggccctctgctcagcattttcaggctttatccttacaataaagctgtgaggtaaatattatgatgattcccatattacagataacaaaaaagagatccagagaggtttagtagctttctcsagaccacagacaggctgagattacaatagagctgaaatctaaaccaggtctcagtccaggcctgagctcttggccccgtgttatgctgccgccaatgcatagagcacaatgcactcaggtgcacttgggacagtcggccccgttttttttttttttgagacagagtctcactctgtcgccagtctgccccgttttaacaggtcacgcctgttgggagcagccagcagctccccacagaggtctgtttggaaagactgggaatgttgtgtgcttataatccacatgctccagcaccattgcaaggatacagttttgtcaggagtaggatattgactaaaagttagaaaagaaaaccctttgggtagggggaggagaatagatactaggactccagggcttaatcattaaatatgtccatttaaattaagctgagtctccacattttctaatgtcgtgtagcgaatacaggaaaagctgaggaacaaagagtggagataatgggctatagttacaaccaaaaccctggagttttgtagatggaggtctaagaaagattaggaaagacccctatccttaccaggtggcggacacaatacccataccccaaactgtgcaatctttgtggagaacatgcagttcagatgagcctagggctgcacaccatcccctttcgaaaaactcattctggacattttcaaacatacacaaaaatagagagaaaagaataatgagcctgatttacccacgagccagttttaccaattatcaatacataactaatcttgctacctgcatgctctcttccgttcctaggcccagcgtaggttattctgaagcaaatacttttatctataaatgtttacagctgggtgcagtggctcacacctgtaatcccagcattttagaaggctaaaatgggtagattgcttgagcccaagagttcaagaccagtctgagcaacatggcaaaacctctcctctataaaaaagacaaaaaaattagccgggagtggaggcatcagccactgtggtctcagctactcaggtgactgacctgagaggatcatccgaacccaagaaagtcgagactacagtgagccatgattgagccactgcattccagcctggatggcagagagagaccctttctcaacaacaacaacaacagtttacttttgcatttctgaaagataaaactcttaaaaaaaaaacccaccacaatatcattattgtacctacaaaaatttaataataattctttaatatcattaaatatcctgccaaaaaaaggctggattgagcctgggcacagtggctcacgcctgtaatcccagcattttgaaaggctaaggtgggtggattgcttgaggccaggagttcagaaacagcctggttaacatggtgaaaccctgtctctacaaaaaacacaaacattggctgggcatggtggcttatgcctgtaatcccagcactttgggaggccgaggcaggtggatcacgtgaggtcaggagttcgagatcagcctggccaacatggtgaaaccttgtctctactaaaaatacaaaattagctgggcgtggttacaaacgcctgtaatcccagctactcgggaggttgaggcaggagaatcacttgaacccgggagacagaggttgtggtgagctgagatagagccattgtactccagcctgggcaataagagcgagactccttctcaaaaaaaaaaaaaagaaggaaaaaaaaaatgtagagacagtgtctcaccatgttgcccaggctggtcttgaactcctgttctcaaacaatcctcctaccttggcttcccaaagcactaggcttacaggtgtgagcaaccatgtctggcctgatctatctgttaaagttatgtttgatcaagttccccttctatttttttcgttgttgttgtttgcagttttgcttttgttttttaactggagaatcatgttgcttgtcctgagttttctatggtttggatttttcagactctctcctgtggtcatatttaccatgctcctcttcccctggatttcctgtaaattggtagttagttctagagccttgatcagattcagatttgagcatttttgtgttttgcttttgcaagaatatttcataggtggtattaaatacttctactaggccgggcgcggtggctcacgcctgtaatcccagcactttgggaggccgaggcgggtggatcatgaggtcaggagatcgagaccatactggctaacaaggtgaaaccccgtctctactaaaaatacaaaaaattagccgggcgcggtggcgggcgcctgtagtcccagctactcgggaggctgaggcaggagaatggcgtgaacccgggaagcggagcttgcagtgagccgagattgcgccactgcagtccgcagtccggccygggcgacagagcgagactccgtctcaaaaaaaaaaaaaaaaaaatacttctactaaaggcaaagtctgattgcctctcttttttgtgatgttagtggcctttggtggtcattgtctcaactccttttaaaaggaacagcccctcctgcactccagctgattatttttgggattggggtgaggaaaaatatagtctcaatgcagccagttaaagggaaactgaaaactagatattggtgtaaaatagcccaatttctaaacgttaacaacaaattctattttttaaaaagcactgtgcaggccacacacaatctatctgaggcttgcatcagtctgcaggttgtaggttggaagtttgcaagactagggggtgtgagtcagtgaccaaatagaggcctagttgctcacttgcccctgggatggtcactgtgggggctgcaactctgaactacctatgaagcttctaggagtagggggatagtactgctgaagagctggggcgggtttgctgggcagtgacctcagcaaggatgttggagtggcaagaggattctcaaggatcatgcactggtggagacattgtgaattgaggatagaggtgggggccagcccaggaaaggggccaagtcactcttttacaactgtgttgctatgaccatgagggctgcagagaaggtttgtgctcctgcagaaatgaggctagaattgagcaaaaattatattctccttcctattgtaggatattcatagagctatggattgaatgcataaatgcatgaattcatgaattaaatgaatgatgaatgaataaactttactacctgtattgaattcatactctgctccaggccttatcgtaaatgctggaaatgtatactatggggcaaagatgttcttacctcctggccttcacagcctggtgaggagacaaagaaagaaacargtggttatgatcagtgcgatgagctctctggggctggggaagtacaggaggggcccctgaccctgcctrtgagagtggtgggggagagkgcaatgggtcagttttaagaagggacctgtatactgatgtctgaaggagaggtaggtgatagccaggtgaaaatcgagagtaagggaggtgggctgggagaggacaagggggcatgtcccaagcaaagagagagaaggggagtggctggaggtaaggctgagaggcagacaggggttcatgacagcacataaaacctggggaggaatttggactttatcctgagggcagtgacaaaacaattaagaggattccgttggaaaattacttgattagtttagcatctcagaagaatcatttgggctgtactgtgcagctgagattggaggagaccagataggaagagaaagaccagttatgatgtttttgcaatgatgcaggttaaaaaaaaaaaagctagtagcctgggctatgttagttatgtggggtggagagaaggggaaagctttaagtcaatcactgattcctgagcaagtgagtacacctggcttcaccactaaggcatttgtggatgaacgaatgaaggaaggaaggaatgatacgtgaacatttaatgtattttatatgtaagtgtcgcatgaatcgatgcaggagtgaaggtgtgcgttctggaataaatgcatgtgtgtgaaagcaaaggccggggtgggctrcgcttggagggagatgtgccaagctccagaagggcctcccagatggccaaggggggagaaactgcccttccaggacagatcggaaggatgaagctctttgaagcwggaaggtacaggctgacagggatggcagatggattggtgtgtgtgactcagtcaggagatggtgaactggtccccagattccagaagtgtccagccagccctcatgaagcaggctgtggctgtggagggcatggaggccctagggtgctgttcctggaaggttttagcaggagagtcctgaggcaatggagggtctctagggaacagcaggtattccctgagcctcagctaagtttcaggtgcctattgaaaaccttattccatagagtgtgagttagggggaagtgggggtgaggagaggcggtgatggctgcctagaaggtggatgggcaagagcccctcctctttgggtgtctgtgggcccacgtcatttggaagctgaggatggtgaagcaccctgcctgaataactctcgtcaggtgtgcagccaccttggcgtaaccacgcccactcccagccctgctgtgtctggttgcccagcagcagggtcttgggactgcctgtcccttagtactgcctcttggaccagtcaggattcctggtttccctggtaacgggaagcacgtcagcagtctgggcgctcccagccggtcctggtgctgcggttgccgaggagacgctgcagcctagctgggccctggcaggtgaggggtggggggtggtgctgggaagccccaagcccagcctcaagcttgctggggctcaggacctcaaagcccacccttgggttcaaactgctgtgcaggtcctggacaggggcgggatccctgaaggccttgaaaccacaccctatttatgctgacagctataggctctgcagggccccaggcagctggggtattccttaggggctgagtctcctggtatccctaagactgggcttggcttaggcactgaggtaaccactggagggtgggatggagattcaggattgggggaggggagccagggcgaggaagaagaggtgtgagcagaaggggctggggtctcatgaacctccctttctcctcccttccccaccccccaaggagattccctagcatggtggtcctggcccctccctagcaagctccaagcgggggaggatcttgcctggcagacgctctgccctggtgagaagggggcgggatgagcttttctctgcagcccagcaccaggctgtgagcccagctggctgggctggaggggctgtgaggagggagggtggaggcaggaggggccgggaatgagcgccatgttctcccaggactttttcctggccattatcctgcaggacagcagcgcaggtgaggggcagcatgaggttgggcctcatgtggggtggggctgacagggagagaagagttagaggacgcatgagcgggttacagggttggagtggtgtggctctgccggcagacaagggtgtatgacacagatgcgaggtatgtgtgtatgtgcatgacatgtttgcttgcatctgtgtgcagcaagggtcaggaagtgagcgtctgtggtgtctgcacacatttggcagggtttgacgtgtgccgtgtgtctgagtgtgggtccgcctgtgtgtgtggtacccacacgtgtrttggggccattgtggtgtggtatctgcacacctgtgtggcaggggctcgtatgtttagctgcatgcacacacacctctgtggtgtctgcataagtgtatggctaaagtttgtgtgtgtgtgcccctgcacatacatgtgcacctgtgtgtgatacctgccatctgtgctggcattttctgtgttgcataccctggtgtttgtggctgcacaggtgtgtggtagggcttgtatgtgttgtgtgtctgtgtatacatgtacgtgtgcaggagctagaaagtgttcaccttcgtgttaactgagataatagatatgtatgaaaggaggttaattggggtcacccaacattcattgctcccttccttcttccctccctgccttcctcctttccacagtgtggccacattagccaccaacagggcccaggaggagacctgagccatgtcccctactggtggccccacatgtggtgactccagactataggctctaggcagaagcaggrrctgtgttgtggtatagctcttccmccmccccttctcaaccatggggtctcagaggggaccgggcataggcaccagctgtctgctctttgggtaggctgaccctcaccaagcctcccacctggcagattccttctggaaccccaacgccttcgagacggattccgacctgccggctggatggatgagggtccaggacacctcagggacctattactggcacatcccaacagggaccacccagtgggaaccccccggccgggcctccccctcacaggggagcagcccccaagaggagtcccaggtgaggctcacaggcctgttrattttgggccaggggtggagggagtgtgtgctgctggagtaggataggacactcactcactactcccatccctcctcctagctcacctggacaggttttgctcatggagaaggctttgaggatggagaattttggaaggtgggtaaggggacctgctttaccacgggatagctggaggaggggcatcattttgatactgattcctcaatccccttcccaaggatgaacccagtgatgaggccccartggagctgggactgaaggaacctgaggaggggacgttgaccttcccagctcagagcctcaggtgagctgccagatgcagtgagctggcagtgggatggatctgtctggaaggggccttgggacagctccatttatgggagccctgtgccaagtattaccatctgccttcagcccagagccgttgccccaagaggaggagaagcttcccccacggaataccaacccagggatcaaggtttgttcaagactgacacccattctgagtctggggccctcttatttgtcagacagcccctaatgttgtgctctgaggggtctcagcgcagttccccaggtcctgagttaggagttcttccagtctcagcacagagccctgtgtctgagctggaggcacttcagtttttaaatcaaccagcccaacagccaggttgggggcccttgtagtcttagttcaggtgcttttttgtactagctggggtctcatctgacatctccctcaccctaaccacatccccctctccctaaccacatcctgtttggggagcttctccgtcttagttcagaacaccctgcctcctgccacactctgtagtcaggaactctccagttttgactcagatcctctacctcctgcccctcttctgtgtctggcagtgtttcgccgtgcgctccctaggctgggtagagatgaccgaggaggagytggcccctggacgcagcagtgtggcagtcaacarttgcatccgtcagctctcttaccacaaaaacaacctgcatgaccccatgtctgggggctggggggaagtaaggacctgagccgggggtagggggtggtactgtgagagtgtgaagggaattatgagmgatgggaggtctgacctgcccacaagcaggctggggaagggggatattggcccatcctaagtggcagccctgtgggatggatgagcgaccccaggccaggaccttgggagatagtsgcctaacaacggtggagtcaatgtgagagatgacacgtgacctccactagagtgaggcctgcagggcgggcggtctgacaccaaagcaggggccccagagctgtggctaacatcccctgagctgcaggggtcagagatcagccaccatcctggctggagtcccactgagtgcctgcttctggtcctgcagggaaaggatctgctactgcagctggaggatgagacactaaagctagtggagccacagagccaggcactgctgcacgcccaacccatcatcagcatccgcgtgtggggcgtcgggcgggacagtggaaggtgggaatagggcttgggattcgagggtgggagttcatccagcatcagagtcctcctctctaactctgttatttgcctctcttgtgctgctggacccagagagaggtactatgcctattttccccctcctacacctggaccagatgcctggaagcacccaagctcccctcttctgccctgccccttcccacccgctatgctccaccattaccctccacctcagcatgcttgcctgtctacccctccccyccaagaaggcagcacctatgggggaccagctgtgggcagaagccctggaggagctgtgatgggcagggaggacgtgggtggggtggggaccaggctcagcactggatggtactgggagacactgaggtgccccttccccaacagggactttgcctacgtagctcgtgataagctgacccagatgctcaagtgccacgtgtttcgctgtgaggcacctgccaagaacatygccaccagcctgcatgagatctgctctaaggcacggccccctccactccctggactagttgccacctttgctctacaagggtgtgggtggggtcactgagtgctgtaggggggccccagggcaatgaggctctaatarattctccctggctcctcgcctcccttccttcctcagatcatggcygaacggcgtaatgcccgctgcttggtaaatggactctccctggaccactctaaacttgtggatgtccctttccaaggtcagtgkcaaaacccctccaggtccagctcagctttgttggcaaaggtgggtgacccaaggaaaggcatgagctcctggacagcgctgatagaaaaatgaacacatgaagactgaatactccaatacgtggagggactccggttaaagggaggcaggggacgagatgaaagtagggcctcggctgggcaagtgtccarcttatgccctgctggtggggctgcgggtragcaaggtctgccaccatgatcaaccttctcttctttcccatagtggaattcccagcgcctaagaatgagttggtccagaagttccaagtctattacctggggaatgtacctgttgctaaacctgttggtatgtgtgtccttctatacccaggggctgctaccttgatcctaaaactctgcccctaccctctgccttccaatacttcttctaccagaccttcctcatgcttggtgtctccctaccctttaaaatgcatcccacctccccatacttctgtcctagctctatttcctgtcctgcctatagcagcagtcagcacgccttcgctgagcatcagccacgtgagtggtgctgaaccaggcacaaagggagaccccactccttcatcccatggaaaagctttggtgggattgggaggctgatgttagatgactggaggacaccagacagcagcctgtagctgggtttagtgttacagcaccagctgtgggctgggagcatctggagaaggaaacagtgagcataattgtcacatacttcattgttgcaaagaattttttttttttttttttttaaagacaagtctcgctctgtccgccaggctggagtgcggtggygtgatcttagctcactgcaacctccgcctcctgggttcaagcaattctcctgccttagcctcctgaatagctgggattacaggctcccgccaccacgcctggttaatttttgtatgtttagtggagacggggtttcactgtgttggccagggctggtcttgaactcctgacctcaagtgatccacctgcctcggcctctgagagtgccgggattacaggcgtgagccactgtgcctggcctgatctggttaactcttatatttcagtgctttcctagtgtctgctatttatttgtttattcacttaacaaatacctttgaagcttaccatgtggcaggccctggactaggcacagggagaacagtggccacagtcccattttcctagaggttatagaaggttatggtagaaaaaaaccaggaattaataaaataatcacacaaataaatgtgtgagttattcgttgagagaaagtagcaagatataacaaaggaatttcatctagtctgaggttgtaaaagacttccctgtgaaagtgacatttgaactgaaatccaaaaaataagtagaagtgaatgcggtcaagtggaatggaggtgggggtgggatgggggaagatcaggktctacagtgggaggcactttggcatttccaaggtactgaaagaaggccaatgcaagatgaggccgacagctgggcagtggtcaggctgccaggtcagggacctcaggggctatgttaatgattttttcttcatcctaagggcagcaaggagttattgaagtctccgagagtgcacttgccttaatcagatttgaattttgaaagctcactttggctatttcatggaggggactgttaagtgggtggaggtggatgtgagcagctcagttaggaggctcttgctgtagtcctggccagtaatgagagtatcttgggcaacaatggagctgaagaagagtgcgtggattcaagagctgtttagacgggtatagtcaacaggcctcagtgattggttcgatgtgggtgagggacaaggatgactcctaagttcctggctgttggaccttctggatagtggattatttctttcaaggtggcagatgcttgaagaggccaatttgagcgtagagattgtgagctcacttttggacatgctgagtttgagatgcctttggggaatctgagaggcaaagtcaggttggcagttagattcacagatctggagctgagaggagaggtctgggctggagataggagttttggcattattgggttgtagaggtaatcaaagccatggatgtagagtagcttggccctggaaagtgggcatcctgaagtgagaagggaaatgaagctagtcatagccttgaggccctccaacattcaatggatgtgtagaggatgaaactgccaaggatagtgacaactggagagaggcaggaagaagaaaagaggctacttgaaraagaagtggtagggtatcatgtcaaaagacacacaggaagaactcaacaaatgtttgatgaatgaaataaaaaatgaattaatgaataaatgagacttgcttcagattacatggccaggaaagctagacctgggagtcaaaccccggtcatctttaattctctgcactttcccttataccgtgctgactttcacgtccaaaatcttacattgaaagaggggacccttcttagaaaaggtggggattgaactgaggttttgaaagaaggtttggatttgcagagtggagtgggtatttcatttggattcgatggcactgccaaagacttggagctggaggtgagaaaagcatgctgacccttacgcctttgctttcctccttctcgtcctcaacttctaaacccttgttggctcttccatttgttacccccattcccatatgtgcttctttccatctaccacttgactctggtcctccctatgccagatcaactgcctgtgacccttgactgctccgcttggacaagtggtctctaaacttacttcctgctttatcttatgctcgtttttaaacattagcccatccagaagctgcaatattcattcattaattattcatttatttaacaagtggtaatgaatgcctgatacatgtcaggcactattctagcttcttggcatgcattaatcaacaaaactgacaaagatccctgcttttatttagctgacattctagcaaggagagacagacaataaaatgagtaaaccatggagtatgttagaaggcaacaactgatacaaaaaaaaaagaagagaaaagcacagcaggattagggggattgcatgtggggctggaggtcaaggtcacagtgtaggttttagtcctgagttatcaaatctgacagcctttttccataccttggtccactgctttcactgcttccctgccaaacttcccaagactctgaggccaggctccatctcccacagccccatctattcagcagtttgactatgatgtccctttcacacacctgaactttgagatttccaattgccctggcctaaatgtcataaacatcacacccctctgcctggcttttgaagcactctgcaatctgacctggcccatccacttctgtgacacttggttttaccagttcgggtgcatttgcccttgttgccttgagagtgacttgctcatgcatctggaatttcttcagcagataagccctgtgttagaattggggacagagggatgaattaaattccatttctgttcttgagatggccacggcccagtgtggaaaaaagttttccagcagttacaagacgttatggtaagagttgtctcagagttgtcctctccctgccctgcagcaggcatggcttcctagacagcacctagttggagccctgaaggatgacagtctgaagtttctcagtccagcagggaaagggcactcaagacagaggcttttccctcagttgcagtctgtgtctctcaagggcattctcttctcttgctttgtattccccatctgctttacaggccatttgccaagattagttgttaataataatgctacacaaatcatctgaagctcagggagcagtaaaatatgaagcttgacagctctggtgaggccagtttttggaagacttgtatgcttttgggagcagtttggccttgatccagctagaagtcagatgagcaaggccaagatgggagaagacatgcaaggaagacatttgtcctctgcccaaaagagtccacgtggtctgctcctagtgggagctgagagccactaaaaggggcagagggcctgggagtggaccacagaggcatgtgccttttgcactggcattgtgcagagacagtagatcacacagccagcgtatgagtgtggggactagaactgatgcctttgccacaacatgtgctcctgccttggtgctctgctgagtgcaagcaaaagtgggatccatgaggggaaatgtttaacagcagtttgaggtggaggaggccatgtgttataagggaaagttgattgatctgaaagtcaggaaccttgggttccttggctcttgagcacattatagacattcttgagtagaactaagatcttgaaagcccttctagttctgaaaactagtaatatagagaagaggtaggagaaaggcatggctaagaacccaggctctggaatcagactgcctgagctcaggtccccattcctcgatgtgacctaaggcatattacctatctcttccgtttccttatttgtaaaatggaaataaagtaatctattgtgatgttgttgtgtgggcacaaatgaggtaatacactgtaatgacttagcacaatgtgatacagagtaatcactcctcagatagatatcttaaaaaataattgggtcttgggagaggactggcctgtagggyctgatttgggagttattgtggtgtgaagcaatgtgatgtctgagtgtgatgagcgctgagagagcatgatttggggaaatcagaactttgagaggtcagtcagttcagaagtgtggaggaataggcagagccggtgaaaataacgagcctaggatccaagattttaaaaagtaggaaaatgtccagttactgaagccaggggaggagagccccagggaagggatacttggacagcgttgtccaaaatgtaggctggcaaagtggggatggggcaaaggccctgggtttgattgggtggaactagaggtccagggtagagctggggtatcctctgtctaccctcagtggtatcttgtgtccatatgttctaggggtagatgtgattaatggggccctcgagtcagtcctgtcctccagcagccgtgaacaatggaccccaagtcatgtcagtgtggcccctgctaccctcaccatcttgcaccagcaggtaaagagctggggtagaagtcgtggctgcgccttgccatagaggggagactgggggtgaggggaagagctgctaagatggatgtggaacacagtgtggggttggtgttcctttttaactgagttccctccatgcagacagaggcagtgctgggagagtgtcgggtgcgtttcctctccttcctggccgtgggcagagatgtccacacgtttgcattcatcatggctgccggcccagcctccttctgctgccacatgttctggtgcgagcccaatgctgccagcctctcagaggctgtgcaggctgcgtgcatggtaagctactagtagggtggtgtggtggtggcgtggccccatgggaggtaggctggrgagtgactgccctgcttgcctccgcagcttcgctaccagaagtgtctggatgcccgttcccaggcctccacctcctgcctcccagcaccccctgctgagtctgtggcacggcgtgtagggtggactgtccgcaggggtgttcagtcgctgtggggctccctgaagcccaaacggctgggggcccataccccatgaagaagcccccaccttccctccacctgmttgtgttgggccccagggaactaaagggtgtgggtcagggaggggtctagaggctattcctaggcctcaggcctcccaratatgcccctccccagtagstacggttccctgcctaggagctggggagggagagatctaatcccttcaaggaagtgataacactggagtggtaacaagaggagcaggaagcaaggccagccctggttctccatccccatgtgtttcaggtggaacaggaggaactggtccaggccaggcctcatcctcctggacccagcaggggcagaaggaggaagggactggtccaggcatgggtcccttccccctgctccatgggcacctctgctgtattgatatcactaataaagtctgtctgcactgctgtgtgccttcttatgcctgtaccacaccatcaacccattagcctgtgcctcagttatgatcttgctccaaagatctccttgccctgcttgcctggaaagaagaaattgggacagtcacacaggggtctggagtccaagtctcttatctttattttaacagactggcagcatcaggtcgcagcagcagtacagggttcctggctgggcagcacaggcctggggcgacagctcctgtcttgtctgcccagggcagtgtcaacttaggcctctactccatggctgtgaaaggacagcagcctcaaggcagtctagctcctgggcacaggcagccaaaccccctcccatatccagctaaaccagctccaggaaaggagaaggtcctgtttccccggcatccttggggcccagggactggttctttcaccggatgatcttgcctggttgaaccacagcagcatttgggctttttcaccctttcctacatcaagaactttcccaaatgtgggccctggggccctagcaaaacagtggccttggccacaggctctgggcctctgggaggctcccatctggcatcaggtggcggcacagagcagggctgtcagcacgggcagagagctgggcacaaagagtagccagacggcagggcgtgccacagggctccgagggtgggtggcccttatggtagagaaaccagaaggtctggaaaagttgcatgtcgccccgcatgcgatataccaggttgtgccaggcggtaggcagtgtgttgggcagcccataggtttctcgagccctgtagagaagctgccagtgcggtatggctcccggtatgtttgcctgggtcagattcaggatgtaggtctcatggtccaggaccacgtgagagctcccggagtagtttccatctatttggtacacacggtaacctgcaaggatgtggggctgactggaggggcaaggagcaagggtaactccagggaggggccacacatcctgcccatgctttgcaggctctggctccaacctccttcccctatcccaccaactccaggataagggaggctcccttctgcctcactcaccaggattaaggccgatgtaggtagttgcactgggtgccaggaaggctacagccagcggccggctcagagtctcttcatcatagaagacctcaaattcatccacatgagtgtggccaaagaactgagcagccagggtgttctcatacctggccagaaggtactacattcagaagattctagggaggggtaggaagacatctggggagataggatgccctctttctccaacctgttctagtgaggagcctccccactccatgggacaacagggatggtgagatgctcaagggaattttcagccttcagacactcaccctgtccctattcccaccctcatctccgtcctacctggctacaattcggtaataattccagctccagctcttcagacagtgccctgggggaatgtggccaattatatgcacctagtagggagaattaaggatggtaatcagggcatccaggggtccaggcagccctggctagagaaagggggactgaatgaaggctttcaacagtgaccatgagctgaatccccagggaacacttgttgggaatgccaggaaaataaaacttctgtgcccagaggtgctccagctcaacaggagcctgcttgtcccccagcaccaccgtgttcccactactggccctcactttgtctcctcgatcctcagcagcctgaagctcccccaccagccactggagctgtcctgcgggatccgtggagttgatcaagagccagaagttctcacgggaacaaaaattcatattgagagagatgaggcggagaccggggtatggggaaagagcatagaaccccccaattctgaaacaaagtaaacatgagaggtcaacacttgttccaatcctggtcctcctgtgctgggcatttgggtggagggtaaaagcatacatgacatcttccccacctgcaaggagctcacagtctagccagagaccaaacagttctaattattgggtctgtgtgacacaaaagactctgagggcagagggctccaggagtatgggggagggataagagttagctagaatgggaagcaaggaccacacagagggaagatgacatgggatggataaggtgggaaaaactggagcacttaaaaaaaagggggaaatcatttccagagggccaacatgagcaaagacacagctggggcatagagaggttatgctgccagacctttgaaggagggtggctggagataagagtagaaagggagggctggaaagctgggtgcagtggttcatgcctgtaatcccagcactttgggaggccgaggtgggcagatcatgaggtcaggagatcaagaccatcttggccaacatggtgaaaccccatctctactaaaaatacaaaaattagctgggtgtggtggcgtgcacctgtagtcccaggtacttgggaggctgaggcagaattgcttgaacccaggaggtggaggctgtagtgagctgagatggtgccactgcactccagcctgggcaacagagcaagattccatctcaaaaaaaaaaaaaaaaaaaaaaaaaaaaaagggagggccaggagcagtagctgatgcctgtggtcccagcattttgggaggccgaggcgggaggattgcttgaggttaggtgtttgagaccagcctgggcaacatagcaagatcttgtctctacaaaaactaaactaaaaaaaaaaaaaaaaaaaaagcctggtgcggcaaaacagtagaaagggaaggaggagtcagattaggggagccaaatgaagagcactaaggactcatgctagagcaatcagagacaatgccccaggttcccttctcccttcactttcattcacctttcttttcccttcctgggtttccacggacgataagtacctgagggtgcgcagggcttcggcaggcagccagggctcccaagccttggccatcgcttcatagagccagcgggaggagtggttgccctcaatgaaggggggagggaagctattgacaggtgtgctttcatggttacccacagcagggtacactggcactggccccaggaacttcctcacaagtgctgtgacggtggtcagggcccgcagttggtcctgacgagtctggtgccagacatcatgtgcggggatgtctcctgtccagtacaccatatcaaaagggccggctgggcccagcccactcaacaggctctccagggtcctcaggggcaggtcacacttgctgtattcgccccagtatccggcacctggccgggatgcgggcggcaggccagaaccccggcggcagcacagtgggtctgcacagtcagggtccgtgccctccaggtagtcatgatcccagtgcaggtcagtgaggaagaggatgcggctgacaggggcacctggggctggggggctagggggtttggggggcggcttcggcacagtaggcaaagagatgttccaagatgagaaaatgtcccagtgcccacaggtggagcccaggagcaggccacaggcctcagatgggctcagcactgagcgtctccacacctccaccatgtcatcctcaaagaggtggacaatggattggcacacggcaggtggtgctatcttcagcagattgcacagcttgatggccacggagcccacgcgagccacattgggttccttctgcagtgggaggagcgcatggtgagaaatcagaggcagagcagaggaaccaggccaacccctggccaccaccccttgggcctccatttccaaactggggctgggcaggactcagtgcaccaagctcagtgcacacctttgccttccagatattgccctgtaactcaggcagcaccaggccatcgcttcttctttagctcagcggcctgtggcatgaggcctttgcttggcaagctgacttcctcaggcactgtctgcattattttcttacttcacaaaggtcacaatggggtgatggtggcatgtagccatgggtgtccccaaaggggagcaaactcagtgatggattgtagatgccaccctctccatcagggatgcattctgagcccagcgcaccagcatcagccccagcccccagccccagcactcctttcggcctcctccactgcagccccttcagtgctcaccttcagcccgaggttgatggcggtgaatagacctttgcagattgggcaggtgaggttcccccacccaaagacatctcggagccggggcactatgcgatgtaacctggcaggatggccttggggagaaagagggtgagcctctgccggagcccagagaacccgagagtcagacagagccagcgccagcgccagcgccagcgccagcgccagcaccaggcccatccaaaggagtccgggggctccggcggtcccgtcttgtccctgctcccggccggacctggggcagctctggcggagtgacgctccgtagcggggcattgtcgcgcttcctacacggggctggttcgtctgtcccgtcccccccggcctggaccctagccagccctcagggccccgggcggcgccggggacacccgattacccttctctgtagtcggctgactgctccgcggccggccgcaaagcagctccgccccttcctcttcctctgatctctgacagctgatctctcggtggcgggcggctgtcaacgctgcgtaggctggggttgcgtgggggtccgctgggccgccccgattccgccccctctccctgcccccgccctgccccgggcgcacgggctgcgggggtggggactctccctgaggtcaccaggggctccgccttgaggtcacagccgcgggaggccgtgctcgtgctttggagctccatgtgatgtggtcggtggaagacgtctcctttgtcagaatccgcgctcagattcccggaatagctgccagaccgaccccagcgtttagcccgggaaggggaggtaggagagagcagggcgggcaggatcctcccactgggtgtgttgcctctgacaggaaggcgccttccctcgattccccatgctctgccactggcaccagccctcttgagtcaccctgagaatcactcacctgtgattcagatgaggaaacaaaccttagagatggtgaagagactaggaagccgtaaagaccatatagccgtgggggccaataacatgggcgggaacccaattgggtctcccacctccgtgtatccacgacagtaaaagcgagcatttatggagttgtttatgatgtgccaagcaccaacccaggcactttataattaataatcttcaattctcacaacaaccctaagaagtacctattatattggggctcagaaatccatacccaaaatatggtggtttgacttactaagttaagccttaaggtgtgtctggccttcctactcccgcgccctctctcccaaagccgttacctagcgtccagacccatcaaaaggaacaacggtttttttcttcccctccctacaaaaccaagaatataatcacacctgaacagaccccttcacatgataatgtgctagttaatctgttccctgatccattccttctccctcagcagaattcctcttcccctcactcccacaaccccctttgcctgaatgacacctaagcttctgaactcgtctgggaagtgggtagtcactctgtggttccccgtggacacattaatacaatttctatgccttttcttcaattaatctgttttttgtgggttgatttttcagcagaatttcagagggcgaagggaaagtttcccttggtccctgcaaatactattattaccctcctttacagataggatgaggcacaaagaagttaagtggcagaatagcaattaaaccctaagctgtttgacgagtgcttctgaggaatcctcagagctatcaagtcctgtcagttctttcctttgat

SEQ ID NO: 97793 - DNA, 61833 bp, Homo sapiens
caagtagctgggattacaggtgtgtgccaccacgcctggctaatttttgtatttttagtagagatggggtttcaccatcttggccaggctggtcttgaactcctcatttcatgatccacccacctcggcctcccaaagtgctaggattacaggtgtgagccaccacatctggcctctgcactcttatattggcttcccttctttcctgttttactctccccagtcacttattcctgttcctttggatccattcccaaataaatcacctacacacaaactcttgactcaggctttgctttcaggaggaaatctgggctaagacagtcgacataagagtggtcctagaaggcagacctgcaaggaagggattcacagccgtgatagctctactttctacaatggagtcatggccctgataggaaacatatggaaccctggaacaaagaatgggaacatttgaatagattaatgtgagaattttgaattcctggattctcctaaaccttcaaggccagcagaagcagctatctttctcctgctataggagacaagcctctccttgcctggaatcctgccaagactcctcctaaggcaagggccccaacgatgatgcttattctcctccatatcccctacctcccttcattgcctgcagaccaataactagggttaggtctcagcacagcctaagtggagaaatacagtatctgatttataagcaaatagcatacacattgaaaaaattacgggacctatgttgtggcaggaacagggataacaggggtgtgaggagagggttgtaagaatgtatcaatctgggggcactctcattattcagggattaacatccaatcaaggatacataaaaccattttcacatgcttctgagatgcttctttgaaacttggacacaattacgaccttcggaaatgaagtagagatgccagaaacttccttggcagaatactgaaggagtcagaagtctcagagggattagcatgttagattgtagttattatgcaagatcagagaacctactagaagactacattcccatgggaagtccagaggccactcttttcaccgaggcaacacaacatgtaaaggtgaggaattcttagtgtcagtggggatggtaggaccctggaattgcagagaccagatgggtaacaatcaacagaggcagggtagatataaaaattatcacaaaatggccaggcgcggtggctcacgcctgtaatcccagcactttgggaggccaaggcggttggatcacgaggtcaggagatcgagaccatcctggctaacacggtgaaaccccatctctactaaaaatacaaaaaattagccggacatggtcgcaggtgcctgtagtcccagctactcaggaggctgaggcaggagaatggcgtgaacctgggaggcggagcttgcagtgagctgagatcgcaccactgcactccaacctgggcaacagagtgagactccgtctaaaaataataataataataattaccacaaaaccaaagtggcagctaagtgctttgacccatagggtctatctatggcaatggctaatagaccatagtgtccctagagttaactaaattggcagatgactgtgtattacttgactgtaacaacagcaatccccaaaatcaagggctcatgagcagaaggcagatgacagctgccataatggaaaatagtatttcctcataaatttccttgatctaggccagttctcaggctcagagcctattgatttaaggaaaggccaagcctttttatagaagagccctccaatgctgccaaaggtatacaagataattatttccccaatctttccacatgagagatctgtggccatttatcatagtaactctggtcagggggaagaaaaagaaccagactttcaaaggctattgggtacagagtatgagctggcatcagtgctggggggaaacactatcatggtccccccgtgacagaggctcatgaaagccaggtaaatggagtactcttgcaaacagatccagaagtctgaagatccacactgtactaatttccttatccctaagtaaataactaggacagatgttgtagcaactggcagtacactaacatttactccctattttattaagagccattaaggtaggaagggccaaatgaaagcccctgacacttaccctcacctttcttactgatttattaaatgagaagtaaaaccacatcctgggtggtattgcagagattaatttcaacatcaaatattttcttctcaatatccttcagtcaggaggatgaaaaactgtttgcttttatgtaggaataatagcagtacatattcactctcttgcctctgggctatgttagttctcctctctgcacaacacagtatctagcgactttgattgtctcaatattccattgaacatcatggtagtccactgtattgatgacctaatgctaatttgacctagtaagcaagaagaagcaagaactctagatgtcctagtaaagacacatgtatgccaaaggatagcagataaaaatatgaagattcaggacattcatattgttcaacttttttcttacttttttgttctagaataagttaaatggatgtaaaagtagacaaactagtaaaacgaatcccttgaaccactattcacagcccatattatttcatctatatccccaccaacttcttctatcccatattattttgaaacaaatgggtaaagttatcagggatcagtagtcatgccaggttatcccctgtaaagtaaagacaagttattgagctctgtatcctccaacactaaggcatagtgcttggtggagtattcctctgacccatctatttcgtgcccctgaaggctttcagtttcgggtgaaacccagagcaggagagagctgtacagtgtgtccaactagagtacaagcttctctaccatttggttcatattatccagcagatacaatggggctagaggcatacatgatgaataaggctacagggcagagtctctgacatgccctaataaaagagtttcagcacagatctctaaagttctggagcaaggccatgcagcagagagatattcgacttttgaaaagcagctgtttggccccaataaaaaccaagagcctagcaatgggacatcaagggtctatgcaaccagagatacccattgtaagccaggtattgtcagagtctaccaagtcgtaagattaggcaggtttaagccaggcatggtggctcacacctgtaatcccggcactttgggaggaagctgagggcagagaattacttgagcccaggaggcaacatggcaaaaccccatctctaaaaaataaagaaaaaaaaattagctgggtgtggtggtgtttgcctgtagtcccagcaacctgggaggctgaagtagaaggattgcttgagcctagggaggttgaggctgcagtgagctgtgattgtgccactgcactccagcctgggtgacagactgagaatctctctcaaaaaaaaaaaaaaaaaaaaaaaaaagcagacttatcagcaatccatcatataataatagaacaggaatggtaaattcaggatcaggactaagcaggtcaatagggtgcatgtaagtcaacaaaaggtggctcagactcctatgacacctacctcagctatcggctataccaacccttctgtcttagctcagacctacagccttagtaggtagttctctgtaaccaactgatggaggggaaaatagcccttactcacagatggattagctttagacattgatactagttaaaaaagaaaaaaaaaaaaagagattgttcctgtaacatagctccatttagggggtagccctaaacaactttgaagggaaattcccccagtgggctaagctgtaagcagtatacttgttcattcattttgtatggaggacaaaacaattccagatagagatttacatacacttgtgagcaatggcaaatagtcgagtggtacctgttcagccctcacttatgtgcaatctggaagtgcaagcagttgaccaatggagacagaactaggaaacaaatacctcctcattctatatggctctttagaagcccccagtgggattaaacctcagtaacccacagcaatggggattgagacaaggctgaggtgaggaaaaagagcaaggcacttgtctctggtgcaaatttaaggaggcaccaagaaattcagtaaccaagattaattatattttaatgcaatattttttaaaatagaaattaatgcaaatacccatgatgaacgcaatatcaaaattttcaataaagacaggctcagtattgctaattttccatttattcttaggctccactagggctccacacaacactgttactgatcttggtcatcgccaataaccatctcaatttcacagtctatgttggctttacctccctctctgttcactctcctccctagtccctcacttctgttttatggtatcattactcagaataaacgaccttatatacgttcttgtctccaactttgctctattatatggggtggagtagggagatgaaacccaagctaagtaagataatgaccataatatatcattcgaagaaggatacttgtgaaagtaaagggaggctctattaataatttcactggattaataggcataaatcagagctgtcctagcacatcaggatgtatagtcttattacaggtaggaaactgaggttccaagggggtgggaagtcctcctaagaggaggggtcagactggaagctacacaaaaagaggcagaaatgtccctccgcctcttaatcggagcctggggaaacaaacacactcgtgcaaaatctccaaagaggtgagctcttcaccctgtcaattttatctgcctcgtgaaccccagggctcaggctccaggcccgggctagctcacacaacagcagaagggccttaggtctgggcactgagccaaaaaaagggaggctgtggtccctgctttggttaccctgccgggtctgagcgccaaatcggatctcctacttctctctccctccctccctctgttcctggactgggggcaggcccttctgctaacagaaagccttccagtcggagaaagctctggcagcctgccgcgataaagggccctgggggcgtgaggagagcaaggggctcaaaatcagaacccagcgtgacgacagtgcctccatgactgtgctcccgcaatgcgcaggctccatgtcctggcgcccgcccgcccatggacccggcgggggcttccaggctgggctcagccattacgccggcgtgcgggggaggaaactcgcctcccgggcactcggttgtctcctgcccccgcccctccctccgatccgggcccatctctgacgtagtgtgaccttgctcatcccttccaggctgtgggcctgttttccctgtgcaagatgagggtcctggctgtcctgaggacgctgtccgggcgccgccaggggtgaccgaattcagctctgctaggactgttgggaaatgagctccctgtcggcgtgtgccagccgcctgcgcgaggcgccacaggagagggcgcgctcctgtcgctctgccgcccccagaagtttcccgggaaccgactccactgactcgcccctccgcgccccacgcgtggcagcctaagctcagcctccagattggaggagaccgcggagggaaccctgctggggtctgggcccggggcgacgcggcccgagcagatcgagggccgacccctccgagaactcgctctctggcctcggctcctcccttgcgcccgccctcccacgtggggcccaggtctgggaatcagcgctcgggggtggctggggacaaccgagaacgagcttcttccccggcacgcgggcggaatggctgagcccagcctggaagcccccgtcaggtccttgggggcgggcgggcgcgcgaagcacagggcggagacagccgggagcccagcctcccgggctgggccgccctccccttccccgcgccsggccggggatgggggtgtggtcccaagtgtacagtggcatcaagctcagcgcgagctcccgggaacgctccaacgccttcagcctgtttcccaggaacggtccccggcttcgcgccccaatttctaacagcctgcctgtcccccgggaacgttctaacatccttggggagcgccccagctacaagacactgtcctgagaacgctgtcatcacccgtagttgcaagtttcggagcggcagtgggaagcatgcgggactacgacgaggtgatcgccttcctgggcgagtgggggcccttccagcgcctcatcttcttcctgctcagcgccagcatcatccccaatggcttcaatggtatgtcagtcgtgttcctggcggggaccccggagcaccgctgtcgagtgccggacgccgcgaacctgagcagcgcctggcgcaacaacagtgtcccgctgcggctgcgggacggccgcgaggtgccccacagctgcagccgctaccggctcgccaccatcgccaacttctcggcgctcgggctggagccggggcgcgacgtggacctggggcagctggagcaggagagctgcctggatggctgggagttcagccaggacgtctacctgtccaccgtcgtgaccgaggtgggtgccaggccgagaccgttgacccgggagtgcctgaccctccctctgcgtcagccccccttgagactccctgcgcagtgcccgggtcagcgctcccctccccctcaaacctgctgttcatacttccagcagcgggtgtgcaccccmagaaagaataggactcacgcgaggcgcattcctgggtcgtttctgtccaataaggaggtgatggagaaaggagtttgtcaccaactgtcttttcatttccgattttcacaacaaatgaagtttcctaagaacctagatgttgcgttgggggaagcgcagccccaggctacccagacgcactgcctgagtcaccttcctgccaggcatgggaggaggggtgtgagggaccttgttactgggcagggcggggccaaatcttgtctgttccctggccacagacttctggaggcatcaggaggtgtactgccgtaccatatacttgtgaggtttggggtcctttcctgaggccccagtttctctaagacagcagatggcctcctgaggctcattgggtgcaaggaagcacagaaggcgaaaccccagctggaagccctggccctcagggacctctctgagcacagggtgagttggcaggcaggggctgtagcccctcagcaccctgcgtggttagtggcaggttttctaagttccaggaatgaggatgcacacacacttctcccgcttttgctgcttcacatctggtaaggacctgggtcaggatacacctttcttctgaggagagcatcctcatggagctgttgcctgctattggtcaggcaggtaggatttccctgctgctagtccctcctctgcctcatgctcctcccaagaaaaacytgagtggcctctgctagtcccttatccctttccctcagcacggtatagcggtcatcagacattgtgtctggccttgtgctgagcactaaggtgtggacatctggtgtgtggagcctaccctcagatgcccatggggcacactggctgtgttactgagaaggctaacattaaccctggttagcaatagggttctggaacccaaattcaagtcctgccttgcttgctatgtgacctgggataaataaatcaccctctctgtgggacaataggtggaggaaatactccaagaaggggtgatatgattttagctgattctgaaaatgtgagcaagacctgtctaggcaagagtatgggaaattcaggtaatggaattctcatatatcggaktggctggaactcaagggatgacagatatgacaaatgagactagaaatggccacaagggctagttcatagtggccttctatgtatactgaggagctgactttattcggaggacagtgagaaaatagtaagcattctaaggccaggttcgtgcttttggaaagagctcactctagctgctatgataaacaagaagaccagtgaggaagttttgaaactctcctctgcaagagaatggtggccagccaggcgtggtggttgtcgaatctgtggcacctgtgggaagtgggctcagcccagggactgcctttggatcccccagcattggcaccatacctaccctgggccctaaggtggccatgcttctctggatttgcttccctagcaggggctctagtgcttgcccactccctgcccacagcatggcctgggagcagctgagactgggggccagctcatcccgcgtcgattcctggaagtgttatcagtgcctgttatggaggctggacccatgagtggcagccttccctggcagctgggctgacctgtctgcttttccattgctcgctggttttgttcactgtagggcgtgaggggtgagtagctgctggcctccaagtccatagctactcatgttgtacgctgttcacagggacctctaaggatgtacatcatcacacattcacacacatgcaccaggatttgctttttttggcagcttttcccttcctggcttcctttttgagtggtggaagtaaaataaaaagcaactaggggctgggcacagtggctcacgcctgtaatcccagtactttgagaggctgaggcgggcagattacttgaggtcaggagtttgagaccagcctggccaacatggtgaaaccccgtctctactaaaaatacaaaaattagctgggagtggtggtgcacccctgtagtcccagctactcgggaggctaaggcaggagaatcacttcaacctgggaggcggaggttgcagtgagctgagatcacaccacagcactccagcctgggtgacagagccagactgtgtctcaaaacaaacaaacaaacaacaacaacaacaaaaaactgggctctggtggttgggaggaggagggaaggaagcaagtaccagggtaagcaggatggatggatggctctccccyagaggggcggcagcacacagagttctggagtcagactcagtagagggccagttttgactccactgccaaccacctggctgactccaggcaggttacatcactgatgaaagcctcagtttccttgtctataaattgggggtacaagcgatgaaaagaggctcaacatcactaatcactagggaaatgcaaatgaaaatcataaggaggtaccactttgtacccttaaaaatagytactacaaaaagaaaaaaaaaacacccagaaatccactttgggaggccgaggcaggaggattgctagggggcaggagttcaagacagcactgggcaacatagtaagaccccatctctacaaaaaataaataaaaaattagccaggcatgagggcatgtgactgtagttccagcttctcaggaggctggggcaggaggatcacttgagcccaagagtttgaggttgcagtgagctatgaccatatctctgcactccagcctgggtgacagggcaagaccccacctctaaaaaagtgttgttgttgtttttaaacacagaaaataacaagtgttagtgaggatgtagagaaattgaaacccttgttcattcctagtgggagtgtaaaatggtgcagccactatggaaaataatgtggtggtccctaaaaaaattaaaaatagaatcaccatatgatccagcaatactaattctggatatatgtctaaaataattgaaacagggtttcaaagagatatttgtacaccatgtctatggtagcattattcacaatagtcaaaaggtgaaagcaacccaagtgtccttccacagacaaatggataaacataatgtggtatatgcgtacaatggacgattattcagctttaaaaaggaaggacatgctacaacgtggataaaccttgaggagactacgcttagtgaaataagccagtcacaagacaaattattttctgatttcactacaggagtagtcacactcacagaagcagaaagtaaatggtggttgccagggactggaagaaggaaggagtagggagtcgttgtttcatgggtatagagtttcagttttgtaagatgaaagtagtgttggagattgattgcacaacagtgtgaacgcttctgaactgtacacttaaaaatggctaagatggtaaactgtatattatgtgtactttatctcagttttcaaaatggggataataagagaagccaccttatctgagttgttgggaggactcagtgagataatgccccatgccccatccggtggtggccagcacagagtgtggcaccagcaaagagtgtggcaccagcaaatgggcttcctaggtggtggtgaggagtggtaaaggcagaagctcagcaccttctttgccttctccactggctggggacagtgggcatggtgggagctgttctaaagtccaggttgtggcctgtgtaataggtgatgggacttgctggaggctgagcccctctccccacagtggcagttccaagcctcagagaatagaacacaagtccaaacccatactgacttggccagtgccagtgtacagggccaagcccagggcccctgagaaggttctctgcatcccagttggcacaacacaggtagtgggactgtcctcagattgtgtctttgccttatactgccgtgccaggatctcccaatgggcatatctttggggacagacaagtctgcctgaactgccccccaacacctcttcacaggaggacagggttagccaggaaccaaggatggcatgctgtgctgtagaaatgcctttcatagtatgccaggaggtagcaataaggtgtctgagttggggtttgcgtgagtgcattcgtctgtgtgtgtacatgtgtataaggtagtttccttcttcaggggttgattgtgaggtccaagtttttcaacctgtgcagttactaagagtcaaattatttttcgttttwttttattttattttattttattttatttttttgagatggagtttctttcttcgttcttgttgcccagggtggaggagtgcaatggtgccatctcggctcactgcaacctctgcctccttggttcaagcgattctcctgcctcagcctcccgagtagctgggattacaggggcctgctaccatgcccggctagttttttgtttgtttgtttgtttgttttttgtatttttagtagagacagggtttcaccatgttggccaggctggtctcgaactcctgacctaaggtgatccacctgcctcggcctcccaaagtgttgggattacaggcgtgagccaccgcgcctggcgattattttttaactttattttgaaataacttttgatttagagagaagtttgaaaatagtacagagatttcacatatacccttcatctagctttctctgatgttaacaatttaaatacgcgttatgcatttatccaaaccaggaaattaacattggttacaatagtaataactgaactacagactttgtttggatttcaccagtttttctactactgccctttttctatcgtaggatcccatccaaaatcccatgttgtatttagttgtcatgtctcagtctccaatctgtgattgttccttagtctttccttatctttcatgatcttgacatttttatgagtattttgatgaatgctcctcagtttgggttggcatgatttttctcacaattagattgcgttatgcactttttggtaatgataccttagaagtgatgcattctctgggcatcataccagtgggtacatgatgctgatgtgtcttattactggkgatgttaaccttgatcatttgtcaagttggtgtctgtggaatttctctgctgtaaaggtactattttttcctctgtcactaataaatatcttaagggaggttcttcgagattatacaaaatcctgtgtctcctcaaatttttattcactgattttagcattcatcactaggtcttgactgaaacaattattactgcagtttgcctagtgatgattttgcattttctgattccttcaacatttattaattggaattcttctgagaagaagagcttcccctccacatctatttattaatgtrtgcaattgttaacttatatcagtacaggttcatacatacttattttatttcatcagttataaactaatgctatccatctttattttgttgctccagttattctagctcaaaccaagttatttttcactttaaggatagagaatgtagatatccasggtaagggcctttatctgtctctgcagtcagggctagaggagtctgtgtttacccctgcgggaggagtgccagtcacagctcgttgctaagttttccatcaggcagcagttgagcasgaacgcaagcasggactggtgggacctgggttgggactgaagcttctgttggggaaggaagtgccccaagcaacccasagtgtctgatgctggggtcctcatccctgagacctactgcaggggtcagatctcagtctccatgggcatggcccttcatatatagccctcagggccaagacctcagagagaagaggccctgcgtgtgaggaaacccggcagcctcctgccctgwggctaaaggagcasgaarggcaacaaatgctctgctctggagagggcctaagttcatctgcagggccacagggcaagcagcagaggcaatcctggctcgtggccasgggctaagcatgggctggcctttgcctcaagcatgtsctcttctcccatggagcatcattagggtcttgaccttcccatcagtccatgggctgggaaaactgaggcagtcacctctaagctggatrccacttctgccaggtcttgtgctccagaggccctgggggaaccttgtgtgttaaggaccagccttctttgcaggccaccagtgatctaagacagggctgctgccacaccgtagatcctcctgtcctcttctgcagctgggctgcctcctctaggaaccctagtggagctgctggtagcccactggtagtggagttgatggagcctccagcaaagggcctggacctctggtggcactagccttrtgctttcctgggaactggggtcagggcctgaacagcagtaggacttactgattccccacccayaacccagaggcgagccaggttatgtggygaaggataaggcctcttcccctgctaacrgggaacttctgggaggcactgagagcagcaagcaagggaataatgaaacagactaaccctcacrtgcggctgccactatgtgggacttcacatagcrgctctcaaggatgcacctcccctggggtctgggtaggccccgacaaaaggggaaaaccttccgtgataggcaggtttgtggagtttctatcaggcctgcaggctgccctgggacattgctcacgggtgtggagactgtcaagatagcctgaatattaaccaagttgatcatccaagtccatactcagacctgccctctggcagattccaaaggggataaggtgtgggggcctctggctccagccagcccggcgagacttctatttccagtcaatgcttcagaaagtagatcttgccagagagcacatagaggagactcaggggcttccccttgctctggcctgaatgtgcttccctgtttgtttatcagctgcctcaccccaaactgtttgcctctctgctgtgttcctctgacaacagccaccaggatctcagaatatgcttttgttcagaggctgcttcacctgcacctcctgccaagtttctggataaacagactttgtccatccctcttggtgggcagcagaactctcagacagagtccaaggtggcattttgacaaaaacaaggctttgacaggactggtcagggggagctgcaggtaccttgggcctctagaaggactgtaattcctcccttatggcaggctgcattcaatttaggtgtaagrctaatacaggtgtgccttgttttctaaagctgtgttgtggttttatgcatgtctctggagtccaaaagaaaggcaaggatccccatttggaatgaagaaggtgtggagagaatggacgttctggggaaaggctggaatgacccacatgctctagcaagaagcacagacagtccaaggctggtggctcctgctcagcatttgcaagactggagggcaggttcaggcggcaacttccagagcttcccctcagtgcttggtgactggcacagacacgatgccatttgctcatgttcccctaatacagactggtagagctgtggtggatccattgtcaggatgcaaggggcacagccaggtccctgagtgacccttctccttcccacagcccctccactcccatccctatcttcccactcacactcactggttcttctgctttggtttagcctccaatgatcacagaactcatcagtgaggcttttccatctgtggtagcttttctaatataaagaaagaaagatactgagaacattttaaggcttagcagccttctggcttagttgtttgtaaatgaaaatatgagtagaagaattaaacagccaaaaagataacccacaaaatgggagaaaatattgacaaatcatatatctgataaaggatttgtatctagaatataaaaataactctgataactcagcaataaaaagacaacytgatttaaaaatggataaaatcatttgcccattttggagaatagatgttttgccaaagaaatacaaatcaattagcacatgaaaagattctgagacttcgaagttagcagtgtgaggagcgccagcgccatagaccagctcctcagtgaaacagccataactggtgaaaatacacacacacacacacacatttagagtctctggaagttgtcctaagggcatatatttattcaagaaagtcgactataccttggcaagaacagtgaagtctatgatatttgagtcataactccttcagccctccccttccccttcctcccagcacaagaaaaatggaagttccactctaggtgggtatggccaagaaaatactgttctctctcccatcagcttccaaggaagggctacagcagcccaccaagagggacaaccaatgcccatcccccacccatccctgtattctcttagctccaaaccacagaaggtaaaatcctcgtgagtgcaaccaggggatcataggttcccatcctccacccaccgcctattcatatagtagagactctactccaggtgccacaagttgagaatattagagccttgattgcccttatcccagctcattcatacggcagagattccacaccaagctcccacttccactcagtgtctgactcataaagtaggggtgtcattctgagataaatgggccgctttccctgcctacctctctacaacaggagctcagatattttgcccagcggggagagataatccaaaagaacagagttctaaagctgtccccacaggaacgaactttatttgaaatagagtgtgtgaaaggacagcctaagattgctctcaagaacaatggagaatttagtggtaagcaactaaaaggattctggtaactccattagagcaacaaatgaacccataatgcagctagtttaccaggaaaaaacagaaaacaaacaaacaaacaaaacaagaaagagacagctaagagcagcccttctggagtcaaaacaaaccttatagatttgcctcaaaaactaccactgcaaagaggcttgacgtcaactggattagactgtgggacaatatatgcccccagggcattattgaaatgaatgaggcaactggctagcaattagtgaggctaacagctgggtgtgataccagcagacacagacagcttaatagaaagatcagactggcgtggtggctcatgcctgtaatcctagcactttgggaggccaaggcgggtggatcacctgaggccgggagtttgagaccagcctggctaatgtggggaaaccccatctctactaaaaatacaaaaattagctgggcatggtggcaggtccctgtaatcccagctactcaggaggccgaggcaggagaattgctggaacccaggaggtggaggttgcagtgagccgagatcatgccactgtactctagcttgggcaacagagtgagacttcatctcggaaaagaagaagaagaaagatcagggaaatgggggtggaagaatgtgacagtacctaatttctacaatatattatctaaaatgtccagtttttaaccagaaattacgagatatgcagagaaacagaaaaatatgacctatacatggggggaaaacgtgggcaacagtaactgcytgagagggtccacatgtcagattttaacagactttaaggcataaggcagccrttataaatatgttcaaagaatgaaaggaagtcatgcttttaaaagtrtgatgacaatattgcatcaaatagagaatagcaataaagagagaaaaattacatttatatttttaaaagctgagccagacatgatggcatgtgcctatagtcccagttactcaggaggctgaggtaggaggattgcttaagcccaggagttcaaccccagcctgggcaacagaaagagaccttgtctcttaaacaaacaaaacaactgaatagaacttctggagtaaaartatacaataattgaaatttaaaagtaactcaagggccttaacagaagatttgaacaggcaaaagaaagaatcagcaaacttgaagatagaggattggaaattatgcaatccaaagaacagagaggaaaaagggaataaagaaaatgtatagagtctcagagaaatggggaacaccattaaacatagcaatatatgcataatagaattactaggagaggagagagagagaaaagggcagaaaaaatgctcaaagaaataatgactgaaaacttcccaaatttggtggaaaacattaatctacacctttcagaagctcaacaaactccaaatagaatgatcacaaagagatccacaccctgatatatyatggtaaaactgcttaaataaaaaaaragacaaaaacgaagggaaaattttgaaagcagcaaatatatgactaggtacatacaagagaactccaataagatcaacgtttgacttctcattagaaaccataaaggacagaaggcagtggagtggcatattctaagtgctgaaggaaaaaagaaactgtcaaccaagaatcatgcatccaacaaaactgtctttcaaaactgagataaagaaattcaaaaatacacaaaacttgagagaattgtttctagcagtgatgtcttacaagaaatattaaaggaggcacttcagaaataaatttaaccaaaaatttgcaaaatgtatactttaaaaamtataaaatgtcattgaaagaaattccagaagsccttaacaagtggaaaagcttcccatgttctgttcatggagcagaagacttattgttagtatggcagtgctctccaaattgatcaatagattcaatgcaaaagatgttcaacattagttattagagaaatgcaatcaaaaccacaatgagatacctctttacacccactacaatgactaaaattaaagacacacaataacaagtactggtaggaatgtggagaaattgaaaccctcattcattgctgttgggattgtaaaatggtgtagccactttggaaagcagattaggagttctgcaaaaggttgagtatatacttaccgtatgacccaacaatttcactactatgtatataccccaaagaaatgaaaacatgtacacacaaaatgttgtacatgaatgttcacagcagcattattcatagtagccaaaaagtggaaacaacccaactacttatcaactgatgaacagatcattgaaaacgtggtagacccaaaccgtgaaatatatatatatatatatatatatatatatatatagttgttgttgttgttgttgttgagatggagtctcactttgttgcccaggctggagtgcagtggtgtgatctcagctcactgcaacctccacctccaggctcaagcaactctcctgcctcagtctcccaagtagctgggattacaggcacgtgccaccgtgcccagctaatttttgcatttttagtagagacagggtttcaccatgttacccaggctggtcttgaactcctgacctcaggtgacccacccgcctcggcctcccaaagtgctgggattacaggtgtgacccaccgcacccagcccaaaccatggcatattattaaaccataaaaagtaatgaagtgctgatacactgcacaatgacatggatggacttagaaaaggagctaagtataagaagccagtcataaaacactatatattgtatgattccatttatatgaaatgtccagaataggcaaattcatagagacagaaagtagattagtggtttccaggggctagaggaagtagcgaatgaggagtgactgctaacaggtatgggttttctttcaagggtgatgaaaattctaaaatcagatcattgctgatggttgctgaagtctgtgaatatactaaaaatgattgatttgtatactttaaaagagtaaatgttatggtgtataaatcatatctcaataaagttgttacaaaaaagtaattaactagccatgtttgtttttgtttttctttgttttgttttttcatattgtcaaggaattcccagctttaagtcacaatcaagtgacaaagatagaactggggtggatgtatagtccattattaactactacttcttacttttctctagaataaaggataactatgagaggatactatagaaatcaatcttttattcttaaaaggaccattgctaatttttcactcacagtcatctctgggattgaattccatttatcaaatcccttttataagagcttttctagcttttagtaatggactggaataatttttatttcttagaatttctttctcttagtcagatttaagtgtaacctgctttgcttattcgtccatgtgttccaagtcatgattttgctcaggacaaataaaatgctctactagtatgagcctggtagaaagggaactaccatttaatgaggcctgtaatgtgtcagacgctccactgatatttcccatccaatgcacacaacaaacctaggagcaggtattattgtcatctttttgaaggtgaagaagcaggctaatagaggtgaatggattgcccaacatcacacagtccaaagttgcagaccccgagaaagcctgtgttctttgctgaacaccaggctaccttccagcgttctcagttccgtgcaggtcagacggggttcacttatctttatggtcctttatagctctggtaaaaactaaaactgccagactttggctacttggagagttagttcaaggctgagggtgattttccaagtgcaatgcgtgatactcctcagcccaagaaccacattttccaggctgattttctatgactcctaattaattgttcaatattcattcaacaatttgttaagcacccactgtgtgcctagcactgtgcaaacactagtcatctaaaatatgattatacggattattcaggttttagaactctgtccttctgctggagratggtgaggagggggtgcctctttcctctctagccaaagagcaagggtgaagtggcccagaacagcgcccaccccacccagggctgctggcctcatgcatgcacatgtgcacatctgtcctgtaaagtatgcttgaccttgagctttgtgagggcagggaccatgtctttcttgtgccctacacagagcctggcctggagcaggtaggtgctgaatgtcagttgaatcaatgattaagcaatttttttttttttttttttttttttttttttttttttaccaattcactaggaraacttgggctggttgctttaktgctctgkgccttcatttcctcatttgtaaaacaaggataaragtacccatctcacatgccaaccctgaratcccctgagataatacacggcactcagtgagcactccacacactgttactgtctttcccattactccctttactatagggagccatgggaagcggcacatccttctatgccaagagtgacctcctatcccctattaccttgtcacctggatttttgtttcttaaattagagctgaaggccatgcggcccagctaaatggagctcactctgctctgttgtgagaaccttggtctgggaccctgctgatgggacagacatagtaaccccgggaggccccatcagaggggcagggagaggggaggtaagctatgtttcagaaatgttaggatttgacttgaaagcacacccccaaagcaatgccagccagctccttaccaggacatctgccattagcctctgagctggtcatgtgtatgtatgtgtgtgtgcatgtatgtacaaacatgtgcagggacccacagggacaggtctgtcccatcaaggaaaacactgtctcccactgggcccrccatgtcactgttaaccacagggaggttttgtggccctggctagcggagacccaagacatatccctcaaacctgaagggcccaggggcaggcagggccggtttcctaagaaaagccytttctaaaggacccctcttaggactggcagctgatttactggactctagcccttcgctccaggtagaacttcatctgccaatcctgtgtcctaataccaggcccctcacagctttccaaaaagacacttkcggcaccataactccccaaaggagagcccagccctagaatcaaccatgggcagccatgcagtctagctgccttcccctgctggttgtaagcagggtctccaaaggcagatggcacccctcatgggcttggggcaaacggycactgygtgtgcatggctcttcctgtgctgcatgatgctgacagggcttcttgggcccctcttcagggagggaatgggaccgaaagccatcgatgcagagcctacaggaaggagaatgatgggagatggccctcacctcaccccccttcccagtgtccccattcagaactcctgcatctgcttcatttcctggaggccaggtttgatcccctgccagggccagcttcatgggcatgcaactgtgcagtcacacagagcgccacacttggtttcaatgctttgccattgctgtattgaaattcttaataatttttgaccaaggagttctgcattttcagtttgccctggaccttgcaaattaagtagccagttcccagtcctaccctttgctcatgcaatgcctggctccacatctaacagccttccattcctttctatctctaaatcctatctatcctgccctaaggcaaagtccagacagaaaaatatttgacagactacaaaggagagcacattatatttgaaagagcttttctgctcaactgcagatggaatgatgatggttggcatgttaatgcctctaccaatcttgagttcttcttggctcagtctgaggctaaaggctgtgatggaggccttctactcctagtcctgggtaattgtctcctggtatcacattccttgaagaagtgtagggcatcatatttaataagctcattttgtcctgccttagggagtataggtccaaagcaggacactggtacaagattgggttctgaggcccaagtaggtatctatcatgctcatttacttgctatgacttcagacaaatcccattctcacagtctcagtttaatcttctgcaaaatgggtcacaccacatcatgaggctttgggcctcaattgctcatctctctaagtcagaagcagaacccaagcttttatctgaagctttggacaattatttttggagggagatggccatgaatgcaggcacacgtcctgtttaccacttccggtctatggactggcagaacacattaatctggccatacagttttagaggattcatttccctttctcctgaagcccatgcaagagccccaggcgaggcaatcctgctctgggtacagtctgagatttatccttggattgtgcctgagcagcagagcgctaacttcctggcccgagttgtttttcttctgcagagctgtgttgggcrttgcctgtggccagcatttgagcactgtgacaggcggcctcatgaatcttgctattgtctctaggacaggactattctcgaggacattatcctcagcatcacagagtggctcctttgtggaagaagtacataggagacacttctttcrgatctcagtattcagaacaactgtgcttctgcgaataagcrgactacttcggatactgtaacccttctgagagctgagctgctgggatacgcagagccagttttggagccccrtctggcaagcaggcaggcccgtggacaggatagtctagggtcagtcttaccccaggcttggtttttgcaacttccctcctctttattttccattttccccaattcccttagctttttgttttacatttttctcttgtgtgtgtctttataaacacctctgtctgctgcagaatraggtgtgatataaatatgtgagtttgtgcttaaatccaccacactttcaagggagttgtgaggattcagaaggaattgtttggcgaatgcagtaaaagcagccccatccaagatggagctagggctgggtgggaggcaggggtctttcctccagactggatcatctcgccacagacagcagcccccaaaacccaagcccaaagtgctcattggcatctgtttgtttatttatttgtttttaataaatgaaaggtcactaaacacactttgaaatttttgtcacctcccttgagatgttgcttaattgacttaagtcaaactgaaactctggctgaaactcattttgtagatgcactggcagggacttgttagggcagcagcatcccacagaccctagggaatgggagggaccacacttctggaaagactggatgggaaggagggtgtagggatgtaggaggggagctagggagccctggagaggagtaagtaggccccagaacgatggggccccgaatcaggccacaagcttggcctaggcgtgagtggaccagggaccacatgatttctcagaggggcctgctcagaaaataaagtcacagagctcctggaaccacttgcacttttcaacaagggaaaagaaattttacgcctggaccaagtggccatgccctctgccctgccctttgggcttttcaaacacctcccctccrcactaggctggcttctgaagatgcagtgccacctttactttggactgcctcacagctgaggggtcaccagtcacagccatggccttggctggcttcttgmtatgtaatgcgagcggagtaggagcatcaccctccctttccaaagaggatcctgagtttcagggagggcagtgacctgccccaggttactctccccagtcccggcacaggccagtcaaacccagggctgcaaggcmtatgccctttgtacaaaggcaatatcctggcccaggggaggagagtctgcccgccagccgtgctaatattccctcagagctgggctggggttgaggtctgcctcagggttgggctcacgcttcatgctgtcttccttggcagtggaatctggtgtgtgaggacaactggaaggtgcccctcaccacctccstgttcttcgtaggcgtgctcctcggctccttcgtgtccgggcagctgtcagacaggtaagcacatgggaggggaggaaggtgggatggtgccccttgtcaatcactgcctatcttggggctggactgaattcagggtatttctacccagagaaagggaggaccctcaggccactgattcagtgataggaggagccccgatgtctcctattcaccccgccctcagtccccttcacctggacacacttttgttccattctcccagcctcatgctcccagggctttggccagtggtggggaggggccactgaccccactggaaagtggggtcctcataccacagactccttgacaaaacatgacgytgccatcaccactgccctccctgctccaccaccacctcaggggtaggggtggatggcacaggatctgtctgcaaacagccagcagccagacagtgagccccaactgtgcacacactgctgctgtggcttggaccctgggcyaggcactggggccacagagctgatgctggctctgaccctcatagagcttacaggcctgaggaggcagcatcacagcaccaggagacagtattccacaggcccctgtatgtgctgggtgaccagtgcaggaaggtgggggtactaaatggcaatgctggggaaagcctcccagcccaagccaacagccagagacatgagtttggaaaatggggcgggaaaggctgttctgctcacacctgtgctccattctatccactggtcactaccagaatgtgaagataatacttaaaacaacttcagtgtcaccaacagacattgctgaaagctacaccttcccacagagcagtggtttgcaatttttgttgcacgctactcatctgggaaactttcccaaatcctaatacccaaactgtatcccaaaatcttgggaggtggggtgctggcatcagtattttttccaagctctccgggtgattccaagtgcagccaaggttaaaaaccacttgcagagtkactcttagttctggatttacagaattttcatgttgctgattcaagaaatatctgcaatctgtgctgtacccactttccagaaatgtgctggtagcatctatctgtggctccttctaaagagcatatttccacaaggtccttgmgtacactgctccatgcttttgagacatggtgtctccacaggaagctgagaatctcaaaagatatctcctgagcagatggatgcctgagacctcaccaaggaggaagatgggaggatgtgacagrgaaaaaagtctgccasagccctgaaaaaacactaartctgcattgatgcctgactcakggcttgcaacacaccttggcaacctacacatctcatgttttgtgttatactgcattctctakgtttggcaggaagaacgttctcttcgcaaccatggctgtacasactggcttcagcttyctgcagattttctccatcagctgggagatgttcactgtgttatttgtcatcgtgggcatgggccagatctccaactatgtggtagccttcatactaggtaggaatggcttctgggacatggggtgcttccctctaaccctctgaaaggcccagaaagaggaaatcattgggccattgggctgtgcttccaaagcctttggatatatgtgtcttgggagggagccgtagccacagctcttggagcaagtcaggggcagggcaggcactcgcagggagccacctctgtgctgagccctgaaatgtggtggagaagaagagcaggagccattaagaaccagctgcacaacagctgagacacattctctggagcacagggcttaagagaggcacagaggaggacagtttaggggaagggcagcctgaggatgtctttgatctgagttgtgtaggcttgagacttcttcctggttgcttgtgaagagacttagggtagtcactgtggccagtacacaggtggggaggctcatgtcagacagggggagttcagtgccagcccgccatcactgggcctatctggcctcaccctgagttagagcccaccccagagcctatcagctaagcacaggacaagcctccccacactgatagccccatctcctgtcaggctgcatgaggaagactcatcagttacaaggtcatgaagaggtccctggggccctcagcagcttttcctgggagggagttaggtgagctccaggcgagttgatgagggtcatccacaggagtgagagagtgtgttctcttgagcccagcgaatgggcaaatgagagaagcagaggtgaggggtatccctgggacagtagacaccagttcccatcatytctagggtgataatatattctaggtggctcagtaccatcccaatttgtccctattgtcrcagtgtcattattaataatactcctttaatagaagtctaacgattcttcttgcctcaaaagtccgaatctggttaggtgactctgattgctttttaagagtctgaaggactckttggctttggagatgctgcactgtcttaattgatggtgtgtacaccttctgtcaagttgccasgatggaaatattccaactctactcctttaattatttgcgaagagccccgtgccmtgggctcagcctcagtgtctgcagaggggagaarggaggagacaaggtgggaagaacatgctggagccacatggtcccagcaggtagcacactcttcagcaggccccagcgggaggaggctgctccccttcctgcagggggaaggagcggggcaagattttcttgaagatcatttgtgtagagggcacagggagcttcaggccagtgttgttggaaactggaggttggaggaacttaagatagaaattgcaacctcctagtccccagtggctccaagaacacaaggcaaagcctattgtcttcatgttcaaagtccccagaatccatcttcyrtgtgacgatcctccctaagcctgaaaaacccaacatgtggctstgyttgggccagacacataccaaaagccaaacaggcctccccaaaacggaggwctctgaccagcaggcccatatcccaggaggacctgaaggaccatctggaacagaagggtagagagtcrcggtgaagccagagaagctctctcyrtgggaatgggaacaaggtgggacttgtgccaggtggtggcatccccggttmtatagaatgggcagcactgagatctgcctttttagtggcacagggtgattctggagcctccaagcctcccctrtgtgagcgggtraggcagggagagcataccccaggcttcctacaggaaagggctgccctcccccgccggctctgacactrtcatctactctcctcccagttcccatgcagcatgtggtcccacatgcagggtgaagaagggtaagagggccaaggggaaagtaaggccatggaagatcagtcaagccagccagtcagtaggtaagaccctgggtgcagcagcctcgctatcagctgggatccaggcctctcagggcttgctatcagcctggggccaggcctgttatagggtgctctgggagcctcttcatggtagttttactccattgtgctctgcaggaaattactggcttttgtatcctggtatgagactcgttgtgttggrttctcaggtctgaaagtttaagtgtccctgaaaaccagcctgctctggaatggctggacgccccagtcagcacctggggttgggggacacagtacaaaggcaaggtggctgctagcttccctacagtgcagcagtgctctctggtgtttctgggataaaatagctgaattccaggttgtatttgactaaaataaaccaaagggtgtggtctgggctgaggagtttggtaggtgccttcgcttccaycctctggccctaaggaagggttggcaaagctctgcatgataatttcacattaacttgggaagccaaattactcccactgtcaaagtagtgcagaaatgagtccttgttttgtgctgcttttaaaaaatgatcaaggctgccacagtcgtagcagactagaaaagagaaagaaagaacastgctaccctacacagcataaagcagacatgcctggaagtgatggtgttgccggaatgatgctggtttaggaggaaatgaccactcgggaccaaggacactaaccctacccacgttccagctcccctcacaatctcctactgttgcccagaaataatgccctccacctgtcaatagccttctgggtagaatgccatcagtatcctctcttatcccccataactagctgcttaaacacaaaaagtgtttctgtatttaawaacacasaaaaaactcttgactgattcattaattcagtatttttcagtacttctaacatcaacctccatgtgacatttctttgggcatgctgaaccatttaaagctttgcttcctctgatgtctagaggttcctccttttgataggtgtgtaagtgatggcatcttcctttacaactctggctaccaggaagctcaggcaaatttgaaatttaactacatcaatgatgcagcttttaccagccacatatatatatattttttactgtttttaaattgaacagttgaaatataattttgtcttcgcctgtttaggatgccgtaacaaaatcctataggctgggtggtttaaacaaccaaaatttattttccacagttgtggagggtagaagtccaagatcaaagtgccagcagggttggtgtctggtgakggttctcccattgggttgcagatggctgccttctccctaagtcctcacatggtctttcctctgcgcaagtgctcagaaagagggaaagcaagaaagagagagtgagccatagagagctcactctctggtgtctcttcttgtaagaacactaatcctataccctatcaggtcaggggatcaatgtatgaataatagagggacacaaacattcagtccatgacagatttgcataccatgatattcacacttttaaagtgtataattcagtggtgtttagcatattcacaaagttgtacagccatcaacactatctaactcctcatcaccctgaaaagaaaccctatacgaattagcagtcatttccctcttcccctcgcccctggcaaccactaatttactttctgcctttaatggatttccctattccgcacatttgatataaacagaatcatatattatgtggcctttgtgactgactccacttgttttcaaggttgatccatgttgtaacatgaattagtattccactggatgaagacaacacatttcggtcatccattcatcagtcattgaacacctgggtgtttctactttggggctgttatgaataatgctatgaacattggagaataagtatttttgtggatatatgtttttaattctcttgggtataaggtaggacctctgctgggtcctatggtgattctatatttaaccttttgaggaactgccaaactgttttcaaaatagtcagctgcgtatttttgatcttttcaccaaggcacaactttttacttttctttatatcttactttaatgttaccattattttaytgtatttaaatttgaagttgcctcaaaatctccaagggatgagctggcatataaatacgtaaacatgatgcagaaatttgctggcataccttatttgcattgcaccgtaagagggaagaactggggagacccagggaagagcaagaacttactcctgtctattcacaaggagctcactgcctggttgtgcctctgcagccaatgcagctgtcactgtggacatggggacatgggtcaagggagtggggcacatattgctgggtatacacagagataggaaatgttacttttgactggagtgattggtgcagacagaggggaagccctgagcaggggaacatctgttaagccctgaagaggagttctgtcttccactgggcctttttggatcaaaagcattgtactttccatcaytcccctgacatgtagcacatttcaactgcttgatcaggataaagaataactattactgagcacctgccacatgccagacaccctcctaggcactttgcatacatgatctcagtcttcataataatatmtccatgaaagacggcttatcacagtcactctagtagcaactcagcatcaaggaacccaggttctccccgtgccagatggaggacactcctagcccatggttcctgggtctcgcytcatatcctggcagctgcactacagtcttgtttcttgagctggggtctactgagagcctatgttggtcatttatgaaggtgcatgtcctgcctctgtgtggaatgggcccagcggttcctggggcaggtactgctctacatggaaggcagcctggccctctctgagtcactccctcttggagagagtgctcagattcagaggggtgtgacaggtggtgggcaatactcctagggctatgctggccctcatcctagccaggtcatgtccctttggcttagatgtcaaagtttcactcccaggagaaactcagaagcccagccagaccaagaccaaccaggctttgccctagaagcaaagcaggcagaagaggcagatagagcatagggggccaggacagggatcccccgtcagcacagcaggagtcactgctgtgtcatctgtttcactgccacatggaaagctcatggcagctgcaggccataaaagatctgtgtaatcagggttctctcctagcattactcagaggggtctggctggcttccagtgacaagccaaggaagggaaaatgtaaatccacttctgaaagggggataaggtgggtggatcacctgaggtcaggagttcaagaccagcctggccaacatggcaaaaccccgtctytactaaaaatacaaaaattagccgggcatggtggcaagcgcctgtagtcctagctacttgggaggctgaggcaggaaaatcgcttgaacccaggaggaagaggttacagtaagctgagattgcaccactgcactctggcctaggcaacagagcacaagtctgtctcaaaaaaaaaaaaaaaagaaaaaaaagaaaaactgtaaaaatgacagcaggatatggccttacccatctcccctcatgtctctactggactctcagttgaagaactgctttataaggccaagtcatgcccccagtaatttttttcttggaaggtagaccagtatccatagagcaaataaggcttaaatcctggtgcaccacttattatgtgcatgaatttaagcaattggctttaactctgaagtctcagctaattatgtgtaaagtaggaggaatattagcttttgttttagtttttgtttttgtttgagatggagtttcgctcttgttgcccagtctggagtgcagtggcatgatctcggctcactgcaacctctgcctcctgggttcaagcgattatcctgtctcagcctcccgaatagstgggattacaggtgcctgccaccatgcctggctaatttttgtattcttagtagagacaggtttcatcatattggtcaggctggtctcaaactcctgacctcaggtgatctgcctgccttggcctccctagtgctgggattacaggcataagccaccgtgcctggcctggaatattagtttttatataactggkgtgaagggtcaaagagataatatatgtaaacacttagcctggaacctgtctcaaagtacctactcaaaaaaatgctagctgtgaagatggtgatcctgtttaaggaagggtgactgcctaaaagagagcagaaagtaggactaaaaaggaattatttcaatttgtaccatccatgctgtccacaggaaggcaaagagagagacctacaaagtctctgtccccaacatgcactctgcaaagttatataactgttctggtctgagacccatgcttagagagggagattatccaggaacccagtagtataacttctcttttcttaacaaggtcatgaaggtaggagaaagctcctctggcctcacaattctacaagattctcacttgatcctgcgccctttctcttttccaaaatcaaaccctctgccactgaatctctgcttaagaataaagcaccttctatttatttccacatcacaatcacggccaaggggtttagaaaccagtgcatagcaggaaggtcattaatgaggtcagaaaagacctggaaatcatactcatgatcctcaaagaagtcaggccctatccttggaaatgggtttataggctgagcaatgctctgggtggttagggcaattgtctccaacatgggatgcaggaggcacaaagtactggctgtttctatcagtccaggtttttaaatggcctcttgagagggacccactgaggcagatctctcagttatgaacagtgaaggggaatgagtggggtgggatgggaacagataggtggtaaaatgagaaaccagccaacatagtaattttgctgcttctctggaattagctcttaatcccttagcctgtgcctagggcatataaacatgactgagaaaatctctcttaaaaggcargcatgaatgacctttgaattatctgttttgtatcttccaggccacttctctatagcatgggcagatccccaacaaaaggcagagccattgccattggtcacatctccgccccaggtgtagtgaaccaagggcagactctgtggaaagggcccagagctccgtgacaagagaaggagctttgtycttggactcccatctggtgccatctctgctcactgtggcactgagcagagcagaggccartagtcgcctgcatgtcctttcccaaaaagcagtgcccgcaccaagcagtcatgggcctttctgctgttcagggaaagcactgtgagttcaatgggtgtgtggacaggtctagggctgctgcctgcaggggcagcagaacagcgcctgcttttctttccttggtccaaatggactgtggactgtgtctgcctgggctgatctctgggcacagcatgctgcaggaaggcctgtctgtgyacctccagagccagctcactccaactgatttctcagggctcaggcatgggtaagtgtgccctgaggtcttggaaatgatgaactctccactgcttcctgatgggccaatgtctgtttatttacagttcagaactgttggaaaggctacacacaccttgaccccacatggcccctcagaagagccactgcttgtctcctgaaatgctctctctgcttctcatgttggggctcttattttggaaatgtggcattctcagaagggattagctcttggggctgggcatgatatttttatgacatggaatggccttaaaataagttggccaggcgcggtggctcatgactgtaatcccaacattttgggaggccaaggcaggtagatcacttgaggtcaggagttcaagaccagcctggccaacatggcgaaactctgtctctactaaaaatacaaaaattagccaggcgtggtggtgcacgcctgtagttccagctgttcggaaggctgaagtgggaaggtcacttgagcttgggaggcagaggttgcaatgagctgagatcacgccactgcactgcagcccgggcaacagagggagactttgtctcaaaaataataataataataataaattaattaaaaataaataaataaatctatggctccattaaaatctcatagaaattcaaccttctataagttgccaagtcttggatcacgtcccaccttcctctaccctgaccatgcctgctctgggccatgaggcaaatgcctttccccttttctaagtgstgatagtttgaactctaactgccacataatgatataaaaagcaaatattaaagtgagttaatatgctaatactcctcccttgttttgaacaggaacagaaattcttggcaagtcagttcgtattatattctctacattaggagtgtgcacattttttgcagttggctatatgctgctgccactgtttgcttacttcatcagagactggcggatgctgctgctggcgctgacggtgccgggagtgctgtgtgtcccgctgtggtggtgagtgtgactcgtccccagacaggccctctgctgygggtcagcacacctggaacacacctggagcctgatgctgacctagcctgggcttgcatgacctccacggaactcgcggaggccagcttccaagccgggagagtttttgcctcattgtgggtgggcctgtgtgctggagtttgagtctccattgtcctaaaaagcacattctcaggattccaatctcttccttgataccagccactcctgtctgttgctacttgttatttgtggagctggtggtgttggattttgttgtttttaactctgccccctgctctttcatcacttttctctctctagaaaaatctcactctatccaactaatgtaattcttcaagcttccctatcatataacgattagcatctatgaaagggaagcctatttattagcactatgatagtgtgcctatttatctgctatgtctcgaagagtgagaaaattactttttatttaataaattgttagagaaatgtcctcttctctcctcccacaacctcccaactcagttttaacacaacagttataggaataacaaagtttgaagattctggcctcagtcttgcccaatatgactatctgggggatttcargtgaaagaataaattaaaaatcatagaacaaggtgtcagacataccctctttttggagatttcctgttcctttgctttttcatatttaagcaagagaaaaggagattccttccattggtgggtctggttctgtctctctctcattctctttctctctcattaattcttctttgtttgatttcattatatcaaagtcaaatcttccagcactgactggtttcaccgaactgcataacttctacctgcttacacataacacaagcttctttgaccattttttggaactcacaatttakactagacctcatggttgccctgtcctttggatacctcctgactgggaagctgtctaggcctttatcttactgcagctgttaggcagtcatagaggttgacaggcaggccacctgtctgacgagatagcrcaggtcaggtgggctcactctaagcccctgtattctcatgacctgtaagagtgctgtgatttactagtgtaaattattggcatgaagtgtgcagggggagttgacagtttgttaaaggttatgtattattctgatttgcaacattcctctggaaccctgtctgaggaccgggaaacccggcctgaggagcagtgaataagggctggccattatctacatagctgtgcctccaaggaaagcatcccagacttacaagagcagagcaattttctgaatgagagtaattatcatcatcatcatctgtccttctctccacaactcccttgctagctgaatttattggaaaagatgttagtgactaaggttctctcaagacacatgacaagattattcaaaggttcttttctgcctcttcagctgaatggttttaataaactatgttctctggctctagttgtcattttgacctaagagaccagtactttcaaaatgttataattagccaggtatggtgrttcacacctgtaatcccagcactttgggaggccaaggtgggaggatcactttagcccagcagttcaaaaccagcctgggcaacatggcaaaaccctgtctgtactaaaaataaaaaattagctgggtgcagtggtgagcgcctgtagtcccagctacttaggaggcagaggtgggagggtcccttgagcctgggagttcaagattacagtgmgctatatgatcatgccactgcactccagcccagatagaatgagatgctgtctcaraaaaaaagttataatcaatctgattaaggtatgattctatcagagagaaagagagagagagagagagaataacaatataaagcctctgatgggctgtacagagattagtagggatgggatctttgcctcgggaccatatgtcacagcgaggaacgaacagctctgatccattagccctccagagtcagcctccagagtttccagcagagaaggtccatcccacagggagcctgctcactstgccctaaggagagctttttcttctattccccaggagctggtccatgaatgctcctggctgtgggcatactgtaccagggacaggacttgccccagacagaggccagcctgggaccagcactgacaagctgagtgctccccctgaacatttaccagtggtcttaccattttcctataaaagaaaatagctttcttctgaacatcccatccttgcaggtgggtcttcccaaagggatgctcatcagtctagtggttggggtatggagggatgcttagagctgacatggaccctgccgcctgctcagtatgagwcaagctctccagcaacacctcactgctgtttagtctgaattcaatctacagagagattatagtgtgctacctcatttggcactccattgacttttgaaatgatcagctagatttgagattatgtgcaccaaaaaaaaatcaaagcaattcaaaactagagataccagtggccctgagtacagtgggctagaaatgggaggtaaacctacatagaggcactgctggtggtttgggggactttttatgtcccaagtttcctttaaaaggcttggcagtaagtggccacaggtgtgaatggagtatgtgtataggcggtggggatggggtagggaagcaggccatagatgcaatgtgaggaaagctatgcaatttctagctgattaaacattaagaatctgaggccagtggtctgtagaaaaaaaggtaggatatttctaagcataatctggttggagaaagatactggccccatccatgaggtatatcgtggctgtgtagtaagatctctaattctgcactaatatagtagccaccagccacatgcagctatttaagttaaaattaattaaaagtaaataaaattgaattttcatttcttcaatcacactagctcaatagctacatgtggttagtgggtgctgtcttagtacagatacagaacatttcagaagtttctatcggacagcacagttctaattactgagagtcagtgacctaacattatygtagttcctatagggacccactaaaggcatattctgaaaaatgcaaactaggctcatttttcaactcatgtgctattaagctggagaggggacctgctggttggtcatttgttttgctctgagctaattcctagtgtgggtttggggccaattaactacacaggactctgtgtctgctacttataatttgttktctaggctaagtaagtacagatgctctttgacttataatggggttacatcccaataagcccattgtaaattgagaatattctaggtcaatacacctaacctactgaggtaggaggccagacacgactccagaggcagggcttggacactggaccaaattgaggaccagctaaaacasagccagggcagaagacgctttccataagacacgcccacccgtgtgccatgtcagtttactgttgccatgacaacactcaggctttattgcccctttccatggcaatgacccaatgacccaaaaattactaccctttccctagaaatttctgcataaactgacctttcatctacatgtaattaaaagtagttataaatatgagtgcaaaactgtcctgagctgctactctctgcctgtggggcagccctgctctgcaggagcagtcacggagctgtaacattgcctcttcaataaagctgttttcttccacctccagtttgcccttgaattctttcctgggcaaagccaagaaccctcatgggccaaaccccactctggagcttgcctgccctgcatccctaccaaatatcatagctcagcctgacctaccttaaacatgctcagaacacttacattagcctacaattgggcaaaattttctaacacaaaacctattttataattaagtgttgaatatttcatgtaatttattaaatactgtactgaaagtgaacaacagaatggctgtatgtatgagcactcaaagtaaggtttctactcaatgcatatcatttttctcctatagtagaaaaatcataagtcgaaccatcataagttagggaccatctgtactgacaataggtaaggaaaatgagagctgacaggagaatggctaaaagattttgagaaataaaaatttagaaagaatagaagccctattatttgcaactgtgtttgagcatcagctataaatgggaatagactatgtaatttaaaacaataagcttttttagacattaacaaaaagacaacattggggctcatctcccaaaagctggtttgggcactcgctgatctgggaatctgttgaaagccatgggggccccacacaggygggtgtcagtgccctcactttctcttttgactaaaggaaacgatcaagaacacaggtgccctggccatccttttcccaataaactgtgaacatcaccagctgggacaccagcaattctccttaggatggacccactgcaaagacagtctcttctctaggggaacttatagtctagtagctatgtttcttttatgagccacactacctataagttttggatgaacttctccagagccctggctcaaacatgcccatagttaatgtcaccccttatggtctggtcctggtctcaagcacaactgatgatcggtcttataatttgatcagaagtttgaaacttgaaggtggttttatttattcctatgctccaatagaaatcttatgtggactccctttaaaaagacaaactagaattttacaaaattaaaactatttgggggaaactcagatttaatagtatccagccctgctgttgtgaaaaattattaaatattaaaaataaattataggttcattcctgaatctccccgatggctgatatcccagagaagatttagagaggctgaagatatcatccaaaaagctgcaaaaatgaacaacayagctgtaccagcagtgatatttgattctgtggaggtaagcatttgcagatgtttcctcttgagatcagctatgcattcttgattttatggaatttaacttaattcaatatttgttaagtgcccactatgtaccaggcattgcactaggccttaggaacacaatcatgattaaattctaagataaaatccaccttaaagggctgtttataagaattaaatgcaataatatatgtaaactgcttagcaaatagcaagcgttcattaaatattagtttgctttattttgcaagtttatcatcaactttctattggcattgctccaaaccactgacacagctatgtactgatgatttttaaatgtccagattaagtggaaaaatatgtttcagggctagtccaccctgggttctccactgtaccctgaatcttaccacagactgctgaggaagctatgcatgtctttagtctcactctgtgtcatgtctagaaccttaaggcctgaaagcacaggcttgaggattcacccttgaaagctggtggccacaaggaaaagctgatattctgtggaagcagccacacctcctgacagttcgtgaggatatgcagtgtgccatgccctgtgctggctcctagaggaaataagaaaagacacagcccaaattctaaaggaacatagaatgtaactaagattggcaagaggattagataaaaagataaagaatggcataagggaggaaatggtaagtatccaagtagagacactgtgtgccagcaatacagagaaagatagcagggtggcccatggctggaggcaggtccaagccagggaggacagcaggactcacttaaatgagtggagaggatggggcagggcattcctgtctaggagataggtaggagtctgctcaggacacctaaaaaagactgtggtggcttcagtaacattatacatgccctgcaccaaagcatgtagtacagaaagcagaactctgtagaggacggtgggcatgccactgctcacccccacggcttccccagtccctggccttcaggaccttttccagaagcagatactctggctatggctagaggcttagactggccatgaactcaagctctcagagggctgccaggacaaaacatcccttaatcctttgcccttcaaatcaagaagtccatttcaagtctcagtcaatttaaatggataaaacaacaacaacaacaacaacaacaacattgggagtgtctaacacttctgcccttcagggctgtgctggggtgtttatyggtatttatcagctaggtggcctgattcctatctgtgaaacttakagtctagttgtagggatctacctatgtggatgacagcaatcataaaatagatatgagatatatagttatggacaaataagaatatagttcagtgttaaaacacatggttctggcagtgcctttatatatatatatatacacacacacacacacacacacacacacacgcatatataaatgtrtatatatatgtgtgttgtgtatatatatatatatatatacacactttaaaaaaattttgagtctcactgttttgctcaggctagagtgcagtggtacaattacagctcaatgtagcctcgacctcgaccttctgggctcaagcaatcctcccacctcaacctcccaagctgggactacaggcacttgccaccaaacccagctaacattttgtatttttttttgtagagacagggtttcactatgttgcccaggctggtctcaaactcctgggctcaagcaatcctcctacctcagcctcccataatgctaggattacagatgtgagccatcattctcagcctgacagtgccttctttcttcctgccatgatgcacatctagcctgaactggacaaacccattaagggaaagggggcttgcgctttcctgaggcctggtcatctcccctgctcacctcccgtaggatcctctttaggaggatctgcagagccctgtgccagcaaatgcaccctatttagaatgatattgaagagcctaccaaatgccaggcactgtgttctgctcattgctcatgcttttttttttttcaaaaaaagaaactaaggcacagcgaagttaagtaacttgcccaggatcacacagatgttaaactgggatttgtgacctagttctcccaggcaccaaagtacatgctcttaacaactgtgatttttcacttcatgttacaggcagtagcattaacttggataggaaaagatatagagtagagtattgtcttagaaagcratctcaagcatccttggcttcagaagaagcaccttcaacctgctyctggtacctgatccaaagacattttggtggctccacccaggccagggacaaccactggatacaagcatattcttgttctgaggtttccaatcctggctgctcatcacaatcacccaagtgctttaagaatacagattctcaggcctctgtttaaaagagtcgaagtaggcaagcccagggaggaacctggcaacctgcatttaagaagggccccrtggaaccaccaagtattagcacaggactggtccacaggtcctgtctgtgtgcaccaccctggaaccctccaagargatgtctggttcccactagtttatgcagtggctttgctttgttataataccagggttattctgctgggggcatgttctggggctctacaatccaaatagtgcaagagagaaaaggcaatgtggctgygagctgtgtaagtgtctgatcattcctagaaaaaagracactcacatttggagaggacctgctgtgaaggcaggcctggcactcccacttcttcataataaaaactcctccatcagtctcttactgcgcatgcactgtagggccacaaagtcacaaagtcctggtacttcatccctgagagattccccacctcagagcctaataacttttatgttagtttcaattctaatcagcttggttaccttgattcataactcatagcaagttaatatcagcaaattaaaagcaaaagaataggccgggcgcagtggctcacacctgtaatcccagcactttgggaagctgaggtggatggatcacctgaagtcaggagtttgagaccagcctggccaatatggcgaaaccccatctctactaaaaatacaaaaattagccaggtgtggtggcaggtgcctgtaatcccagctactcaggaggctgaggcaggggaattgcttgaacctgggaggcggaggttgcagtgagctgagatcgcgccactgtactccagcctgggcaacaagagtgaaactccctctcaaaaaacaaacaagaaaataaatataaataaaagtaaaagagtataaacccattgatagcagtaaggatttgtcactgaccgctgatggctagcctcttttcctcaatgatacagtaataataataatagtttaaatttactggacatttaccatggttcaagcactgtgctaagctatatatatatgatctcatttaatctctcaactcccaattaatatacccattttatatagcagtaagctgaagttcagagaggatcgttacttgcccaaggcccgccagtaaactgaagtctgttctgatgctaaatgactacaacaagagaagtgtaaaaagcaaggctgggtaatcccagcactttgggaggccaaagtgggcagactgcttgaggccaggagtttgagaccaacctggccaacatggtgaaacccagtctctacaaaaaatgcaaaaattagccagatgcggtggtgctcgcctgtaatcccagctactcaggaggctgagaggcaggagaatcgcttgaacctgggaggtggaggttgcagtgagctgagatcacaccactgcactccagcctgggccacagagctagactccatctaaaaaaaacaaacaaataaacagagaagtgtaaaaagcagacgtggcctcaaggaagggactacatggccctacccttcaataggcagtcctgaggatcacagatcagtgtggtaaatgacatccattctctgactgtcagtcagagaaaggctatgttagccaacaggctttgtctaacgagacagggaagggggtgttatatatttaaaaggcttctgtgtaaaatggactacaaacattttaaagtgtcagagtaagtgtcatatatgtagatgccctattgcctccaatcaccagacttctaagcatagtcaaggtgaagtgrgakttgcatgcataagttttccccatgcatcatagccaaagatacttccttactacctcttaatctcatggttatttgcattattttggttacaggagctaaatcccctgaagcagcagaaagctttcattctggacctgttcaggactcggaatattgccataatgaccattatgtctttgctgctatggtaartaataagtgacctggaaatgcagatatccagcacataagtatgcaactgattttcttaactcagaggaacattatgacaacgactgggttttcctgaggaaaaattaagattataaaattctaaattattttgaaatgcctctattcagttcatgggactagatattgaaaaatgtcactgggcgcartggcttacgcctgtaattccagcactttgggaggccaaggtgggcagatcacctgaggtcaggagttcgagacgaatctagccaacatggtgaaaccccgtctctactaaaaatacaaaaattacctgggcatggtggcacatacctgtaatcccagctacttgggaggctgaggcaggagaatcacttgaacccaggaggtggaggttccagtgagccttgatcgcactactgtactccagcctgggcagcagagcaagactccatctaaaaaaaaaaaagtcacagggtacagtatttaagtctgcagtactgggacccaaagggaaagcattcccttccccctcctaaagttatgggattgagatcattgatgtccctgggtaatggttccctccccaccaaaaattatgagattaagactaatgatgtccgtgttgcctgaggcagagatgctaattcagctcctgcttcctgaagctgacctggcaattgaacactgaggctagaataacctagatccccattgcctggattggagccttgatcagctttttacacgtgccaatagcaaactaacaagtggctttcaggcgcagaaatactgaattggctttatagattagatttaataatttatctgccaagaaaaaaggaaaaaagaaaattcctactctatgatggcagcacacacacacacacacacacacacacacacacacacgatgatmgtcagaactggtagatttaggctgcagctaatctaagtttatttttaagggccatcctacttggcaattagaagagatcaatgacagagcttatgcgtctgaattaagcaagtgtgtcctaggtacatgggcttcttagttcttacatttcagcctatatccctgatgcaaatgttcttgggtagtsgtgctactaagctaataaaaaattagtcactagttctatctaarctactcctattactaaatgggaaaatcactaagatcccttgagcatacttatttgttgtgtttatgaattagtccttgtattatctaatttgggtctagtatgtgtaaaaagatccactagtgttcctgaagtcatttttcagatatcctctgcttctcagtcatgttaataataagcaaatttctacacaggggtgtctgcatagtgcagttgtaacaaaaactcaggttcagtcactcacagcttgcagcgtccaattaacaagagcaaagtctgatgtaaggaaagtgactttttattccaaagctagcttagggagaaaggtatcggcttcctgcctgaagggtaccaccgctcctctttttgaagcggaaagcaggcacttctaaaaggcaggggaggacgcgagcaggtgagggatcagagggctagcttgctgccttatctactgggcagttgagktggtgccttcatgggcagaaacaggttgtataggtggccaaaaactctagcaggcatactttgagttggaaattgactgatatcgcttgaggaaatctgggcrgtgagagttccactctggagcttctaagcacatagttagatgaatttgccctgcagggagtgtccagtgaagaggaggttaaaaggctataattgcacttctaaagagctaagtagaaagtgcagaaaaggaggaaagagaaaagaagagagagagaaaataaactatctcttagaaaaatgggggtactcagttacatagttatttttccacagagaagcttcttttttttatttatgtttttatttttttgagatagagtttcgctctgtcacccagcctggagtgcaatggtgcgatctcagctcactgcaaccttcgcctcctgggttcaagcaattctcctgtctcagcctcccaagtagctgggattataggcacatgccaccaccatgcctggctaatttttgtcttttaagtagagayggggtttcaccatgttggccaggctggtctcaaactcctgacctcaggtgatttgcctgcctcggtctcccaaagtgctgggatttcaggcatgagccaccacgcatggcccacagagaagcttctacatggaagttaactataatgacagaatatacagactgcagtctgtgatactttgaaggattaggggacattcactcttttccctaaagagaatcagaatttattctaagtgaatcccacagtatgacccttgtatctcttttttgttaaagaatgaaatctggattttatgttcactgatgtgactaatattttttcttcatataatagctctaagagattgaggaggtacaaactattcaggaaataggaaaacttgaaatcaactagctgagaaaagttattgttgaatattggtatatctagactagcactgtccaatagaactttctgcagtgacggaaatgtttcatatctatgtygttcaatatagtagccactagctacacgtggctattgagcacttgaagtgtggctagtgtaactaaggaactgaatttgtaatcttatttaattttaatttattcaaatttaagtagccaatgagggtagtggctacttataagacagcaagatatagagaatttcttgaccatcataaaattttagagcgattcacaccatccctttgtcatttttaccttcttctttcaggatgctgacctcagtgggttactttgctctgtctctggatgctcctaatttacatggagatgcctacctgaactgtttcctctctgccttgattgaaattccagcttacattacagcctggctgctattgcgaacsctgcccaggcgttatatcatagctgcagtactgttctggggaggaggtgtgcttctcttcattcaactggtacctgtgggtaagaagttaaccaagatgaacagcttaccagaaaagacccacatattgactaggctgcttctgagtcactgctccatgtttattcagcctttacatcataagccattcataagtcaattagacaggtgattgctcactacgtatgttgtttcctgtgttcaaaacaactaccccaaacagaagagacagtctcagagaagcagaaagcaccaaagaggaagagtaactctcccagtcatccccttcacagaaagactcacctaacatctccctttaactcatagtcatgattcctaatttctggctactctcaaacattttccctgggtgtatattcaagtattacagtgagtaggacatgtcggttccaggatacattcagtggttttctggtctgaatctttaagtagttaaatagcacacaaaaggatatatgcttcccttttccccttgtgtctgacgttctcataatattaaaatgtcactaaattattgatagtaatagaaatacatatttcttaataataagaaagaggatagaaaggattggtcctcctctttgaagataaaacttaactatattaacatgctaatagcttacccatgaaactgttttaacaaacaaaagacaagtggacaaaggtcactgaatgcattaatgacctagaataacagtagaacaaagtacaaagccacccctcacatgagctccatctttgtccatgcccaaatattaggacatttgaagagaaaatgctattttgggaatatatttatgttaataaaagtactcccactgaagcaaaaaggacaataaaaataactgatataaraaagtatcacttctaaaagcaccattgtttataccgggtctcttttccagattattacttcttatccattggtctggtcatgctgggaaaatttgggatcacctctgctttctccatgctgtatgtcttcactgctgagctctacccaaccctggtcaggaacatggcggtgggggtcacatccacggcctccagagtgggsagcatcattgccccctactttgtttacctcggtgagctgcatcttgtgcatttgttcttcctttaaattagttttcaatgtaaaagtaagattttcattgtgaaaaygtcaaatagcatagaatgtactggaaaaaagtacaagttcacctctcctctcccaggaggagctctagaaagccaatcacaaactggtgagtagcgctacagacattttgttttgcacaacatcatgtacacaggtatgtatataattttttaaacacacaagcaactcaggcgtggtggctcatgcatgtaatcccagcactttgggaggccaaggtaggtggatcacctgaggccaggagttcaagaccagcctggccagcatggtgaaaccctgtctctactaaaaataaaaaaattagccaggtgtgctggcaggtgcctgtaatcccggctactctggaggctgaggtaggagaattgcttgaacccaggaggcagaggctgcagtgagtcaagattgcaccactgcactccaacctgggcaacaagagcaaaactctgtctcaaaaataaataaaaataataaaaaataaaaagaataaacacacaaataacattatatatgttaaaactttttaaacttaacattgtatcagaatatccttccaaatagttacatattgctcctttaccttctttttaaataggtacctccttttaaaaatgtatataagtacattttaaaataagtatatgtaagtataatctacagatagattcacagaagtaaaattcctggagcaaagagtgccgttaaaaaattatatatatatgtgtgtgtgtacataatgttgtgcaaaacaaaatgtctgtagggctactcaccaaacagttcatgttggttttctagggatcctcctgggagaggggaggtgaacttgtacttttttccagtacattccatgccatttgaagttttcacaatgaaaatcttacttttatactgaaacacataatttatttaaccaggctccaatgaatggaggacatgtaggtcatttccaggtttttgctattacaaataacattacaacgaacattctcctatgctcctacaccctttgtgaatttacttacgtatatttggatttacaggtagattcatagaagtaaaattcctggagcaaagagagccattaaaaaatttcatagatattcccaaattgaactctacatattgtgccaattataatctaattattaataggtaagagtggttttcaataatctcaccaacaataaagattacctawttyttttttttttttttttttctgagacagggtctcactctggagtgtagtggtgcgatcctagattcccagctcactgcagcctcaatcccccaggctcaagagatcctcccacctcagactcccaactagctggaactayaggcatgcacaccgtcaagcccagctaatttttttttttttctggtagagacgggattttgccagtttgcccaggctggtttcgaactcctgggctcaagtgatccacccgcctcaacctcccaaagtgctgggattacaggtttgagccacagcacctggcctaattttttaatcattggttatctgttatgtgaaaaatggatatcattgttactttcattcctatttattaattatgaatgaggttgagcatgtttttgtgtattttttggccattttatttatttttcagtgaactgactgctcatgttctttgcccctttttttttttttggagatggagtctcactctgtcacccaggctggagtacagtggcgcaatctcagctcactgcaacctccgccgcctgggttcaatcaattctcctgcctcaacctcctgagttgctgggactacaggcgcatgccaccatgtccggctaattttttttttttttgtatttttagtagagatggggtttcatcatattggtcaggctggtctcaaacccctgacctcaggtgatccacctgccttggcctcccaaagtgctgggataacagacatgagccactgtgcctggccttctttgcccattctttaatggtgtatatcgggcaaaattcagccctgataattcacataggttcttttctattttccctaagtgccagctggtctgagaaataaagggacagagtacaaaagagagaaattttaaagctaggtgtccgggggagacatcacatattggcaggttccatgatgccccctgagccataaaaccagcaagtttttattagtgatttcaaaaggggagggagtgtacgaatagggtgtaggtcacagagatcacgtgcttcacaaggtaatagaatatcacaaggcaaatggaggcagggtgagatcacaggaccacaggaccggggcaaaattaaaattgctaatgaagttttgggcacgcattgtcattgataacatcttatcaggaaacagggtttgagagcagacaaccggtctgaccaaaatttattaggtgggaatttcctcatcctaacaagcctgggagtgctacgggagactggggcttatttcatccctacagctrcaaccgtaaaagacagctgcccccaaagtggccattttagaggcctaccctcagggacgaattgtctttctcagggatgttccttgcygagaaaaagaattcagcgatatttctcccatttacttttgaaagaagagaaatatggctctgttctgcccgactcaccagcggtcagagtttaaggttatctctcttgttccctgaacattgctgttatcctgttcttttttcaaggtgcccagatttcgtattgttcaaacacacatgctctacaaacaatttgtgcagttaaygcaatcatcacagggtcctgaggcgacatacatcctcctcagcttatgaagatgacgggattaagagattaaagacaggcataggaaatcacaagggtgttgattggggaagtgataagtgtccatgaaatcttcacaatttatgttcagagattgcagtaaagacaggcrtaagaaattataaaagtattaatttggggaactaataaatgtccatgaaatcttcacaatccacattcttctgccatggcttcagccagtccctcctttcggggtccctaacttcctgcaacaggtgtattcatctttttctttttgacttgtgcaaactcttygcaatggaagaaattagccccttgtatatatgttgtawatatttttcctagtttaccatttgtattttcactttatgatatctttgtaatgaagacaattttagtttttatatactcaaaggtgtcaatctgaaatgaaactacagaggtgtttcagyggcatgttcaatctgatgtaggatctgacaccccatgcctggtcctcattaaggactctactggtgagaaatgcagacacacctcatcaattgggcaattggttacctactggtacacacgtacacacacacacacacacacacacacamacacacacacctgaaaacatrtatgaattctcaggaaaggtataatccaaacccttacagagaaagagaaacattttcctaacaaacatattctgcacagttgccctgtgccacacctgagatagcagattatacagagtggtgttatttttccctttgtccttccctgtactttcaaactatttcaaactatgctcagatggtccagtggtcagacactgrtacataagacagggagtccaagagtctcctactccacacagctactcctgttagtgacacagaggcctcagagaagctgcaataacaatattttccttatgttttgggtcaaatgaaatccatgggtgtgctgttcctctgtaagctctgtatgtatacaggggcaaagcaagatgaggatctgtttttctcctgtgtgagtaaagcttcacaaagagattacatattaacccaagacatgtaagtgctccaaaaagaagccaaatccaggcacacagtgcctttacagaatgtgcctgatacttataatttactgatttaatctgaagtgaacataatacttagttgtttttttttttttttttttttgagtctcatagccctgtggacctaactttccactgcagcctactagtttgggcaaaagcagagtcatgccagacctatcatrgccaaaacctatccctgaaacatcctggttaacctccttctccttgatgtcctcccatcccccatttccaattacctccaccttaagaggagaactctggtaggcaaagaactctaycaaaggaacatctgtcacacatgactgagtagtagcttagaggataccagttgacaggaaagaatgaaaagccttatgataatgcaaaaggattatagacatgcacaatgtcatctgccaaaaagaaactgatattttgcttacttttttttctctgaaaatgttcagatttaaatccattctcttatactgttcaccaacttcacaaaatgatgctcaagagtgcccagagagtcctcctatctgattgatgttcttatgtcccgggctttacaggtgcttacaacagaatgctgccctacatcgtcatgggtagtctgactgtcctgatyggaatcytcaccctttttttccctgaaagtttgggaatgactcttccagaaaccttagagcagatgcagaaagtgaaatggtaagtaggacttttaacaaaatgataccaaaatgccttagggagaataagcatggaagaatagctaggaaggttctgaaatagaagagtaataagtagagactagctctatcagataataaagcatattgttggctgggcacagtggctcacgcctgtaatcccagcactttgggaggctgaggcaggtggatcacctgaggtcaggaatttgagaccagcctggccaacatagtgaaacctcatctttactaaaaatacaaaaaattagctgggtgtggtggcagtcacatgkaatcccagctactcaggaggctgaggcaggagaactgcttgaacccaggaggcagaggttgcagtgagctgagatcacaccactgcactccagcctgggcaacaagagcaaaactccgtctcaaaaaaaataaataaataataggccaggcgcggtggcacatgcctgtaatcccaacactttgggaggctgaggcaggcggatcatgaggtcaagagatcgagaccatcctggccaacatggtgaaaccctgtctctactaaaaatacaaaaattagctgggcatggtggcacacacctgtagtcccagctactcaggaggctgaggtaggagaattgcttgaacccgggaggtggagkttgcagtgagccaacatcatgccacygcactccagactgggcaacagagctagactctgtctcaaaaataataataatagtaataaagcatattgttgagcaatagtaattaaaacaatgtgataatggtataggaatagaaaccaatggaataggatagagttcaggataaaacccaagaaaatataaaaattcagtatgtaataaaaagtagcaaagtcaagggggaatagttattcagtaaaaggtattagaacattcagctagacattttgaataaattaaaaagttgtctctttaaaaaatgcattggctgggcatggtggctcacacctgtaatcccagcacttagggagattgaggcaggcagattgcttgaggtcaggagttcgagaacagtctgtccaacatggtgaaaccccatctctactaaaaatacaaaaattagccaggcatggtggcgcacccctgtaatcccagctcgcgggaggctgaggcaggagaatcgcttgaaccagggtggtggatgttgcagtgagccgaaatcgcgccactacactccagtctgcgtgacagagcgagactccgtctccaraaaaaaaacacatcaagataaaatccasacagttaaaaaatttagscctaaaaatgtaaaatcataaatataccaggaggaaacaaacatttttataaccttagagaagatcttactgagcataacataaaatcaaagaaccataaaggaacagattgatatatctgattgtacattttttaaattattggcaaggcaaaaagaaaccacccacaaagacaaaagtcaataagccaggagaaaatatttgctacacaaaacctaaacataaggctaatatacttaatatacaaaaagctcatagtaaccagtgagaaaaagacaaacaattcagtaggaaaaccagcaaaggacragaacagacagtttacagaagaagtcacttcagtgtccaatatatacatgaaaaaagttatttgtccacattaataaggaaatgcaaaaataaaacaattcaacatctttttttggcttatgagattgcgcaagggtttttcttcttracgcaaaccaattctgacacctattgagtgtcctataatgcagttcaattttgacaatacctaaatttagcatcagactccacaggtgtaaagactcagtcccacaatactgccttgcttcacttgccactcacaaatgtcaggtccccaggttacccacatttctctctgactttgctaccaagtctggggttccaacaaatcccctccttgggtttgattatttgctagaatgactcacagcactcagaacactggccactagcrgtttcttacaaaggatacamatgaacagccasatgaaraggtacatacasagaggtctggaagggtcctgagtgcasaggttctgtccctacggagttaaggtgcactgccctcctggcatgtggatgtggtcaccaactcggaagttctccaaaccccatcatttaraggttttcatggaggtttagtcatgttggcatgatggattattaagtctatccccagcctctctcctctccccagaggttccaggcttctaatccaggcttagtcttctggtgaccagcccccaccctgaagctatctaagggcccagccaagggttgcctcattagaacaaaagaagcttttatcactccctatcactccagaaattataagagatttaggatctctatgttaggagccagggacaaagaccagtatctttttatgacaccacagcaaacatttaaaagattagtggtatttaggagaagtttagagtttcgagtaacactgcctggctttaaatcccaaatctactgcaaaaatttgggcatatcacttaatattcactaagcttcagtattcccatctgctatatgggatatttcatacggctaytttgaggttataaaagataaagtgttcccagtgcctggccttgataaaggtaactctgcatatgaattaattctgatccctgacagaacatttatagcaaaaagtgcccattgttgataagttgttttcttctaatgatagaactacttcagtatcaactttaattgccaagaatttcatgcctccctctctatcctttgcttgggaaaactgtgaaagagtttaaattctggcttctatgcttaattaagaaagtagcctcagatgtttaaaagcataaaatattagatctacaccatgaggttctcattagagttcaaatagttacttgttcattgattggagaaatatttttcaatgtcaatttggatggagcattttgaggaggaaagtcttgaatatttaattttccttagcatctattttattttcaggttcagatctgggaaaaaaacaagagactcaatggagacagaagaaaatcccaaggttctaataactgcattctgaaaaaatatctaccccatttggtgaagtgaaaaacagaaaaataagaccctgtggagaaattcgttgttcccactgaaatggactgactgtaacgattgacaccaaaatgaaccttgctatcaagaaatgctcgtcatacagtaaactctggatgattcttccagataatgtccttgctttacaaaccaaccatttctagagagtctccttactcattaattcaatgaaatggattggtaagatgtcttgaaaacatgttagtcaaggactggtaaaatacatataaagattaacactcatttccaatcatacaaatactatccaaataaaaataacatcattgtattaacgcaaatattaggtgacaacaatgtgtgtgtatgtgtgtgtgtttgtacatgtggaagtgaaccagcacagtcaaaattatagtagtttctgaagtgaaccaaatgattatatgcagtattcctatccagaaaaccttccacactcctttgagagggagtgatcactgttagaggaaaaaacaaaccactttttaccctgtactgtcacactcaacccacaatacttctgtgaccagatgtggtggggggcttctcatacaccaagtaattctccagcagataccaatggggtgttctctaatagaattaagctctgaccctatctgcggggagatagtgtcagatcccacaggttgtgtgctctgtccctcttcagatgccattcgaacatccaagccacacgcacctctgacctaccaactacaaaccagggtttccacagaccccttcttaggttcaattaattttctagaaaggctcaccaaattcagctaaacctttacatttgccaatttattataaaggatacagatgaacagccagatgaagcagcatgaagggctaggtctggaaagattccaagtgcaagagcttctgtcccagtgaaactggggtgcagtgccctcccagcttgtggacgcatttactggaagctcctcaaatcttgttgttcaagagtttttaggcagcttgatctccagcaccttccccacccagagatcagtgggtagagctaaaagttccaaccctctaatcctcaaatgacctggtctttccgggaactagccccatcctaagaatatctagggccccacattaagtaacctcattagcataaactcaggagttatcgaatcaaaggggctcattatgactaatgagatattcctaccactcaggaagttctaaaggtttggggaactctatgacaagaactgagacaaagaccaggtatccatatttcatattaaaccacaatggtagatattaattgtattttagcctggctcatctggccaatctgcctgcaagaaggcagcaaggcagctcctagctacagtttcagcagctacacctcacagcccttacaccattaaatgctccccatttgttgtgcttttgttgagcacgtgactaaacctcctgtttcctaaaaatggcttaagatatattttgccggtagatacaaaatcagaaaaactgcacaaaccagttagattggtagaggtggtttatgtgccccatagccaagagaggtgtgcaccaaggaggatatcatcaaatctgacaatctggaaagcctttgaaactgttcttttcctaagcacagtattcagctgtgtcctcttgaacccatatctatcaggtcaacagctttagcccattccacatgatattggctgtgggtttgtcatatatagctcttattattttgagaaacgttctatcaatacctagtttattgagagtttttagcatgaagggcttttgaattttgtcgacggccttttctgcatctattgagataatcaagcggtttttgtcattggttctgtttctgtgatggattatgtttattgatttgcatatgttgaaacagccttgcatcccagggatgaagcccacttgatcgtggtggagaagctttttgatgtgctactggattcggtttgccagtattttattgaggatttttgcatcgatgttcatcagggatattggtataaaattctctttttttttttttttttgagacggagtctcgctctgtcgcccaggccggactgcggactgcagtggcgcaatctcggctcactgcaagctctgcttcccgggttcacgccattctcctgcctcagcctcccgagtagctgggactacaggcgcccgccaccgcgcccggctaatttttttgtatttttagtagagacggggtttcaccttgttagccaggatggtctcgatctcctgacctcatgatccacccgcctcggcctcccaaagtgctgggattacaggcgtgagccaccgcgcccggcctctcttttttttgttgtgtctctgccaggctttggtatcaggatgatgctggcctcataaaatgaattagggaggattccctcttttctattgctaggaatagtttcagaaagaatggtaccagctcctctgtacctctggtagaatttggctgtgaatctgtctggtcctggactgtttttggttggtgggctattaactactgcctcaatttcagagcctgttattggtctaatcagagattcaacttcttcctggtttagtcttgggaggctgtatgtgtccaggaatttatccatttcttctagattttctagtttatttgtgtagaggtgtttatagtattctctgatggtagtttgtatttctgtgggattggtggtgacatcccctttatcactttttataccatcgatttgattcttctctcttttcttctttattagtcttgctaacagtctatcaattttgttgatcttttcaaaaaacgagctcctggattcgttgatttttttgaagtttttgtgtctctatctctttcagttctgctctgatcttagttatttcttgccttctgctagcttttgaatttgtttgctcttgcttctctagttcttttaattatgatgttagggtgttgattttgatctttcctgctttctcttgtgggtatttagtgctataaatttccctatataccgtgctttaagtgtgttccagagattctggcacgttgtgtctttgctctcattgttttcaaagaacgtctttatttctgccttcatttcgttatttacccagtagtcattcaggagcagattgttcagtttccatgcagttgtgcagttttgagtgagtttcttaatcctaatttgattgcactgtggtctgagacacagtttgttgtgatttctgttcctttacatgtgctaaggagtgctttacttccaactatgtggtcaattttggaataagtgtgatgtggtgctgagaagaatgtatactctgttcatttggggtggagaggtctgtagatgtctattaagtctgcttggtgcagatctgagttcaagtcctggatatccttgttaaccttctgtctcattgatctgtctaatattgacagtggggtgttaaagtctcccattattattgtgtgggagtctaagtttctttgtaggtctctaaggacttgttttatgaatctgggtgttcctgtattgggtgcatatatatttaggatagttagctcttcttgttgaattgatccctttaccattatgtaatggccttctttgtcccgtttgatctttgttggtttaaagtctgtttaatcagagactaggattgcaacccctgcttttttctgctttccatttgcttggtagatcttcctccatccctttattttgagcctatgtgtgtctctgcacgtgagatgggtctcctgaatacaggacacggatgggtcttgactctttatccaatttgccagtctgtgtcttttaattggggcatttagcccatttacatttaaggttaatattgttatgtgtgaatttgatcctgtcattatgatgttagctggttattttgcttgttagttcatgcagtttcttcatagcatcgatggtctttacaatttggcatatttttgcagtggctggtaccggtttttcctttccatgtttagtgcttccttcaggagctcttttagggcaggcctagtggtgacaaaatctctcagcatttgcttgtctggaaaggattttattcttcacttatgaagcttagtttggctggatatgaaattctgggttgaaaattcttttctttaagaatgttgaatattggcccccactctcttctggcttgtagggtttctgccgagagatccgctgttagtctgatgggcttccctttgtgcgtaacccgacctttctctctggctgcgcttaacattttttccttcatttcaaccttggtgaatctgccaattatgtgtcttgggtttgctcttcttgaggagtatctttgtggcattctctgtatatcctgaatttgaatgttggcctgctttgctaagttggggaagttctccttgataatatcctgaagagtgttttccaacttggttccattctccctgtcattttcaggtacaccaatcaaacgtagatttggtctttcacatagtcccatatttcttggaggctttgttcgttcccttttactcttttttctctaatcttcttgagttatttcattaatttgatcttcaatcactgatatcctttcttgatcgaatcggctattgaagcttgtgcatgcgtcacaaagttctcgtgccatggttttcagctccatcaggtcatttaaggtcttctctacactgtttattctagttagccattcgtctaatctattttcaaggtttttagcttccttgcgatgggttagaacatcctcctttagctgggagaagtttattattactgaccttctgaagtccacttctgtcagctcgtcaaagtcattctccacccagctttgttccattgctggcaaggagttgtgatcctttggaggagaagaggtgctctggtttttagaattttcagcttttctgctctggtttctccccatctttgtggttttatctacctttggtctttgatgttggtaacttacagatggggttttggtgtggatgtcctttttgttgatgttgatgctatttctttctgtttgttagttttccttctaccagtgaggtccctcagctgcaggtctgttggagtttgctggaggtctactccagacctgtttgcctgggtatcaccatcagaggctgcagaacagcaaatattgcagaacagcaaatattgctgagtgatccttcctctggaagcttcatcccagaggggcacctgcctgtatgaggtgtcagtcggctactgggaggtgtctcccagttaggctacatgggggtcagggacccacttgaggaggcagtctgtctgttctccaagctaaaacaccatcctgggagaaccactgctctcttcagagctgtcagacagggatgtttaagtctgcagaagtttctgctgctttttgttcagctatgccctgccccagaggtggagactacagaggcagtcagccttgctgagctgtggtgggctccacccagttcgagcttccacagccactttatttacctactcaagcctcagcaatggcggatgcccctccccatgccaggttgctgccttgcaggtcaatctcagactgttgcactagcagtgagcaaggctccatggacataggatctgtcgagccaggcacaggatataatctcctggtgtaccatttgctaagactttggaaaagcgcagtatttgggcaggagtgtcccgtttttccaggtaccatctgtcacggcttcccttggctaggaaaaggaaatcccctgactccttgcgcttcccaggtgaggcgatgccctgccctgcttcggctcaccctccgtgggctgcacccactgtccaaccagtcctagtaagatgaaccaggtacctcagttggaaatgcagaaatcatccgtcttctgcgtcgatcacactgggagctgcagaccagagctgttcctatttggccatcttggaacggaatcctcaatgagatattttaagaagttaaaaaatatttgtaaagagcatctgaaaaaagaaatatgtaatatgtttaagaaatttttgaaaaagatcattgataaggggaaatgttctcttacatatataaaaacacacaatgactacactactctgggtttcctggaaaacacacaaacacacacacacacacacagacacacacacaaaagataaatcaatcaacgaaatagaagaggtatcacagaaacagacccaagtgttgaaaaattgtaacatatgat

SEQ ID NO: 97794 - DNA, 102651 bp, Homo sapiens
  misc_feature (1)...(102651): n = A,T,C or G
gcttctatcaataaccaggaaagagatggggatacagcttggcgatcaacatctcaggagcagaagttggacctgcattctgctttcaccctaattccaatcttagctcttctgcttctgctttatgaccagattattccatggacagacagtttcagttgtcagaaagagttcctgttgttgagctaaagtcttagtttaagataaagtattgtttagccctaaagaatatcaggaattttaaatgtcgtgtatgaattcttatcccaggaaaccatggaagattgaaattacacctctcacttattcatacatgtagcatagcaaatgaacctgtgagttaaatttgttttaataagcacttctaagaaaatatgctatttttgccatgtgcaataatcagcaattgactaaaagctgccactcgttagtattccaaaactctagtccttatacaaatgatcttggttacactctactgagcattctataacccttaggagtgtatgatagaactagaatgaaatgtctcagacccagaacagagaccatttgcctcattatgggagagaatagccatgtggtgatccacagtgattaatcaatgaggaagcaagcctagagacccctctaacttcaatcttcagttttctttgtagcttgagcttcctctgttttgtttcattcagaatccctgagacactgcaaaaaaataagtcttgaaatatctgcagtgtgactcactccattttatcataattctgctgtgtgtatgtgtgtgtgtgtatgtgtgtgttttaaagggaatgtaaaaaagggtttataaatcttagctggtctccgcccccagctagtaagcctgtgaaatatcagcataaaacataggggaaatcaaaccatcttatgggagatcaacaaaggaggagagaagccctttgatctatatagtaatcactctcttcattctttaagagtatgcagcagggcatggtaatgtaataaaaacagtcctttatttgctagattcaggagcacccacccttttgaaaatggcaggtgagatatttgaaaatcgcaaaatgcatgatgacttcaatgtaacccgtaccttaagcttgaaaatttcgcaaagccagtattgtgtgttctataaagaaaaatcaaatgtcacatatgagttctgctttaaacgcccatgaagcccactctctgttatttccattttaaattactgtgctaattttcaggtacaggccaggtgcggtggctcacacctgtaatcccagcattttgggaggccaagccaggcagatcacttgagaccaggagtttgagatcggcttggccaacatggcaaaaccccgtctttactaaaaatacaaaaattagccgggtgtggtggcacatacttgtaatcccagctgctcaggaggctgaggcatgagaatcacttcaaaccaggaggcagaggttgcagtgagccgagatcgtgccattgcactccagcctgggcaacagagcaagactctgtctcaacaacaacaacaacaacaacaaaaacaaacacaaaaacacacatcaaaaaaactttcaggtacataaacttattttgttgtaagaaaaatgaaagtattctttttttttttttgagatggagtctcactctgttgcccaggctggagtgcagtggctctatctctgctcactacaagttccgcctcctgggttcatgccattctcctgcctcagcctcccaagtagctgggactacaggtgcctgccaccacgcctggcttattttttgtatttttagtagagatgggttttcaccgtgttagacaggatggtctcgacctcctgaccttgtgatctgcccgcctcggccacccaaagtgctgggattacaggcgtaagccaccatgcccggccaaaaaaataaaagtattcctacaatttaggtgtttttcaggaacttagagacatctgatgatataataataaaaataatattagttgaaatttagtgatggtacttataagtaagcaacatttccagctctgcgtgtgtgtgtgtgtgtgtgtgtgtgtgtgtgtgtgtgtgtgtgtgtttaaacccatttacatccagagagatttctggctttttctttgggctctgttttgaaatcaatactcttttttttcgttttttttttttttttttgagacggagttttgctcttgttgcccaggctggagtgcaatggcatgatcttggctcactgcaacttccgccttctgggttcaagtgattctcctgcctcagcctcccaagtaggtgggattacaggtgtcccccaccatgcctggctaatatttttatatttctagtagagatggggtttcaccatgttggccaggctgatcttgaacccctgacctcaggtgatccacccgctttggcctccgaaagcgctgggattacaggcataagccaccacgcctagctgaaatcaatactcttattagatctggtttatgttttcctaatgggattccttctaacggggattgacccagggtggctatacacagtggtctcagctggagcagaaagtgtatgagacgttcatgattatatttttctgatagttccataaatttcctaccagtgggtttgttttttgtttcgtttttttgagatggagtcttgctctgtcaccaggctggagtgcagtggcccgatcttggctcactgcaacctccgcctcctgggttcaagcgattctcctgtctcagcctcacaagtagctgtgactgcaggcgtgcgccaccatacccagctaatttttgtatttttagtagagacagggtttcaccatgttggccaggatggtctctatctcttgacctcgtgatctgcctaccttggcctcccaaagtgctgggattacaggcgtgagccaccatgcctggccaaatttcctaccagcgggtttttaaaattgaggtgaaatttatataacataaaatcaatcattttaaagtgaatgattcagtggcacttagtgcattcacaatgttgtgctgccaccacctctatctagttccacaacatcttcatcacaccaaaataaaaccccatatccgatgaatagtcatgccccattgccccctctctccagccctggcaacttttttttttttttgagactgtgttttgctctagttgcccaggctggagtgcaacggcaccatctcagctcactgcaacctccgcctcccgggttcaagcgattttcccacctcagcctctttagtagctgggattacagctgcctgccaccacatctggctaattttgtatttttagtagagatggggttccaccatgttggccaggctgctctcgaactcctgacctcaggtgatccacccgcctcggcctcccaaaattctcggattacaggcgtgaggcactgcgcccagccaagccttggcaactttcagtctgctttttgttgcaggtttgtattttgttttttgagacacggtctcactctatcacccaggctggagtgcagtggcactatcatggctcactgcagcctcgacctcctgggctcaagcaatcctcccacctcagcctcccaagtagctggaactacaggtgtgcaccaccacgcccaggtcattcttgtattttttgtagagagagggttttaccatgttgcccaggctggtcttgaactcctgaagtcacgtggtccacccgcctcagactcccaaagtgctgggattacaggtgtgagccaccacacttggccccagttgatttttaaatactcttttttttttttttgagacacagtttcactctttcacccaggctggagtgaagtggtgcgatctcagctagctgcaacctccaccccctgggttcaagcaattctcctctctcagcctcccgagtagctgggattacaggtacgtgccaccacatctggctagtttttgtatttttagtagaaatggagtttcaccatgttggccaggctggccctgaactcttgacctcaagtgattcacctgcctcagcctcccaaagtgccaggattacgggcgtgaaccaccgcgtatgaccttaaatacattttaaaagctatttcatgtttgtccttagagccattaatggtggcactggtcctctgttcgagttcacaagtaagttctagaagtttatccccacaattatttgtgacttacattaactctggagctaaactttgggctgtagcctccagacagttgttcagattttgccttgatagccaaggcggtagaatgaattctaagtgccctggattgaccacctcttgtagaattgtcccttctgtaatacgccctcattttctggccccttgatgggaagctacagaattcctttgctaaattataagaaagcccaccccacctccctttttttttttttttaatagaaaacgagtacccaagtctatgtaatttttggcagaagcagaggtgatttgtggttgcctgggcccaaagtccagttttgagataccaccacctcctggcaatgcaggaaggcagcggctgaggaagtctgcgagtgcagcagtttgcctggaggatttggtgttgcaaaagttttctgggacagagaaaccttaagtaaaacatggtgagaaagaggtggaacaagataaaaagaaagacttctactcccttcagcaaggggatttatgtagaaaggaaacataagggccaggtgtggtggctcccgcctgtaatcccagtactttgggaggccgaggcgggtggatcatttgaggtcaggaggtcgagaccagcctggccaacatgatgaaaccccgtctccactgaaaatacaaaaattagctgggcgtggtggcacacacctgtagttccagctacatgggaggctgaggaaggagaatcgcttgaacccaggaggtggaggttgcagtgagccgaaatcatgccactgcactccagcctgaacaacagagcaagactccatctcattaaaaaaaaaaaaaaaaaaaagggaagaaaagcaagtattgtagagtcagacagaagacaagggtccaaagctcagctctgccacttcctgtgtgatatcagaccagggtattaaccttgttattctgaggttctacttcttcatttgtaaaatggggatacaaatactatacctaacgagtagttgtgaggtttatacaattctgtttactagctcatatagtgtctgacacatagtaaataggtactgaataaagtttagctattatgaagtctctggatgcaggggatataattgtctaatgaatctgaaagtcatatgggatatcattagcacatgctgcaggaaggctttcccctcatctcttggattcattttgttgtcttgtttaggtaacagttgatgtcacttgctttccttctcttgacctctctgctttgattctgaacattttccatgttatctattattctgaattaatcatttttcaactctgtaagttactcttcttttttttgagatagggtctcactctgttgcccaagctggagtgcagtggcgtgatctcaactcactgcagcatccacctcccgggctgaagtgatcctcccacctcagctccccagtagctgggactacaggagccaccacagttggctaatttttgtatttttttgagagatgaggtctccctatgttgcccaggctggtctcgaactcctgggatcaggccatctgccccaccacccccaccttggcctcccaaagtgttgggattccaggcatgagccaccacgcttggccaatatctttcttctataaataagttcatggcaattaaggtggctcactaaaaagagaagatacaaatcagtcagagccagactgactctgaacccaaacagtgcttctctcagtgaaagggcaggaaccacagaacacgaattatgttggtgagattcgtgtgacttttaatttattatgttactaatgtcttacagtaagtgtgaggagtaaagacagggatggggtaaaggtaaggaaaagtatttttcaagttccttgaactattgaagcatgtgctaggataagaaagttcagtaaaagcatcatgtccttatcaccagagctcttaaaggagacatggaacagagacggggcaactcttcagctctggccgaagtgactgctggacagagamcaaatcctgcatcagccttggcacacatgaaagactgggcaatgcagatgctacacagttgggcagatgaagagctgactgtccagaatctacttctagcaagcgagtaggcgcatgcacaccccttctctggtctgagtgtctcttcctctccggcaggaccccaccaactgtgcagccatggggtaagtgttagggaagtcttttagaaaagagaaagatgtctttcttatatatacgctggtagtgttgattgaccagaagtggtttcttttactttggggcggtagcattgtgttctggtgacaaaatatcctacacttagcactcgtaaaaggcataggagagtgaaagcaacgcctctttatgacctaggctagtgggaaggggaatacgtggattctaagggtaaggggatgaaaaagctaattctatatcaccacaaatgaactgacacataaatgacaccttggctttttccactcatagaaacactcacttcttctagcttacactactaaatctaaggtcggcttcatcacagtttgggatatttactgtgcttctaaagtaaaggtgaaaagctacatccttaatagtttttttcctaattaaatagatttgtgtaagctgaaagcctaaagtctagggattctttgcattattttatatgttgggggaaacccttaaaattcatcactgccatttttttaacctacagaattgaaagaatatgaaatgggcaggsataagtaattacacgaatcatagacatggtcaacatgcatctaattttacccactgagcagagcgcgaatgggggtaagttcttttgagaagaaccaaaatgtgtttaaaagggaagaatactacactagactatttttttcctacatagaagaaaaggatatatggaattgaaggaggtgaaaagtgtccattaaacaaacacctattatttgtgaaataattctatcagagtggaattgggtgtggaccattagtttatctctggcagtgatcttatgttttaggtatctagagtaagattatttagctgggtaatggctgggtagcatgaatagttttaatttcagttcacagcaaatgacgatgatckcagatttagcaccttagtttgtacttcctctgcacctgaatcatcgatcactgtgaagcgtgagctgaaggtcagaaagctgtattcttagataactcatctgtgattgctccaggactgcagtttacttcaatctaaggggtggttttcttattagagaatgtaagtattcaatactaaatatgagactgaagccttgaagacattttatagtggtggcaggtgttatagttcaggaataggctgtttaacaagtcaaatgcatatcattccctcttaagcattaactttttcaaagcaatggaattatattttttggcttgaaatggtggtttcttctatatttgatttctcggttttcttagtagatattactgtctcctctaatatttcttcaaaactttcccctatctgggaggttttcttagaggctaccttagatgcctcctcctcctcctcctctttcttaagtgatagcccagtggatgagactttggaggttgtagcactgaggaktctaggtgggagcaggtaacttggattgggaagtggattcagccccgaaatgcttaacccactggtgctaaaacgtgtctcctcgccttccagcagtttcctgtaaattcaacagagaaaaactcttaggaagtcaataacttttcccccccagaactcaaccctccaatcctgattcatttgagagagattccaaaggactttggagtttcttcatgagattgaaaccaataaatatttaatttcaaagctcaaagggttggaccacgtgcatacgcatgcgcacacacacaccccccttcagcaccagctatgtttaaagcattgtcaaaggaaaacctatcctgttcacaaatatattccaggaggaaaacctgcaactccacttggccacatcacacccatttttggcaattagcaacaaagctctagggagaagtacttttcctaagtaacaccttagctgcaatagggataaggaggtgagatgtccacaaaggtggtagaaactgtcttactcaacctggatttgagatttgtactttttcagtgtatacgggtacaaagggaatagaaccagcaataacaaaaaccagtgaatgacactgtttcagataacagatttttatcagcgtgacgaaaacagtcttataaaagagtggccccaaaccatgtttctcataactcttaatagtttttaattatcctttttttttttttttttttttagacagagtctcactgtctcccaggctggagtgcagtgacatgatcacagctcactgcaacctccacctcccaggttcaagcgattctcttgcctcagcctccagagtagctgggactgcaggtgtgtgccaccacgcctggccaatttttgtgtttttagtagagactgggtttcaccatgttggccaggctggtcttgaactcctgatctcaagtgatccacccaccttggcctcccaaagtgctgggattataggagtgagctactgcacttggccccaaaccctatttttaaagttacgagtctcatgggtttttattttaacctctgtgtactcacattatccccttaaatcctttcagaggtacacagaatactctgggactagtcagatggagctggattatatctaagtagagggacagagcagtcagctcacctgaaaggggccagtgatgcccttcttccctccctcaccagtcagaagccagagagactagatccacttatttgggcagcattgcccctaggtgactggatttactcgggtaagcaggtcctttgcagtacctgtaagctgctatctcaatgtcaagagccattttgacattgagcaagtcctggtattcccgaaggtggcgtgccatctcactcttggtgttcctcagatcattctccagctgcccaatgctatcctgaaaagtaacatatccaaaatagttaggccaaaccagctgaaattcctcaagatttccagaaggcaaggattcccagccctgactacacattaaaatcatstaatgaacttataacttgcttatatccaggtctgtccctgagtccagatccagattcactggttctggggtggggtcccagcatttgcatttttttcataaaggtccccaggagatttggactcatggtgaggactgggaacttttacccagagggcaagtgaacacctgcccttttcaggatagccacacggcatatagttytgaactgaacatggagatgatttttttttttttttacacttaccatccctcccttgcttgttgtgttgctgctaaataactctgttgtagcatgtgctttccaaaacccaaagcctcaggttagcagcttagattcagaaaattccgaatgtggaaagcacagagagctttccaggaagacctctctgcctccattcattttgatgatttcctagaagcctgctaatcagtcactttactgagagcattttacattataggtaaggagaaagcagaaatactccacagaatttttaaaacaccgaggcatggaagagaaatcgctttatatttatatatttatagtccttgagcagccagaaggaattcttttttttttttttttttttttttttgagacaaggtcttgctctgttgcctaggctggagtacagtggtgtgatcacagctcactgcagcctcaaaattcctgggctcaagcgatcttcctgtctcagcctcccaagcagttgggactaacaggtgtacactaccatgcctggctagttaaaaaagatttttgttttgtaaagatgaggtctcattatgttgtccaggctggtcttgaactcctggcctcaagagacactcctgcctttacctcctaaagtgcttagattacatgtatgagccaccatgcccagcctggtcttttcttttactccttaactataccaagttcattgctgtcccaggcccttcaggcttgttatttcctctatctaaaatgccggtctttacatggccgactccttgtcatagaagattcagttcacccgggtgtggtggctcacacctgtaatcctagcactttgggaggctgaggcaggcagatcacctgagatcaggagttcaagactagcctggctaacatggcaaaactccgtctctactaaaaatacaaaaattagctgggtgcagtggcatgcacctgtaatcccagctacttgggaggctgaggcaggagaatcgcttgaacccaggagggggaggttgcagtgagacgagatcgcgccactgcattccagctgggcaacaagagcgaaactccatctcaaaaaaaaaaaaaaaaagattcagttcaaatgtcctctcctgccaggcatgatggctcatgcctgtaatcccagcactttgggaggctgaggtaggaggatcacctggagtcgggagttcgagaccagccagaccaacaaggagaaaccccgtctctactaaaagtacaaaaattagctgtgtgcagtggcaagcgcctgtaatcccacctacttgggaggctgaggcaggagaatcgcttgaatctggaaggcagaggttgcagtgagctgagatcgtaccaccgcactccagcttgggcaacaagagcaaaactctgtctcaaaaaagattcagttcaaatgtcctctcctgccaggcacgatggctcatgcctgtaatcccagcactttgggaggctgaggcgggaggatcacctggggttgggagttcgagaccagccagaccaatatggagaaactctgtctctactaaaaatacaaaaattagccgggcgtggtggtgcatgcctataatcccagctactagggaggctgaagcaggagaattgtttgaatctgggaggcggaggttgcagtgagccgagatcgtgccattgcactccagcctggacaacaagaatgaaactccatctcaaaaaataaaataaaataaaataaaataaaatataatgtcctctcctcagacaggtcttcatttgcatccaatttaagtatccatcctcgaccaacccagcactttattttaccttaagccagagcagctactggcccatgcaggaaccttgtgcaaattagaaaaaaagcactcagttgaatgcagccaccctgctctcagctcttaccattatatgaaattatcttcttctttttttttttttccgagatggagtcttgctctgktacccaggctggagtgcagtggcgcaatctcagctcactgcaacctccaccacctgggttcaagtaattctcctgcctcagcctcctgagtagctgggattacaggtgtgcaccaccacacctggctaatttttgtatttttagtagagatggggtttcaccatgttggccaggctggtcttgaactcctaacctcgtgatycgccygcctcagcctcccaaagtgctgggataacaggcatgagtcacagtgtccggccccggcaatttactggtttatactagtttattttctgttgctttcctctataacagagttttacaactttggcartgttgatgttttaggctggctaattatttgttattgtgaaatgcgggatatttagtaacatccctggctagatgccagaagcacatacttccctctcccagttgcgataacaagaaaacatctctagggcatcccagcactttgggtagctgaggcaggcgaatcacttgaggctgagctgagagaattgctygagcccggtaggcggaggttgaagtgagctatgatggcgccactgtgctccagcctgggcgacacagcaagaccccgtcttaaaaaaaaaaaaaaagacacaatgattgggggttatttttaagaaacagtcatgcagggccgggcatggtggctcatgcctgtaatcccagcactttgggaggctgaggcgggtggatcacctgaggtcaggagttcaggtcaatcaagagaytgagactatgctggccaacatggtgaaactatggtctctactaaaaatacaaaaattarctgggcgtggtggcgtgtgcctgtaatcccagctactctggaggctgaggtaggagaatcacttgaacctgggaggcagaggttgcagtgagctgagatcgtgccattgcactccagcctgggcaacaagagcaaaactccatctcaaaaaaaaaaaaaaaaaaaagaaacagtgatgcagataaacatatcagaaacctcaagaaagtaagtgttgacaggcccttgaaactccccttgtgtgagaatgataaagcaatggtgaaaggtagggctgagacatcagggggtacaaacttccaaatcaagagaatttgcagaattaaaattcataccacctacctgttctataaatattgacaggaatactgcaaagaggagtytcaattgactgatgggtacagaacaaggaatgacagtcagtaggaaaaatacgtattatactggaccgtgatgcatatatttcaaagtgtgttaagagatcatgaggccttaaagagatttttaccaagaaattttacctgatagttcctatttgaggttataatcaattctgctactgacatagaatcactgacatagaccctctagctactgacaagagaatcaatattactgtggtaagagggaaaagagtctagagtgagggaaaaaggagaaagaagaaaatatgattatgcaaagaaggaggaggaatgctatatgaagataagaggaggatttcatcaggaacttgggttgcagtttttgctctgccactaacatccattggacctcagccagttttctacattttagttccttccaatcttctacttctgcatacggaaagttatgtttactctttttctaaggtgttctgagatcctcaaattaggatttcaatttaatatatctcacatatacattaatatatgatgagtccattatctgttaaattagtaggcatcagaacagcatggcacacaggaagaactcaataaatgttagtgatttttattcttgataatatcataccacatggccctctatccttttgatgatatagacaaattaatcacaagccctcactattaccaaccccttagataactacgaaaagtaacatataacaacactttaatattggatagttggaggcatataccttaaagcaccagatttttttttttaataacaattttgaataaaaagcctttctaaagtggcttataccactcacaatcaggacactaaacataatgccaccttccacagcaattaagggtcatgataataatcaattttaaaaataattcggtgacatcttttaggtcattcgaggtatatcaggctgtttaattctaccctaaatggccccaaagtgcggtgtttggattagtgttgatgctcattgattttctttgttctgaaagatgaacggatctgctgctgctcattcttaacaatgcctgactccagtggtccccattctccatcttgctgcagtcttgaaaccaaataaaaaagcattttgaaatcgtgttaagaatgaataggctgggggcagtagaggtgccaagttcctaatgtttggcttagagatagatgatatgtctcatcagcaggttaattaggtccttgcttaaaacattatttttgtttcacagctgtgttttctgaataagaggtggttggggagctgagttctagacagatgagatttccttgaacttctatgttgcagatttcatatatctattttacagatcactgtagagaaaagcacaactttgctcctttcagaaggaagtgtgctgtgttctgaccattgattgctcttcaatgtctggtctctttgtttgtgctctcctccccacatcaggctgtgtcttgcattgcccttcagaagccctgccaaagatggcctccagctcgagatctgagcagagcgctgcagtctgtcccctcccccaaccacgcagctgctgccggcttagcctgagggaaccggagagcggcacgcccagctccagctggggtctctcctggaggagctaagacaaacgctgagcatcgtcttagctcgtctgagcatcgcagcccgtggctggaaggatgccgggtggagtaagagaaatgaatggccacactaacatctgcagtggtgaagaagaacgacagagctgtggatttcagcacgtttgggggccctgggtcagggaggcagtagtgagtgccccacagtctgattgaaagaggctatttagaattactgctctgcataatcaacttgagtggggacggaggatttttatttgtggttcaccatgcgtgctttattctcactcctacctttcctttgtccccatctttttctttcctccaccacactcgaaaatcctgtattatacgtatctccgtaaactactttactggaagaagtggtttagatcaatgtactccaaagtcagtctgaggaccaacaggatgcagcacttttattgaaaaatgcatattcccgggccctacctgtgaactgctgaatccatatctttgggagtgggcctgataatttttttaagcccccaattgaccttagagtgtcactgggtttaggatccactagtttaaatttttttctataaagatgctatcatggtagcccaggtgacagtaatacagtaagatagggaggggcaaacaaaacaaaatgaaacaaaaaccaggtggaagagcttaaaaaagatcaaatgtagctaattttagaaatggatctatcaagctatggatttatatgcagccactgtcacctccagtctccaaggggccagccccttcctgctatttaattaggctgtactccaatctcataatggagaaaaaagagaagacttggcttgtctccctggagagcattaacctgcggtgatcttgatcattcagcaaggtctttcaaggaaagcttcaactttccaagactgaccacagtagaggtctgagaccctgagtaccctccaagaatgtctttggacatctttaacagaactaggactctaatggtgccgaagtggctatgtaggcaccagcattgccctatgtcagaaatggaaaccccatcagctttttatgcagaggggagttgcatttggcttttgaagacaatagccttagctcttcctaatctcttctcttgcctgattcagactctctcatccactattgtgtacttactgtgtcaccgtgaatcattttttaccctttcaaaagtgtaagaagctttctctccttaaataggctatcagctatctggggcagagaagatgggactttaatggggccttcctatgtttcatagagggtgccaagtttgaaaagaaaaatggccctaccactaatctctgtagcagaagaaggagaacagcctcccattactgcagtgaaaggtggggatgagatgagagggcaagaaaacaatggctaaatctcactgtagaaagggaggcttttcaccttggtcagcactgctaagattgttagaacagtcagagacacccttgtggcatcaggccgttaggatctgcaggtaagacttgagctccaccttagccttaggtcccaaggagtagggaaccagctctctgttgtctgacctcctcttccactcccatcagcaggtcctctgtggctctaaaggctcaagctgatgggggcagcaccgcagagctgcagatgctgcagtttctctgttgttgttttttgtttgtttcctgtagaccatgtctggatgacgctaccattgtctaatgatgaaagccttttacagcaaacaagccaggcaaaactgtcactacttcttagaatgtatgggctataacaagcagagaaaatggagaagcccaattcagctggcagctctgagtaagttatcctttttttgtagaaatactgggctagccctccagaagaccacctagctcgtacttggaggcttctagaagaaaaaaatgaagtctcaattagccaaatgtgattaattcaggccatccaggggttagggtacataatgaaaagttcaagttatggattttgaggcagaaatggaagtacttayttgaatgataatgcaataccaaactaacctaaacagtccaagcaggcttttttcctttatcaaaggaagttattgtaacaaacagcaaatacctgcacatcaataagaattctttagcttctgattaaaatgttacttttgagatttcattcctttcttggttctattttaccaatgttccaagccctattaatctcaccaaatgtaaactttaatcctagctagaattattgcaagtttctgaattatagtcattctattcaaaggagcttttattgtaccttgaaaccgaaccacactattccaattcttttctacaccttccatttaccctgtcycctgcctctgtgccatttgcggtcataatcccagaatttcttatatagtaaaactgaagacacagtggcctttgttgggaagaaatagccaatcaataccatcacaggagcttagaggacagggaaatatggaaaaaatacatacactagaacaaagaaaaaccatctctgtgacttatcacatgcacttacratgaaaaaaatactaacaaaacaggaattttcaagtgggacctcacagctgctgagcaaattaagtgttttttgtttagtgctaagccatccatgaaagccaaaactgatgttgtctatgaggtgacctttgattgcaggtagccaagactgatgtgttggtgttgcaggaaaaaaaaaatcaaagcagttaattgcctagagattcataactgggacacgagacaggagagacataatttctgagatgggaagaactcgagatcagcaccgtggacagcgccccgacctttcacgttttgccaaccggcgaacgctttcttaaggaggaaatgtcagctggtggacaagggaatcgtgtgtgtgtgtgtgtgtgtgtgtgtgtgtgctggtggacaagggaatcgtgtgtgtgtgtgtgttggggaggtgggtagagcagggtggttactactagctcaagcatcgctcagcttgttggctcccaatctctactttttggagcgcgaaagtcaagaaaatgggataggactcttcccagttcaggatcgcattcttccttcagccctgaagcagaccatactccataaatawcttctagggcgcacagaaagcttttcaaagtcaaccaaacaagccagatagycgagacagcaccgcccacgtaacctgccccgttgggctcagtcttactttgggtggggcactgttctccgggtcgccggtgtgtgtaggcccgcttgctgacagacaggcagagttgggttttcgaacctcaaataaatttaagggcttctttgtttgaagggctggggcagggacataaatgaggggcgttccctaaaattaacattaaagactccagggttttttgttaaccagcgcctccagccgcggctcttctctcctctcttttgccctccccttaagtcctggggcccagttttaccagaggaagagggtacgcgcggaagagggcagggcacccctccccacgcccagccccggcccttacctggtagccagctacctcggcactgtgccgctcctccagctccaggatctgcctctccaaggactcgttggccccgcgcaggccctcgatctcgatggtgcgcgcctgcagctggcgccgatactcgtggatctsstcgcggctggcccggatggcctcggtgctgcgcgccgcctgctcgttcaggttggcaaacttggacttgtaccattcttccgcggactgcaggttcttagcggccagggactcatactgggcgcggatctccctcagagccgmggtcaggtctggtttagccacagtcacgtccacctcggccgcggcctgcgacgacgcctgcagcgtggccagcagctcggctacctcctcgtcgtgcacctggcgtacgaaggccagctcgtccagcagcgactccaccttcttctccaggtccaggcgggccagcgtggcgccgtccacgtcgcgctgctgcgccttcagggcgcgctcggcgccttcgcgtccgcggctctcctcctcgcagcgcgcccgcagccgctgcacctcctccgccagcccgtcgcgctccagcagggcctgcgagcgagccgagctggcctcctccagctgcgcgcgcaggtsgcgcagctcgcgctggaagagctcgccracgcgcgacggctcagcgtggcgctgtcgcagcgcggccagctcggcctccaacgcgcggttctgcgtctccagctgatgcaccttctcgatgaacacggcgaagcggtcgttgaggccctgcagctgctccttctcgttggwgcggatgatcttgtactcgttggtgcgcgccgccgcctggctcaggtccagcccgtcggacgccggcggccggcgataggccagkccgaggccgagcgacgaggccgaggagcaggcggccgaggaggccacattgctgcgggacagcgactgcgagcggaagccgcccgcgccgccggccccagagaggcgggcggacaggcgagagccatccccgaacaccttgcggtaggaggaggaggagcacaggtagtgctccgagccgaagctcatggtgccgggatcrgggccggacgtgcggcttcaacgcgagctacagaagaaaggagaggtgcggcaggcagggcgcggcggggcggtgcgcccggcttttaaggcgccggggctggggcggcgcgctgggggcggagctcctgctcagagtctggccgggagagggaaggggggcatccaggagtgggggcggggaggcgcagtgactaccgcagctgcgcgcgcgacgacctggggcgccgggacagggccatctgcatcggagtcgcccctttccgcagcgcttctccccaagaatcgactgcttcggaagtgactcgagcggaggggtgcctaaacgactgaggtttcccatccggaaaccacacagctctgtcgcatcccttgaccctatcccctcttctttaaccgactgggaggttaggggtttctgggaggtgtcccctacacccaccctcatcctgaggtgaggcgcacagaaagccttcccgagggcgaggtcgtgtttttccagttacagtgaggacctgcagagcgagcccttgtccccttcctcagggtccccaaggagaaaggtgggagatgctacgtcagaaagcatctctccagctgcccctctgcagctcctggggaggctccgggcggaaagatgttcagcaagtgcctctcccagaagagaggggagatcagtaaagaaagtgaccccgagctgcggagagtggggagaagcggcggtacagaggggaaaagaggccagacttggagaagcaggaggcgctgggaattgctggggctcatcgttagggcactaaagcatggcacaggccaggaccacaagctgctggaaagggggctgcagacttttgtgtttagagcattatattttaaaatatttcgaaaggagcatttttaaaccaggagatttcacctgtaaagaaattggatttctggcttcttctgaaaatgggaagagctgggatgcccacagtggcagaggtgagttgcccttgccatttgtataagaagtgtgctctcctgttcactacagtccctgccattctccactgaattacgccccccttcttaattcatttactttacctctctgaccctgtgggcatttgagatttcagtttgtgtaaatccagcagggcaggttctcaactggcttcagagagccactccctgtgcagatctctttttggagaaaagagatccctgcaaaaagattaaactccaggagtgggggagagtgctggtgactgagccggcctcttctgccacatggtagggttggtggggcagggggtgagaatcaaagaatggaatctgaaaagatgaaggctgggaggggtcagtgtggcgtctgtaatatgtacccacttgcaagcttctaatatcattcaggatgtggatatggctttggagagggagtaggaagacctttttagttatatcccagaattccagactgagggccttttattgatattggaatcttcaaggacgtagttctaggataagttttacttcatggggaaaggggaatatgcttgggacaggccactaaaggaagggtgaaaagggatcttatgggactttggagcatatctcttggctttgtgcttgawgtcatggaagatggtcaggccctgccacagcctgcccctctggttcctcatcacagaccaaagccttgagttggagggactcaattctgaggtctttgggcttagaaagacctggtaaggtgaacaataaaagattgctaacactgctgagtaatgattgtctgccagtacttgtgctggcacttttgcataggtttacctctgaaccatgcttcaaggtggccctcacctccatcttatagataaggcaccgaggtgcgggtgcagcacaaggtcaccagcaagcaaagacaagcatacattctctcttcactacataattctgcttagtgcagtgagactcttttttttttttttttttttctgagacggagttggccgggtgcagtggctcacacctgtaatcccagcactttgggaggccgagatgggcggatcacttgaggtgaggagtttgagaccagcctgaccaacatggtgaaaccctgtctctattaaaaatataaaaatgagccgggtgtggtggcacgggcctgtaatcccagctcctcaggaggctgaggcaggagaattgcttgaactcgggaggtggaggttttagtgagccgaaatcatgcgactgcactccagcctgggtgacagagcgagactccatcaaaaaaaaaaaaaaaaagagagacggagttgcgctcttcttgcccaggctggagggcagtagcgtgatcttggctcaccacaggtcagcgggtaggtgtctgccacaacatctggctattttttgtatttttttttttttttgagatggagtctcgctctgtcgcccaagccggaatgcagtggcacaatctcggctcactgcaacctttgcctcctgggttcaagcagttctctgcctcaggctcccgagtagctgggattacaggtgcccaccaccacacctggctaatttttgtatttttagtagagatggggtttcaccatgttggccaggctggtcttgaactcctgacctcgtgatccacctgctttggcctcccgaagtgctgggattacaggcatgagccaccacacctggccaattttttgtatttttactagagacggggtttcatcatgttttccaggctcgtcttgaacttgacctcaggtgatccacctgccttggcctcccaaagtgcagggattacagacgtcagccactgcgcccagcctgcagtgagactcttgaagtcttgttaatttccatgcagcacggccggctgccgtggctcctgcctgtaatctcagcactttgggaggccgaggcgagtggatcacctgaggtcaggagttcgagaccagcctgaccaacatggagaaacctgtctctactaaaaatacaaaattagctgagggtggtggcacatgcctgtaatcccagctactctggaggccaaggcagaagaatcacttgaacccgggaggcggaggttgtggtgagccaagatcgcaccattgcactccagcctgggcaacaagggtgaaactgtctcaaaaaaacaaaatatttctgtgcagccagaataggactaagtgggctttggaagagttttggctgataacaaatcagcatgctggtttgtaattgaaagaacattggactcagagtcagaggcaatgggtttgaattgtggcttctgccacttactaagcatgtagggataacaacayctacctcccaagagtcatgaaagcttgagctgatgcatgtgaaggtgcttttaagctgtaggtataaagagttatggtcatcatcatcctctttcaaatgaaaggaacggtttcacatccatcagcaacaggatatgaattgggtttagggaggggattgcaggaaatagtccatcacacccttgcacaggtctccaggctactactactgaaagtcagcaaaatgtcctggttggagttccgctttctttcccttcccatcctccagtggaatcagtaccccaaaggcaaaacacacatagaacagaagaaagtgaggcaaaaggcctaaatatttcagcagagtgacagttgccctggcaaagatgcattttgcattttctcaacagcttatctgagattccaaactggtattcccctgtgggacttatgcctcctctttcttggcatcccaccccacaggcccagatgtttggctttaataattttagcacaaagctatcctgcgaaggagtgatcttggctgagcctcaatccataactccttccagctggccaggcctcctgagggagttccctgtgtgtgccagggctgtgtcttcatcttcctctratggcacactcagacaccacagacacgttgtcagtcatccccagttctccctaaggccacattctccagtctctctgtggcatttggcagtgctgaccactctccttggttttaatgactcagttcttagccttccgctcttcctttgtaaactctttttttaggccaggcaccgtgactcatgcctgtaatcccagcactttgggaggctgaggtgggaggagcacttgagcccaggagtttgagactagcctgggcaacatggcaaaaccccatctctaccaaaaatacaaaaattagctgagtgtggtggtacatgcctgtggtcccagcttctcaggaggctgaggcaggagaattgcttgaacccgggaggcagaggttgcagtgagcagagatcgcgccattgcactccagcctgggcaataagagcgaaactctgtctcaaaataataataataataataataataataataataataataatataataataataaacaactctctttttacgatattagatctcccagaagcagggaggcttataaagttttctccctgagaaatctagttttgcatctagccaggtgacctcaaacacattactattatttgctgagccgtaatttcttgaaattgtctgtgaaatttcaataaaacaatccaccagagtgctctgcaaacctggctgatcattagaattacctgagaacttaaatttagattcctgggctttacccataacccacttaatctaagggattgagatccctagacctacctctcgtgaaatgactgtgcagtttaaatgagattatgtatacaaagcagacatcacagtgcctgctgtgtgcatgttcagtaaatggtagctgttagaagtatcaacttctttaattaattcattcaccaaatagttactgaatgtttatgtccaaggcccctggagtaggtgccttctccataggaataaggcagatgtgggctctgcctccatgggagtggcattctagtaggagagacagagattaagcagctaattacaccattaattgttaattacacttatgacaagtgctctgaaggcaagtacaagttgctgtggggcatacaactaaggccctgacctatgccaatgagtcccaaacccctatttccaatttccacctccaaacacatatctaactgcctgttggatatctcctcgtgaatgcttgctggtcttcaaataccatagatctgaaagtgaacttattatctccctcttctcctcccccctccccttgcttcttgatcttcactttgtcccactcgttcctctgcttacacagttccttcttcctggaatttcacccccagccctacttcaactgttgagatccttaaggctcaaatgccgcccctccttgaagccttccttggtatctccagtggaaggtgatccatccttcccttgaactctcctcctcaaacccatagcctttgcagcactcacatggctcataatgaacatagtcttctactgtaattatttgtatgcttgtctgagttgaaatgggagctgtgtgcagtagtgcacacctataggcccagctacttgggctgaggcaggaagatctcttgagcccaggagttcgaggctgtagtgtactatgattgcacctgtgaataaccgctgcactccagcctgggcaacatagtgagactccatttctaaatattaaaataaataaataaatagatgaatagaactggaagctccttgagcacaactcatcttctacatctatatatatctctcagcacctatcacagtattaaacacatgtgaggtgaaaaaaggggttgaaaatgctttctcatataaccacttgggaaaagtctttggcatgacaccaagagtgagattcataaaaaaaaaaatgcttttaacttcatcaaaattaaaatcttttgctctgcaaaagatcctgttaagaagatgaaggcagtcaggcaccatggctcacgcctgtaatcccagcactttgggaggctgaggcaggcagatcacgaggtcaggagatcgagaccatcctggctaacacggtgaaactccgtctgtactaaaaatacaaaaattagccagacgtggtggcgggcgcctgtaatcccagccactcgggaggctgaggcaggagaatggcatgaacccaggaggcagagcttgcagtgagccaagatcgcgccactgcactccagcctgggcaacagagcgagactgtgtctcaaaaaaaaaaaaaaaaaaaggaagatgaaggctgggcatggtggctcagcactttgggaggccaaggcaggcagatcacgaggtcagaagttcgagacaagcctagccatctctactaaaaaattagctgagcatggtggcacgtgcctgtagtcccagctattcgggaggctgaggcaggagaattgcttgaacccggcaggcagaggttgcagtgagccgagactgtgccattgcactccagcctgggcaacaggcgacagagtgagactccatctcaaaaaaaaaaaagaagaagatgaaaagacaagccaaaaatatttacaaatgacaacaaatgtatccagaatgtgtatccagaatttgtaaagaactttctagccaggcgtggtggctcacgcctgtaatcccagcaccttgggaggccaaggtgggtggatcacttgaggtcaggagttcaagaccagcctggccagcatggtgaaaccccgtctctactaaaaatacaaaaaaattagcagggcctggtggcatgctcctgtaatcccagctactagggaggctgaggcatgagaatcgcttgaacccaggaggcggaggttgcagtgagccgagatcacgccactgcacttcagcctgagtgacagagcgagattccatctcaaaaaaaaaaaaaaaaaaaagaactgtctaaacataacagaaaggaaatgaacattccaattagaaaatgggcaaatgacttgaataggcattttaccagagggaatatacaaatggcaaataagtagatgaaaatatgttcaacataactagccatcaggaaatcaaattcaaagcacaattatgtgacactacatacctactagagtggcttaaacacaaaatactgacaatastaagtgcttacaaggatggagaacagctggatctctaatttattcccgccagaaaagctggtggggatgtaaaatggtacacatactctggaaaaacactttagtagtttcttataaagttaatatacatttggccaggcacagtggctcaagccattactgtaatcttagcactttgggaggccaaggtgggcagatgacctgagctcaggagttcaagtccagcctggtcaacatggtgagactccatctctcttaaaaatacaaaaatttagccaatcatggtggtgtgcgcctgtaatctcagctactcgggaggctgaggtgggagaatcacatgaatctaggaggcagaggttgcagtgagctgggatcgcaccactgcactcragcctgggcagcagaccgagactctgcctccaaaataaataaattaatgaattaattaaataaattaatatatatttaccatgtgactcagcaatttcactcctgagtatttcgcccagaaaagggaaaacctatgttcacacaaaaatgagtacatgaaagttcatagcagctttctatatgatgtactaaaacaggagacaacccacatgtctttcagcaggtgaatggataaacaaactaaaatacattcatacaatggaatactgttcaccattagaaagaatgaactattgacacatgaaacaacttgggtgaattataagggcattttgctgagtaaaagctaatctcaaaatgttacatattacatgattccatttataaaacattcttgaagcaaagaaatcatagtgatggggaaaagatcaatggttgacagcaattaaggttgtagggttgtgggaggatgtaactataaaggggctaacaggaggaaatttttgtggtaatggaacatttctgctactcaaatctgtacacatgataaaaattcagagggtgggagagagaagagagaaacctaatgaaatccaaataaggtctctagtgaattaaggtgttgtatcaatgtcattttcctggttttgataatgtactatagttatataagatggtatcatrggggggagctgggtaaattgtacatgggaactttctgtactatttttgcaatttttttrtgtcttaaactatttcaaagtaagacatatataaaaataggcaaatgttcttaggagatacatactgaagttttagggttgcggtatcataatttatgtaacttactcttagatgatttggcaaaaatgctgtccacacataccacacacacaaatgcacacagaagggggaggtaaaacaaatgcgtcaaaaagttgaccattggtgagtttaggtgaaaaatgtacagttgtttattgtattagccttgcaacttctctaggtttaaaatttccaaattaaaaattcaggaaaaaaaattttttttttgagacagaatcttgttctgttgcccaggctggagtgcagtggcacgatctcggctcactgcagcctctgcctcccaagttcaagcatttctcctgcctcagcctcacaagagtagctgggtgtacaggtgtgtaccaccaagccaggctaatttttcttttgtatttttctttttttgggtggagttttgcccttgttgcccaggctggagtgcaatggtatgatcttggctcactgtaacctctgcctcccaggttcaagcgattctcctgcctcagcctcccaagtagctgggattacaggtgcccaccaccacgcccagctaatttttgtagttttagtagaggtggggttttrccatgttggccaggctggtcttgaactccagagcctcctaaagtgctgggattacaggcatgagccaccgctcccagtctttttttggtgttttagtagagacaaggtttcaccaggttggcaaggctgatctcgaactcctgacctcaggtgatctgcctgcttcagcctcccaaagtgctgggattacaggcatgagccactgtgcccagctaagaagttaggaaaattggttaatagatacatagatgagagagagagagagagagcaaaaaggaaagtatcactcaaatctgggcttgaaccagtgaccttcagtctaacactcttttaacttgggctaactgtaaagacctctcccccttccttcttgcccaccaataggaaaatcctgcttgttttgaagtaacagaaaaaggtcagaattcacactatgttgggagtattttaagtgctactctgagtccttggtattgccatagtcatctcacacacatttactgaaccctggctatatgccagccgctgggatcctagagatgaatatagctagaagtgacaaatggtgtcatttctctcagattaatttaatttttaaaaatatggaattatatatagtatgtaatgtgctgcgactttatttcttcacttcataaatcataaacatttttccacattagttatatacatctatttacttctttttacagttcagtatagcatttacttgtaaggatgtgccataatattcgtttttctctaataaaaacaccactcttgattttttttctttgtcttatgattaccacaagtgcatatgagatttttacaaaaagaaagaaaaaaaacaaggtagacatggtagcttacacctgtaatcccaacactttgggaggccgaggtgagtggatttctttgagctcaggagttcgagaccagcatgggcaacatggcaaaaccccatttctacataaaatattaatacaaaaattagccgagtgtggtggcacgcgcctgtagtcccagctactcaggaggctgaggctggagaattgcttgagcccaggaagcagaggttgcagtgaaccgagattgcaccactgcactccagcctgggcagcacagtgagactctgtctgagaaaaagaaaaaagaaaaaaaaaaaaaagaaaagaaaagaaagaaaagaaaaaagagaaaagaaaagaaaaatacattgcctgagtgaaatccagccttcatctctactttgccataatcacacacacacacctgctgtgtgtccagctgcatgcttggtactttttatgtctgtatggtaaaagacacgagacatagtcacactcccaaaaaattacaatcagttgaagaggtttgactaacttgagattttaacttaaggaccaggcagtatgcacttgattacagaccatacattctaagtactcagagggaaacctaccctttttttgtctgatttcagactattttttcagctagatttctttagcctctacgaaaatatattgcatgagcatatcattaaggaagatgagggagaatcatgccccaaactttctagaagaaaggggaatgtttttaacaaagaaacatgaaagaacatgacatgaagctaaatcatactcctgtttgtccttcatttataaaacctcaactgtttctatgtacatagaagataaaaacaaacaataggctgggcgcagtggctcacgcctgtaatcccagcactttgggaggccaaggcgggcagatcacgaggtcaagacatcgagaccatcctggccaacatggtgaaacccagtctctactaaaaatacraaaataaactgggcatggtggtgcacgcctgtagtcccagctactcaggcggctgaggcagggaattgcttgaacctgggaggcagaggttgtggtgagccaagatcacgccactgcactccaggctgttgacagagcgagactccgtctccaaaaaaaaggttctttgggtggattagttgatagtaacagttcgtcctatgtggttgtagttgtgcacacaaaattgtgtttgcacagttttgcattgcattgtttgatgtgcagcgtttgtttttccatatttttgcttaaggaatttggggtttctatgttttggctttagcagtatctcagtgcttaagcctatttctgtgttctctttctctccctatttttctttctccctctctttctttccccttcccagaatgttctctttattcacttacttctaagtctgaggctaggctgaaccagagtttccagaaccccaggattaggagaaacagggacttgcctgttcagttacacttcaagaccatggacagctccccagccgtcctggtgtcggcgcctgctttatagacttcaccgattctgagaatggaaacgaatctgagaaaccatttggcctacctcctcctaccttttgctgtttcccagagaaaggatcctagtcggcaaatagtccaggattattaactgccnggctggggggagatacaaaggacctggagggcgccttcacccagcgtttcctgcactcaaatctgctaatgcttggaaaaatccttcagttcaactcagcagacttgtgtggaccaagcctttccctccctggagagataaggcctaaatacagatactgtctcggagagggaacaaaggaactctagtttaataagaaaataatccctcctaaaggctgttctccacgggaaatagaggaagagacagcccagagcattgggagccgaaagggctggagagggagtggcgaaatggaatggaagaggggcattcagggacttctggggactctgaagtcagtcttggtgagctccacacagttcacaccagtgtgccctgagcacacagtcaaagatatgcctcacactttcccaaaatgagaatacagaggtctcccactgtctcctyttccaaactaattttttttcttttcyttctttttcttttcttttcttttcttttttttttttttcttgagacagggtcccgctatgtcaaccaggctggaatgcagtggtgcaaacatggctcagtgaagcctcaacctcctgggctcaagcgatccttytgcctcagcctctcaaggcagcctgagactgtaggcacatgccaccatgaccaaawaattttttttttttttttttttttttttttttttttgtagagatgtggtttcatcacagcacctaggctggtctcaaactcctgagctcaagccatccacccactttggcatcccaaaatgctgggattacatgtgtgagccaccatgcccagccaactaatttccaaaagataatttatgcaatgatttgatgtattttgtcttcttttattcttcatgacaaatttagggttttattattcccattttccaaatgaataaactgagactctgagagattagggaacttgtccaaagtgacacatccagaaattggcagagctgggtcttgaaccaagttcctctgactccaagctggtgttcctttcatcacactttatcgctaattgggtctttttatgtgtggtaaaatgcatataacaggaagtttactattttaatcattttaagtgtatagttcagtrgtgttacattgacaatgttgtacagccatctctattatttctaaaaccttttcaccatcccaaaagaaactctgtactcattaagcaataactccacatttcccccatcactgtctttggcaacccctgttttattttctgtctctacgaatttgaccattctgtgtacctcacaggaaaggaatcatacaatatttgtccttttgtgcctggcttatttcacttaatgtaacttcaaggtttatctatgttatatcatgtgttagaacttcatctctttttttctttttttctttttttgagatagggtcttgctctgttgcccaggcaggagtgcagtggcacaatcttggctcactgcaacctccgcctcccaggttcaagcgattctcatgcctcagcctcccaagtagctgagattacaggtgtgcaccaccatgcctggctaatttttatatttttagtagagatggagtttcgccgtgttggccaggatggtcttgaactcctgacttcaggtgatccacccacctcagcctcccaacgtgctgggattacaggtgtgagctaccatgcctggccagaacttcatctctttttatgacctggtacaatcttgtggttgcagaggacagagattcactcaggccaccagaaggaatgaagggttattgtaagcagccttaacagaattcaggaagacagaaatctcagccacatgctgaagtttaggaatagccatgtggctgggtttattaggacttaaatatagtttggaatctgatcagcacagctctggggaccaagatagctcattgatttcttagtggcaggaagttgttgttttctgatacttacccattatgtcaacatagtgatgctctacttagcaatattctccttgtggtctggcaccaccaatgaactacttcatatcctgtgaaaagcaaccctcaggcttttgctaaccccacatttctaccattttaatgatatgctatattttttccctttgtggctttcatctcctgctcccactgccagttgacaaactttccataaatctctggctctaagccacctgcctacctagaaattatctgcccttgagatgagcatcttctcctgctctgatctgttgtacccagggtgacaagtcacatgctgttgaacatgactcctaatggtaaagacctgcctctctcaggaggaagttgagtgcatggcatgcggatgcacagagaggcattgccttcatccctctgcatgagctctctggtgctctcccatcaggctgtttatcgtactttaaccctatgaatttacttctgtgactttacaaatctcagagcagagatttgtagagaggtgtatttggctgagttgatgtgtactatgcaggtatttttgctcatatttttagattatacaaatcattgctatrtggtgatacggagtttggaattgcttgaaatatgcttagcttatgtcaaggtgcctacttgtggtttctgaatggggctcttttcctttcttttcttttcttttttttttttttttttgagacagtcttgctctgtcacccaggttggaatgcatgatcttggttcactgcaacctctgcctccccagttcaagtgattttcctgcctaactcagcctcccaagtagctgggattacaggccaatgccaccattcctggctaatttttgtatttttgatagagacggggtttcaccacgttggccaggctggtctcgaactcctgacctcaggtgattcacccacctcggcctcccaaagtgctgagattataggcatcatccaccgtgcccggccagtgaatggggttgtttctttaacactgaaaatctgttttcaattcccatgccaagtctgcagtaacaggaagatcttcagaacacaagacacaccgaggtgctagcaaatccatgaggtggatcccacctttcagtaagcagtgggtaaaaggactggattgtgggaatcaggccattcctagttccgtgactgtgacaaagaatgtggtgctcatcacacatcacacaaacatctcatgtcctctgcctccactacgtttcccagcttcccttgtagttaggttggagcatgtgactaattttggccaacaggctgtgagaggaggtgacacatgttctccacactttctcttcttggaaggcatgagtttagttgacagaaccctcaaggtagaagcagactggatccctgagtcatcgtctgaaacagtgctgccctggagagcctcctgatcttttgtgagtaggaaataaacctctgtaggttaggccctggagaccttgttgtttgactgttactgcagtatagcctgggtcaccctgattagtacagtcaccaaccagcagtgtgaccttgggtaagtaacagtgtcttcagtcctcatcttcctcttctgaaacataagagaattgccccaaataatctcaaaggttaccttcatgattcctaatttaccatgtcctgttgacttttcctgggtggagtttccatttacttctttccattcttactgccactgaggtatatactttctcacttgagcctcctgatcrgccacatgcatctgtctttccacttccttatatagatcatgttcccttcttactcaacagccttcactggctactcactgcctgctgaaaaaagcccatttgggctgggcatggtggcttacacctgtaatcccagcacttaaggaggctgaggtgggtggattgcttgagcctaggagtgcgagaccaatatgggcaatatggtggaaccctgtatctacaaaaaaaagaaaagaaaagaaacttagccaggcatggtggtgcacacctgtagtcccagctacttgggaggctggggcaggaagattgcttaagcttaggaggccaaggctgcagtgagccacgatcatgccactgtactatagcctgggtgacagagcaagactctgtctcaaaaataaataaataaataaacaaaaactgtgtgatatcaggcctttgaggtccttgataatctgtgtttggttatttctgcagaattctctctcatccactgtaytgtaggcttctcaaggcccagtatcacatttgattcagttcatagcctcccacacagttactgcctattgaagtgaaaagtcaaatatctccaaactaggaaggaagccctagtaggaagatagaaactactaaatgaattgcaatgatgaagtttgctagtagaacactgtattggtccattttcacactgcagataaagacatacctgagactgggcaatttacaaaagaaagaagtttattargcttacagtgccacatgccaccacagtcatggtggaaggcaaaaggcatgtctcacatgacagcaaacaagagaagagagcttgtgcagggaaactcccatttttaaaaccatcagatcttgtgagacttactcactatcataagaacagcatgggaaagacccacccccatgattcaattacctcactccaggttcctcccataacacgtgggaattcaagatgagatttgggtggggacacagccaaaccatatcattcccccctggcccctcccaaatctcatgtcctcacatttcaaaaccaatcatgccttcccaacagtcccccaaagtcttaactcatttcagcatttactccaaagtccacagtccaaagtctcatctgagacaaggcaagtcctgtctgcctatgaacctgtaaaatcaaaaacaagttagttacttcctacatataatgggggtacaggcactgggtaaatacagttgttgcaaattggagaaattggccaaaacaaaggggctacaggccctaggcaagtttgaaatccagtggggcagtcatatcttttgtgtgtgtgtgtgtgtgtgatggagtctcggtctgtcgcccaggctggagtgcagtggcaggatctcggctcgctgcaagctccgcctcctgggttcacactattctcctgcctcagcctccagagtagctgggactacaggcacccaccaccacgcccggctaattttttgtatttttagtagagatggggtttcactgtgttagccagggtggtcttgatctcctgacctcatgatccacctgcctcagcctcccaaagtgctgggattacaggtgtgatctaccacgcccggcccccagtcatatcttaaagctccaaaatgatctcctttgactctgtgactcacttccaggacatgctgatgcgagaggtaggctcccatggctttgggaagctctgcctctgtggttttgcagggtatatccgccctcttggctgctttcacaggctgatgttgaatgtccgatttttccaggtgcaaagtgcaagctgtcggttgatctattctggagtctggaggatggtggccctcttctcacagctccactaggtggtgctccagcagggactctacatgggggcttggaccccacatttcccttctgcactgtcctagaagaggttctccatgagggccccgcccctgcagcaaacttctgcctgggcattcagacatttccatacattttctgaaatctaggcagaggttcccaaacctcaattcttgacttctgttcacctgcaggctcaacaccacgtagaagctgccagggcttggggcttccaccctctaaagcaacaacctgagctgcaacttggccccttttagtcacagctgcagcagctgggttgcagggcacaaagtccctagactgcacacatcagagggaccctgggcctggcccactaaactattttttttctcctaaacctccaggcctgtgattgggggtggggggtctgctgtgaggacctctgacctgccctggagacatttttcccactgtcagagattaatattaggctccttattacttaagcaaatttctgcagctggcttgaattgctcctcagaaaatgggtttttcttctttattgcttgtcagactacaaattttgcaaacttttatgctctgtttcccttttaaaactgaatgcttttaacaacacccaagtcacctcttgaatgctttgctgcttagaaatttcttctgccagaaaccctaaatcacctttctcaagttcaaagttccacaaatctccagggcaggggcaaaatgccaccagtctctttgctaaaacataacaagagtcacctttgctctagttcccaataacttcctcatctccatctgagaccatctcagcctggatttcattgtccatatcattatcagcatattggtcaaagccattcaacaagtctctagggagttccaaactttcccacattttcctgtcttcttctgagccctccaaattattccaacctctgcctgttacccagttccaaagttgcttccacattttcgggtatcttttcagtagcaccccactctcggtaccaatttactgtattagtccattttcacactgctgataaagacatacccgagactggacaakttactaaagaaagaggtttattggacttacagtttcacatgggtggggaggcctcacaatcatggcggaaggtaaaaggcatgtctcacatggcagcagacaagagtggagagcttgttcagggaaactcccattttttaaaaccatcagatcttgtgagacttactcattatcatcagaacagcacaagaaagacccacccccatgattcaatcacctcccaccatgttcctcccataacatgtgggaattcaagatgagatttgggtgggggcagagccaagccatatcaaatatctactggcaacatgtagaatgtgtattaaaatgcagaatatgggccaggcatggtggctcatgcctgtaatcccagcactttgggaggccgaggcaggcagatcacctgaggtcgggagtttgagaccagcctggccaacatggtgaaaccctgtctctactaaaaaaaaaaaacagaattagccaggcgtggtggcacatgcctgtaatcccggctacttgggaggctgaggcaggagaatcacttgaacccaggaggcagaggttgcagtgagccgagatcacgccattgcactccagcctgggcaacaagaccgaaactccgtctcaaaaaaaaaaaaaaaatgcagaatatgtgtgtgttaaaatctgcatccaaggttgacatctaaagactatttggaaagccttgtgcagtaagggaggggagggggttacaaagatgtaatatgtaaagcacagcccctgcccttcattgggtggtgggaggaaatgtgtgaaagaagcagtctgcttagaacagcaagggagtccttaacgtggctttctggggacaacagaaaaaggaatttggctatgtgggctggtcctggtgcaatccttctttataagaagtgttatgacttagaccccactggtttcacttgtagtgctatagggggcccctggtgggcccaaaacacagacagaggagaaaaaaggtaggaccagaaaaaaagaaggaaagtgggaaggaaagaaagtgaagaagaaagtgagagtaaaggatgtgcattaccaaagaatctagcatttacatcctacttcctaatataaacaacattttcacaagaatcctgtgaggtgaccattgatatttttattctgtggataaaagtaaaaaagggagagaggtcaagggacttgcccaaggtcataaatttaggtttctaactcaagaccttgtactgtgttctccattgcaccagttgtctctacaccaagagaaagtgcctcaactcctgaactatgggtttcttttcccagtttataaggctatttaaaatcttctttaaaactatatgccaggcgcggtggctcactcctgtaatcccagcactttgggaggccgaagccagaggatgacctgaggtcaggagtttgagaccaatctggccaatatggtgaaaccccgtctctactaaaaatacaaaagttagccaggcgtgatggtggccacctgtaatcccagctactcaggaggctgagccaggagaattgcttgaacccgggaggcagaggttgcagtgagctgagatggcgtcactgcactccagcctgggtgacagagtgagactctgtccttaaaaaacaaacaaaaaaaatagctgggcattgtggcagacacctgtaatcccagctactcaggaggctgaggcaggagaatcgcttcaacccaggaagtggaggctgaggtgagcagaggtcatgccactgcactctagcctgggtgacagagtgagactttgtctccaaaaaaaaaaaaaaaaaaaaaaaaaaaaawgggaatgaaggaaacagaaaattagaacaccacagtaataattgctgcagataaagtccactgatgaagctaatattagtgggcaaaactctaaggaggaccaggatatttacatagcatctaagtataaacctccaaatatgcattaattatcttgtttttaacatatgtccccaaatgttttgatacccctccctccacaatggaaagcttaattctccttcccttaagtgtgggctgatttagtggtgcacttctaacaaatcatgcaggggtcagcgtagacccaaataggaaatatattaggctgtttaagccatatgatctcttttgcaacaactcacccctactgatgtagcatgaaagcagccataaaaaatatgtgaatgaatgaatgtggctgtatgccaataaaactttatttataaaaacaggcagtgggctggatttgggcctccagccatggtttgctgacctctagaatagcatatgaaaaagaaaaaatagtaactctgcagtgaagaaacttggcagacactaccttaactgagtgatcaaagttaacattaccagtaataaggaatactgaagtgttatcagtgaaaaatggcagagtaaggaaatccaaaagtttatccctccataaatgcaaccaaaaggttggttaaaactgttagaattggctgggcacggtggctcacgcctgtaatcccagcactttgggaggccgaggcgggctgatcacgaggtcaagagatcgagaccatcctggccaacatggtgaaaccctgtctctactaaaaatacaaaaattagccacgcatggtggcacatgcctctagtcccagctgctcgggagactgaggcagragaatcacttgaacctgagaggcagaggttgcagtgagcccagatcgtgccactgcactccagcctggcgacagagcgagactccatctaaacaaacaaacaaacaaacaaaaaacaaaaaaactgttagaatcaacttttcagaactctagacactaaccaaaaggcctgcagcagccagtgaaatgttttcataaaaaagacagctgattcttagtaagaatagcaagctttgtagtattttaacttaccctggtcccatccccaggttagcagtgaatttggagaaaatagctacagtcccagtataggtaccagtactagagggaagagaatggacctaattcgcaagaaattgtttttgttttgttttgacctgtatggtggctccctggaggactttctcaagtgcttacctttatctttgttttgacctgtatggtggctccctggaggactttctcaagtgcttacctttatcttgtctaacttggaactctctagtggtgagtgtggctacccaaggagcatttgttgaagatatttacaggcaaatgttttggttattgctgcctggggcattggataacagttggggcaaacaatagactaatataaagcttgggagagaagactgaagaatgagatgctttggagaagaaggactttgaaaaactgacatatccctgggaaaccggaaagccacttgcatgccgaggcctatgcacatgttcaggaaagatctgagaatgccctaagtgttctggctgatcttcaggctcttcacaagcatgaagcaaaggctaaggcaaagagctagattccatctaaaaaaaaaaaaaaagatagagcagacagaagaaaatatcaatgaatttaaaaataaatcaattgagattatcaagtctgaggaacagaaaaagaaaagaatgaagatatatgaagagagcctaagtgaacttctggagttccagaaggagaggagaggaaaaaaaggagcagaaagaatatttaaagaaataatggctgaaaacttgaaaactttctaaatttaatttaaaacattgatctatacatctggaaagctcaataaaatccaagtaaaataaactcaaagagattcacaccaagacacatcgtagtcaaattgttataagccaaaggcaggagagcgaatcttgaaatcagtaagacaatggtgactcatcacaagctgggtgtggtgtgcatgcctgtagtcccagctactcagaaggctgaggtgggaggatagtttgggcccaggagttcgactttagcttgggtaatatagtgagactccatctcaaatttaaaaaaagaaagcagctgggcatggtggcctgtaatccagcagcagtttgggagaytgaggcaaraggatcacctgaggggccaggaggtcaagatcamcctgagatacatagtgagatcctgtytytccaaaaaaaaaaaaaaaaaaagccagactcagtggcatgtgcctgtagtcctagctacttgggaggctgaggcagaaraattgattgagcccaggagtttgaggctgcagcaaggcatgatcatgccmctgtactgaagcctgggtagcagagtgggaccttgcttctttaaaaaaaaaaaaaaaaaaaaaaagtaggctgggcgtggtgattcatgcctgtaattccagcactttgggaggctgaggcaggtagattgcttgagcccaggagttcaagaccagcccaggagttcaagaccagttcaagacatggtgaggccctgtctctacaaaaaatacaaaaattagctgggcatggtggtgcatgtctgtattcccagctacccgagaggctgaggtgggaggattgattgagcctgagaggccaggctatagtgagccatgatcactgcactccagcctgggtgacagagtgagaccctgtctcacaaaaaagaaagaaagagaaagagagaaagagaagaaagaaagagaaagaaagaaagagaaaggaaggaaaggaagaaagaaggaaaaaggaaggaaggaaagaagaaagaaagaaaaaggaaggaaggaagaaaagaaaagaaaaaaaggagggagggaggaaggaaggactcatcgtgtacaatggatgctcgataagattaacatcctatttctcatcagaaaccataaaggccaaaaggcagtaagatgacatatattaagagtgctgaaagaaaaaaacamcccctgtcaccccagaattctctatctaacgaaactattcttcaaaaatgaaggagggaaagaagacattaaaacattctaagataaagactggaagatttcatcactagtaaacctgacgtataagaaatcctaggccaggcacggtggctcacccctgtaatctcagcactttgggaggccgaggcaggtggatcatctgaggtcaggaatttgagatcagcctggccaacatggtgaaacctcgtctctactaaaaataaaaaaaacttagccaggcgtagtggcacgcacctgtaatcccagctacttgggaggccgaggcataagaattgcttgaacctaggaggcagaggttatagtgagccgagattgcgccactacactccagactgggcaacagagcaagactctgtctcaaaaacaaaaaaacaaaaaaggaaatcctagaggaggtctttcagactgaaatgacagtagacagtaatttgaatctacatgaagaaataaaataaaccattaaaggtaactccataggtaaatataaaaggtagcataaatgtattcttgtttaattttgtttaattttttcctatcctatttaaaagataagtacataatgcagtaattataaacctgcattgataatgcacacaatgtattaagatgtattttgtgtgacaataatagcacaaagaaggagaaagggaaccaaagctatakaggagcacattttttgtgtaataatgaaattaagttggcatttatctaaactaagttgttattaaataagatgttaattgtaattcccaggacaatgactaagaaattaactcaaaatatagtaaaaaggctgggcacagtggctcatgtctataatcccagcacttcgggaggccaaggtgggcagatcacttgaggtcaggagttcaagaccagcttggccaacatggcgaaaccccatctttaccaaaaatataaaaattagctggatgtcatggtgcatgcctgtagtcccagctacttgggaggctggggcaggagaattgcttgaacccaggagcagaggttgcagtgagctgagattgtgccactatactccagcctgggtgacagaacaagaatctgtctcaaaaaaaaaaaaaaaaaaaaaaaaaaattagtattcttcctaatatgcttaacttcaatttaatcatgagaaaatgtcagacaaactcaaattgaagactatccaacaaaatacttaaccaatactcttttttttttttcttttttctgagatggagtttctctcttgttgcccaggctggagtgcagaggcatgatctcagctcactgcaacctccacctcccaggttcaaggcattctcctgcctcagcctcccgagtagctgggattacaggtgcccaccactatgcctggctaatttttgtatttttagtagagatggggtttcaccatgttggccaggctgttcttgaactcctgacctcaggtgattcgctcacctctgcctcccaaagcgttgggattacaggcgtgagccactgcgcccggccaacttaaccaatactcttaaaataaataaataaataaataattaaaaaaaaatcaggcaatgggctgggtgcggtggctcacgtctgtaatccagcactttgggaggccaaggtgggcagatcacctgaggtcaagagtttgagaccagcctggccaacatggtgaaaccccatctctactaaaaatacaaaaattaggtgggcgcctgtaatcccagccatttgggaagctgagacaggagaattgcttaaacctgggaggcgaaggttgaagttagccaagatcgcaccattgcattccagcctggacgacaacagcgagattccatctccaaaaaaagaaaaatagttgtagaaaaaacctataaattgaaaactgtaaaatttcactgaaagaaattaaagtccaggcacaatggctcacgcctgtaatcccaacatattgggaggccaaggtgggcagatcacttgagcccaggagttcaagaccagcctgggccacacagtgagaccttgttcctacagaaaattagccaggcttgatggcacatggctgtagtcctagttacttggaaggctgaagtgggaagatcacttgagcccaagagtttgaggctaggagctggtgatgcactcggggggaatcatcagctcattacaaacacaaaacaaaccaatctgaaagccaagattaaatgtctcaggggcctgattgggtggatctttaaaggtgtctgtcacttctgtaagtggaggcaagaccacttgccacagattttgtgtccagtgttaagacacctgagtccctgccatccatccttagttatatcagcagaaggcaaggaggcacccactgccatagggcagattatgaaatggaatgctttttgcagcctgatgatggtaaataaaagggcaaggggtaaggaaatttgggcaaaataaaagccatggcgtctcctgtggagatgaggattgagactatatcacttctcttttgagagttcctgctcttagaacttatcagatggattgagatggtgttgaataagattcactggcaggacagtgggctaagagaatccactgggaagagttagccctggtgacaagtgtgagcacatagtggttgtggtgggggtagaggtgaaggtggtgatggcggtggaggtggtggtggtgaatggcggtagagatggtggtgatggtgttggtggtggtggtcatgatggaagaagttgaggtggtgatggtggtggaggtggtgatggtggtgatggtggtggtagtggtggtggtagtggagtggcagggagttctggcacaacatatgctgaggctggaaaccttctgacccagtcattgccacctaaccccaggaaaaatggccaagcatgtgagggtgaccttaggagcctagcattgaacatcacagacatccagagcagcagggtccctgcagcaggggaaggggcatgtcaggctgtgcagacagggtgttcatcagccacacatgtggcaatgacggcagcagtggttccccaaaacagattctctgatgagtggaaatgtgtcttcagttctctgtccttcaagcacttggaaacaaagctggccccttggatggagtaaacaccagggatgttggacagctcaagaggaggagaagggatattggactttctgctaacctggcacatgggtggtcaaggtggttttgttttgaaaagtagaagggccgtgtgtggtagtgcaagccatagtctcagctacttgggaagctgaggtgagaggatcacttgagcacaggaagtcaaggctgcagtgagctctgatcatgcctctgcactctagcctgggtgacagagcgagatcccatctcaaaaaagagaaagagagagagacaaaagaaaagaacaatggaagagatgtgacctgatttgtgccccagggttggtgatgcaggttgtttcaggtcgcgctggttccatgaattaaagactgagcttctgagaagtcacagcatcctatgttctgtcatgatttcttttgcgtttttttgttttgttttgtttttgtttttttacatcagaaccagcgtggaggaaaacaggaatcctaacgtgaatagaaggggcctgatccttcagagagcaccagctctgtaaccagccccccacacgcccccactgccatgtatgctagctttctgttgaacagcaccatgcccccttcccacccactgtggatacacgattttcttatcacttgattctatttgctttcctcattacttcttctcagagcccagaagtggactcacaaatgcttaatgttctgtaatgaatgtttagtaatccatagtttctattactcaaataaatttatttttagcctgggcaacatggtgaaaccccatctctacaaaataaaacaaatacaaaaattacctgggtatggtagcgtgcacctgtagtcccagctactttggaggctgaggtgggagaatcacttgagcccgggaggtagaggctatagtgagctgtgattgcgccactgcactccagcctgggcaagagtgagaccctgtctccaaaaataaatttgtttttaagaaattaattagaatggcttattcctgctctaaaagcttgtgattaatgacttggtgctcttaaagcgtttcctggacatggaggcagtgtcagggcctaattcaaaggcttttctttccttatttcttcaataagaacaatgccctcccgccaccccaacccatgccaaatgggttcaaaatgttgggagattatagctaccctttcagagattcactcagaattagagctcttgttayaattaaagaactaagtctaagactaagttttcattcagccttgtcaaaagaacaaaggtaaatttttttctcctggttgttttgctgtaattttctattctttttaaataaattttaactttgattttattatttttcatgttgttatacagtcttaaggtattaaaaatattgtttataattttcacttttaatagctgcattatattccatcaagttgacataatttagtcattcttcaatagctagacatttaggggttttcccccctaatttttatcattgtaaaaaacattgcagtgggccaggtgtggtggctcacgcctgtaatcctagcactttgggagcactttgattactcaagtaatcaagattacttgaggccaggagttcgagaccagcctggccaacatggtgaaaccccaactctattaaaattagccgggtgtgatggcaggcgactgtagtcccagctacttgggaggctgaggcaggagaatcgcttgaacttcagaggcggggttgcagtgagccaagagtgtgccactgcactcccgcctgggtgacagagcgatgggagggggagggaagtaacaccagttgagtacttactctatgccaggaaccatgccaggagcatttacagaattaatcccattaaaacctcataacaacccagagattattatgcatatttaacacaaatggaatgtaaggcttcaacattcaacaggccaagtaactgctcaaagttctaaaaacaaatgagctgggttttaatacaggtcagtcttaacattagagctcatgcctactcaacatatcattcctttttttgtttgttttagtttattttttgagacaaagtctcactctgtcacccaggctggagtgcagtggtgtgatctcagctcactgcagcctcgacctcccatactcaagtggtcctcccacctcagcctcccgagtggctgggaccacaggcacatgctaccacatctggagaatttttgtattttttgtagagatggggttttacattgttgcccaggctggatcattctttcttaaaaccatgttcagaatcaagttgagtagcctcctgtagaactatctggcatggggtaatgggaaaatggcaaataccaggcttgtacatmaccactcaccattcctcactcatggcagccacaactaatcaaacctggcactttaccctcttaattcaataattaagaattcaaaacctaggaattctttctcaagtcactgtttcaggcaggtgctaccaatggataggagttggcatgggagacgtaatcaggcaggtgggttcgaacctatactgcacccttactagctatatgaccttgagcaggtcaggcaaccttcctgagactcagtttttgtcaactgtaaattaagatagtatctcatttgcagtagaattgccttagaattatcctgaggatttgttgacaacatatatgtaaaagtagccagcactgtacctggaagagacaaggccatgaaaagtgtatagcctttgaggagcccrtcaatcccttcagctcgtgctctggaaactgttagggaacactttttttttttttttaaatggggacaaaaatatctgctttattattaccacttacttatagaggtgatttacagatttaatgagaatatatcaaagtactttataactcacaaaaatataaacttatataatgctatctactttgtattgagcatattctaaattctgggactagtactagaaactttacatatatagtgttacctcttaattctcaacacaaccccacagttgttataattacatttaatgtataaatgacttcagagaaacacaaaaaagactgggtgatttgttaaaggtccagctagaaaagggcagtcagaattcaacccaatattacttccatacagaggtttttactttttcctttctactcagagctaacacaacagcattatttaacgtccttaagaatggtggggaggaatcactgaataacctgctttgacaaaaacaccctgataaaatctatgcttgtattttagaacccctgggtttcacgcattgtttttatagtttttacacattaagtgtaaggtgaaaagtgatagattttaagaaccaagaatatggtatgccatcccacccaaacttataaacaaatcacaaataacatgaaatagaaaaaagccataaagacttcctttgcttttggaaaacagctgagaaacaacaaaattcttttcagaagtacagacaaaatttgtttttgtagtgtagctaatatgccctccttaggcattaagacacttttctgtttgtaaccttaatgcagccgtatttttactctttataaaaatcaagtctctcaataaaaacagtatcttactcactaatcattaaattgcatcactaaaaatgtagttatacacaccaatttctgacctcttagaatattctgcacaatcagttttaatcactggaatgaataactgctcaaaaaagcagtacagcttcaatttcatgatgatttggtagtcaatattcctgttttccagtaaaagggagatttcatgaacagaaacattgggctccttatggtttcatcgatcaagagaacgtttctgagcagcttctgagcaaatatttcttaataggttgatcacagatctggggtcttcactcctcataatagcactgccagatacagtcatgttagctcctgcctctgcacacttatggacagtgtcagaacctactccaccatcgccctctatatccaaagatgggaactgggtcctcaaccagtgaacctttggcatcatatcttccatgaatttctgctctccaaaccccggttccactgtcataaccaaggccatatctatttgattagcccatggtgccaaatactcaactgaggttcctggtttgatggcaaggccaaccttcatcccattctcccgaatgtctttaatcaaagtccctgggttctcagtagcctcgagatgaaaggtgtactgattggcttctgctacagccattggctttacccactgttctggcttggacaccatcatgtgcatgtcaaagaaagggtcctggcctagctrctttygaaggctttctaccacagggtgaccaaaggtgatgttgggaacaaaatgcccatccattacatccagatgcagataatcggccccagagtctagcatctggaggcacttggcccctaaattggccaggtcgctgttgaggatggacgggccaatcttgcagcccgacgccataccgctggctcccaagaacaagttaccccacgagtccccggcaagactagagcccacttttttttttttttaaaaccaggaaattctaccaaagaaccacagtttggccaggcacagtggctcatgcctgtaatcccagcacttcaggaaaccaatgcagaaggatcacttgagcccaggtgtttgagaccagcctaggcaacataataggaacccgtttttacaaagtaaaaaatttgcctgtgtgatggcacrtgcctgtggtcccaggtactcgggaggctgaggcaggagaattgcttgagccggggaggctgagacttcagtgagccatgattgcgccactgcactccagcctgggcgacagagtgaggccctgtctcaaacaagagacagaaaacaaacaaaaaagaaaccccgaaacatagtttggagagaactatataatagcagtcaagtacaggctgtgaattctgtaggtttaaaaaaatggtgagggatggccaggtgtggtggctcacgcctgtaatcccagcactttgggaggccaaggcaggtggatcagctgaggtcaggagttcgagatcagcctggccaacatggtgaaaccctgtctctactaagaatacaaaaattagctgggcgtggtggcacgtgcctgtaacctttgctactcgggagggtgagacaagagaatcacttgaagccgcgaggtggaggctgcagtgagcggagataatgccattgcactcagcctgggtgacagagcaagactccgtctcaaacaaacaaacaaaaatggtgcgggataccctgggaggcatggttcagggatcccttctggaagagttggatatgagaaggtctgaagatttagggtttggaagaggcaccagttggaaggtggaacagcataagcaaaagcagtaagagaaagttgagagcacagagaggagactgactcttccatcgtcaagggactggcctggggagtgtcttcagcggggaaggaaaaataccctccctggccgggtactttgggttttcctcacattctcggccagctcctgatcttacccaaccaaccccaggagcaccccaagcagcaaagactctgcacgtttcatgactaccaccaggaggcagtatggcccaacaacttggagcatcagggttcattcagttcctagtttgttccaagagctgatctaggagcatgaaagtgtccaccaatctaatatttgtggagcactttgcatggagttttcaaagtactttaaccccggtgatctgatagaatactaactacaaccctgtgtggtctctatgtgttggtattatctacctagaggaaccgatgttgaggatttaagtgaattattcaagttcatttagactgtgcgggaatctgaatttgaaccaagggccaaaatctctacctcgtgccctctactacaacttactgccttttgttaaggagacaggagcatacaaatatttagcataataataaaagcttatattaataactattaagaaccaatggcagtttcagtttgataagatgaaaaaattctggagatggatggtggtgatggttgcacaacaatatgaatacatttaatatcgctgaactgtatatttaaaagtggtyaaaatggcaattttttttttttgagagaagtctcactcttgtcccccagttttgagtgcaatggctttatgttggtttactgcaacctctgcctcccggattcaaacgattctcctgcctctgcctcccaagtagctgggattaaggcacctgccagcatgcctggctaagttttgtattttttagtagagagggggtttcaccatgttggccaggctggtctccaacttctgagctcagatgatccacccgcctcggcctcccaaagtgctgggattacaggcgtgagccactgcgcccggtcggtttttaggcagggtctcactctgtcccccaggctggagtgcagtggtggaatcttggcttactgcagcctcaamatcctgggctcaagcgatcctcccacctcagccccccaaagtagctgggatcacaggcatgccaccacacccagctatttttctggagagatgggattttgctatgttgcccaggctggtctcaaactcctgagctcaagcaatctgcctgccttagcctcccaaagtgctgggattacaggcatgagccactgcacccagcctaagatggcaatttttttttttttggatacagagtttcactcttattgtccgggctagagtgcaatggcatgatctcggctcactgcaacctccacctcctgggttcaagtaattctcctgcctcatcctcctgagtagctgggattacaggcatgcgccaccatgcctggctaattttgtatttttagtagagacgggatttctccgtgttgctcaggctggtctcgaactcccaacctccggtgatctgcctgcctcatcctcccaaagtgctgggattacaggcgagagccaccgcgcctggcaagatggcaaattttatgttatgtgtatgttaacacagtttaaaaaatgacaactacataaatggttatatagcatttattaataacaatagttactgttatatatcactagctgcctttaaaagcacttatgaacttattatttctttaattctcacaatcatcaattgaagcagtcaccattattattctcattcaataaataatttcaggccgggcgtggtggctcatgcctgtaatcctagcactttgggaggtggaggcgggtggatcacgaggtcaggagttcaagaccagcctggccaatatagtgaaaccccgtctctactaaaaatacaaaaattagttgggtgtggtggcgtgtgcctgtagtcccagctgcttgggaggctgaggcaggagaatcacttgaacccgggaggtggaggttgcagtgagctgagatcgtgccactgcactctaccctgggtgacagagcgagactctgtctcaaaataaataaataaataaataaataaataaaaataatttcatcactgggtctatctttactcccctccctctccccaggccccaccccaacccccttccccagcaaccctggtagaggctgtgatctgcacttcactggtccttggttaaccagtgttgtaagtgtgatagaatggaaagaccatgggctttggagtttactgacctggagctgatagggtctcagctgttttactggctgaatgttcttggacaagttacttaatttatctgagcctcaattttttcatttatgaaataataatagtatttacttcacagagttgttgtgatgagcaaataagataatgtataaatatgagatgcttaacagtgcctgacacatagaatggactaaaaaatgttggctgttattaattgctcctagtagtaattgctcagacagcaataaataaataggccaggagcagaggctcacgcctgtaatctcacgcctgtaattccagcactttgggaggccaaggcaggcggatcacctgaggtcaggagtttgagaccagcctgaccaacatggtgaaaccccatctctactaaaaatacaaaaattagccaggcacagtggcaggagcctgtaatcccagctacttgggaggctgaagcaggagaatcacttgaacccgggaggcagaagttgcagtgagctgagattgcaacactgcactccaacctgggtgacagagtaagactcatctcaaaaaaaaaaaaaaaaaattgaaaagaaaacaataaataaatagatgggtatgtcccgaggggatccgaaatacctcctggccctcgtgagggtgggatgttggaggaaagcagcacccagcagagaatgtttagccccaatcagctgagctcatggaatgataggaygaggtgcggttcttggagtccaacttcatcatcttacagaggaggaaatcgaaacccaagaaagggaatagtgttatgcagtcacccctttgtgccagtcaactgggaaattaccctgagaaacagtctggtgtggtgagagcccctccctggaagtcaggcccaggcagtcatgtgagttctccttagccagctctagggcccctcccagaaaaacagcaggttaccaccaagtcctctccagcctcagggctgctctgagaggtgctcacctctgtcccttttcygcaggatcagccaagatgatcatgaaaccgggagatcagcagtttattgtagcttctagggcagggggtacggggagagaaggaaagggaggggccctgggcaccctgccacagccgtacctttggttaatatttattctttcttcttccttggcctggaagccaagggaaggttagtaacagcttgtaaaacaggatcccagagacttgagaagctggttcctgtgaaagatgactcagcacaggcctttagaatgccaggcagtgtcccctgcctggatgctgcacagccccgcgagtgccatgtgggccactttggctgttacaaagtccaggctatttgtctgctcagcagggtacttgtctcctaggagctggggcatgtcctgcagcccctagctcatgagtgggtattagcatcagggtccttgttgtggtttgatctctgaatcctttccgttacagagatccttcatgccttccctacatacagtgaccctctttttctccaggccgtcattgatactgcctctagactgggctttccaatgcatttcatcagggctttcccaaaggatgcctcactgcctataaactcagctcccatttccttagcacaatgtggtcctgaccaaaatttctgcttcgggccaggcgcagtggctcacgcctgtaatcccagcactttgggaggccaaggagggtgtatcacctgaggccaggagttcaagaccagcctggcgaacatggtgaaaccccatctctactaaaaatacaaaaattagccaggcgtggtggtgcacgcccgtagtcccaactacttgggaggctgaggcaggagaatcgctggaatccgggaggtggaggttgcagtgasctgagattacgctactgcactctagcctgggcgacagagcaagactctgtctcaaaaaataaaaataaaaataattttcttcttcatcccaatcccctctccttcctcctgccatgtgccccgtactctagcccagtgtttctcagtgtagtctgtggaccatcttcttcagaatcattcaggacatgattcctgggcacgagacctactgaatggaaaatgcaaattcctgtgctccagaactactgagccagctgttgctgrtacctcggaacctgcattttaatgataccggggctgatttttgtgtagaatacagtttaagaactactgctctgccaaaccagattgttgagtttcctgactgtatctgggtagtcacacctttctcacttcctgcattttgcagcctggtgcactctgcttctcctttaagcttcgtctcacacatcagctcttctgtgctgctttccccgaatccaggttgctttctctgtgtccacgtgatccattgcactttctacccacctctgctatagtatcttcttatgtcgtcagagctaattattggctccttcacttgtttgtgaactccctaaggaccatggatgtttcattttgaatccccagagcctagcaaaatacctggcagggagagggcatttaatgcatgttgctgaatgaatgaatgaatgaatgaatgaatgaagaatgaatggagaccaggtcatagtctaaatcagaaaagtagattaaggccaggcatggtggctcacgcctgtaatcccagcactttgggagaccaaggcgggagaatggtttgagcctaggagtttgagaccaacctgggcaacatagtgagacctcatccctacagaaaataaaaaaaggccgggcacagtggctcacacctgtaatcccagcactttgggagactgaggcaggcggatcaagaggtgaagagatcgagaccatcctggccaacatggtgaaatcccatctctactaaaaatacaaaaattagctgggcatggtggggcgtgcctgtaatcccagctactcaggaggccgaggcaggagaatcgcttgaacccaggtggtggaggttgcagtaagccgggatcgtgccactgtgctccagcctggcaacagagcgagactttgtcccccccccaaaaaaaaaaaaattagatgggcatggtggcacctgcctgtagtcccagctactcaggaggctgaggtgggaggatcgctgaaacccaggaagtcaaggttgcagtgagctgtgattgtgccactgcactccaccctgggcaacagagcaagaccctgtctcaacaaaaaaaaaaaaaaaaaaaaggaaaagtagattaaacccattatgtagtggacagagccacatttatcaggcagactcctgcttcacagtttcagtctaactttttctaaatgtttgatcttttcttgaggaagctatgggtttacactgtggcaaaagtagttaggtaagttatgagctaggactaagaaatattttttaaaatcccaatgtgtttgtgtgggaggccaagaaacagctttctcttgatctgtctctgaggatagatcctaccagactttttctccaccctagacctgttcccgaggattatccatttcagaattcttgaccttctaactctagtgacgtaactgcctcagtcaggcacgccctggaccttgtcatgattgtccagctcagaaatgccaacaaactggtctctggccggaacttccttgccatcggtttactcccttcccctactcccagctccctgtatctctttcccaaaccccagcccatgagtgcctcctttcttcattcttgtccacagggtggtgctcctcttgctgtctgaggccagtccctcagtgtgtgctggattccatccttcccaattcctcggcgctcggctccatcctcagcagcacacttccctccatcctcactctctcctttctggcttttccttccatacataaacagtcaagcttctctcacctcagaaaggtacctctctctagctataagccagtcttggaagttcacttcacagcagagcttatcaaaagagcaggccctgtttgctacccactcacccttaactccatttctggccccacctctccagttgttcttcccaaggccacagcaacctcctaattgcacaatctagcaagtagctttttgtttgtttctttgtttgtttgtttttgagatggaatttcactcttgttgcccaggctggagtgcaatggcacgatctcggttcactgcagcctcagcctcccgggttcaagcaattctcctgcctcagcctctcaagtagctgggactacaggcgcccgccaccatgcccagataattttgtgtatattttttagtagagacagggtttcaccatgttggccaggctggtcttgaacttctagcctcaggtgatccgcctgcctgggcctcccaaagtgctgggattacaggcgtgagccaccgcacccggctgcaggtagttttcaattgctattttgcttgcactttgtgtggcatttgacactatgaactactcctgtcttctggaacctctgttgttcttttgttcttccttcgtttgcaaagcactctctttgttccttttttttttttttgagacggagtctcactctgtcacccaggctggaaggtagtggtgcaatcttagctcatagcaacttctgcctcccaggttcaaatgattctcatgcctcagcctcccgagtagctgggactacaagtgcccaccaccaatcctggctactttttgtatttttagtagagatgggttttcgccatgttggccaggctggtcttgaactcctgaccttaggtgatctatctgtctgctttggcctctcaaagtgttgggattacaggcgtaaaaaaaagactgcacccagtcttttttttttagagacagggcctggccgggcctggtggctcacgcccgtaatcccgacactttgggaggccgaggtgggcggatcacgaggtcaggaggtcgagaccaacctggctaatacggtgaaacctcgtctctactaaaaatacaaaaaattagctgggcgtggtggtggggacctgtagtcccagctacttgggaggctgaagcaggagaatggcgtgaacccgggaagcggagcttgcagtgagctgagattgcgccactgcactccagcctgggcgacagagagagactccatctcaaaaaaaaaaaaaaaaaaaaaagagacagggcctgattctgtcatctaggctggagtgcagtggtgtgatcttagctcactgtagccttgaactcctgagctcaagcaatccttctgcttgagcctcctgagtagctgaaactacagacatgcaccaccatgcttggctaattaaaaacaaaaagattctttggtggagacggggttttgttatattgcccaggctaatcttgaactcctggcctcaagtgatcctcccgactcaccctcctaaagctctgaaactgcaagcatgagccaccgtgcctgacccatctactaccttctttgtggcgtcttgttcctattcccaaatgtcagcagtccatacttttccttgtttagttcttttatcgtcttttatttgctttgtctgctatagcttgtagaatctaatgcttaccacttactgtggaagacatctaacatctgtgaatcttaataaaatggggattgtcatgaaaaatacaatttatgcacataaagggcccagcaaagcccctggcataacgtagaggctcactaaatggcagtaatttgtattattatcattaataataaaataatgtctcagtctccagcctataggtttatatctttattattattttaaacactttttattatggtgaattttgaacagaattgcatcatgaatttccatgtacttatgatccagccccaataaccatcaacccataaccaatcctgccccattcaccccatcctctataaaaaggtacaaactttaaaaaaaaaaaacccacaatactattatcatactttaaaaatccaatcatttggcctggcgcggtggctcacgcctgtaatcccagcactttgggaggcagaagcgggcggatcacgaggtcaggagatcgagaccatcctggctaacatgatgaaaccccgtctctactaaaaaaaatacaaaaaaattagccaggcgtggtggcgggcgcctgtagtcccagctactcaggaggctgaggcaggagaatggtgtgaacccgggaggcagagcttgcagtgagccgagatggtgccactgcactccagcctgggcaacagagcgagactccatctcaaacaaacaaacaaaaatccaatcatttgcaatccaggtggtatatctgattcctttgagatattgccacctggatgtttcccaggcacttcaaactcaacgtgtccaaagctgaactcatcaccttctcagaattctgttcttccctgctcccttgtggtccctgtcttagtgatggacacccctgttgcccagtccctcaagtcagaaccctgggagtagcccttggctcctcgttcttcctcacactgcatccagccagtccctgaaaaactctagtatctcttccctgcagctctcctgccggtgtctaatagtacaggcccttgtcaggtctctgcctctgggcattggctctctaactgatgtgcctctattgagtcttttacttctctaaatctgttaacactcttgccaattatttttctccaaggattatgttttgttttgttttttcacttttttgtagagatggggtcttgctatgttgcccaggctggtctctaattcctggactcaagtgatcctcccaccttggcctctcaaagtgttgggattacaggtgtgagccaccatgcccagctgaccatttttttattgcggtaaaatagacataacaaaatttattatttaatcattttaaagtgtacacttcagttcacattgttgtgcaaccattatcaccatctatctacagatcctttttttttttttttttgagatggagtctygctctgtcrcccaggctggagtgcgtagcgcaatctcggctcactgcaagctccacctcccaggttcacgccattctcctgcctccgcctctcaagtagctgggacaacaggtgcccgccaccacgcctggctaatttgttaatttttagtagagatggggtttcaccatgttagccaggatggtcttgatctcctgacctcatgatctgcccgcctcggcctcccaaagtgctgggattacaggcgtgagccactgcacccggcctctacagatccctttcatcttcacaaactgaagctctatcagagcttcagaaagtctccattcctcctcccccagcccctggcaactgctgtcatctactttctttttgttgttgtttgtttttgagatggagtttcattcttcttgcccaggctggagtgcagtggtgcagtcttggctcactgtaacctccgcctccagggttcaaacaattctcctgcctcagtttcccaagtagctggcattacaggcacccaccaccactcccagctagttttttttgtattttagtagagatggggtttcaccatgttggccaggctactctcgaattcctgaccttaggtgatctgcctgcctcagcctcccaaagtgctgggattacaggtgtgagcaactgcacccagctccatcatctgctttctatctccatacatttgactgctctaggtacctcatgtaagcagagctatacaggatgcatccttttgttactgggttatttcacttagcataatgtcttcaaggtttagaatatccttcctttttaaggctgaataatccagcggtttgggtgtgtatgtatatgtcaaattttgtttatccattcatctgctgatgggcacttgagttgcttctaccttttggctatcatgaataatgctgttaggaacataagtatacagtgtctcttcaagaccctgctttctttgtttttttttgtttttgtttttgtttttgtttttgagacagagtcttgctctgttgcccaggctggagtgcagtggtgcaatcttggctcactgcaacctccacctcctggatccaagtgtttctcctgcctcagccccccaagtagctgggactacaggcatgcaccaccacagctggctaattttttttttttttttgtatttttagtagagacaggatttcaccatgttggtcaggctggtctcgaactcctgatctcagatgatccacctgcctcagcctcccaaagtattggaattacaggcgtgagccaccatgccaggccaagaccctgctttctttttgggatgtgtccagaagtggaattgctggatcatatggcaattttatttttaattttttgaggagccaccatacacagtggtttgtaccgctttacattcccaccagcactatgcagggatccagttcctctacatccttatcaacacttgttattttgtttttttttgttgttgtttgtctttaaaatagccatcatactgcatgtgaggcgacactgtatcttgtggttttcatttgcatttccctaatgattactgatgttgaacatcttttcatgtgcttattggccatttgtatatcttatttggagaaatgtctaaactaaggactttggcaatttttttttttttttgagatggagtcttgctctgtcacccagactggagtgcactggtgcgatctcagctcactgcaacctctgcctcccatgttcaagctattctgctgcctcagcttcctgagtagctgggactacaggcatgcgccaccacgcctgtctaatttttgtatttttagtagagatgggttttcgccgtgttggccaggctggtctagaactcctgagctcaggtgattcacctgccccagcctcccaaagtgctgggatcataggtgtgaggcaccgcacctggccgacattgcccatttttaaattgggctgttcggttttttttttatttttgtaggggtcctctatgtattctggatattagcccttatcagatatatgatttgcaaatattttctcccattatgtgagttgcccttttattctgttgatagtatactttgatgtccaaaagtccttaagtttttatatagcctattttgcctgtttttttctgttgttacctatgtttttggtgtcatatcctccagtaatcaatctttctttttattttattttatttttttgagacagggtctcactctgttgcccaggctggagtgcagtggcacgatcatggctcactgcagctccacctccccaggctcaggtgatcctcccacctcagcctccctagtagctaggactacaggggcatgccacaacacccagctaatttttgtactttttgtagagatgggatttcatcatgttgccccttttttttgaactcccaagctcaagcgatctgcctgtctcaacctcccaaagtgctggccgcaataggcatgagtcaccatgcccaacctccaataatcttttaaatacacacttgtatatagttgatcctttcactgtcctctttgtaatcctggaatgcttctttcttttaaacttcttaacctgaacgacctggtctccatacttcctcagtctcatctctcactaacaaggtaatccgttgtcattctgaatttcctgcacagctgcaagcattcaccttgctctccgaagtcacctttccacttgctaggcccacttcctccctaccttgctgttcactaaactaagttccactcaacctttaaagcttccttcaagtacttcctcctctgggaggcttctttggctgttccacaagttaagtgccttccttggtaacctttaatttaatttaatttaatttaatttatttatttatttttgagacagagtcttgctctgtcgcccaagctggagtgcagtggtgcaatgttggctcactgcaacctccgcctcccgggttcaaacaattctctgcctcagcctcccgagtggctgggattacagctacccgccaccatgcctggctaatttttgtatttttagtagagatggggtttcaccatcttggccaggctggtcttgaactcctgactttgtgatccacctgcctcggcctcccaaagtgttgggtttacacccagccaacctttaattttatggtaacccttatcagattgtgttttaattgttggctcaccggcttcctgtccctcccactagactctacattccttaagggcagggttactattcctatcttgtcatctgcatgctgctcaaacaattgaactcgatctctgccactatttagttgctttgacattcagcaaactagtcaaactctctgggcctcagttttctcataggatcattgtgaaaattaattaagattgtgtttgtaaagtgcttagtgcttactctggatcagagtaaaatgcccaacaaaaattagccattgcttccatcagcttgttgaattgagatctcaaactctaatcagctgtatgactttagacaaaaatcttaagttcctaaggcctgtttttccttctccctggatcacctagagtcgtgattcccaaagtaggctacactttgtaatcacctggggagctttaagaatgctaatattggccagacgcggtggctctcacctgtaatcccagcactttgggaggttgaggcaggtggattatgaggtcaacagatcgagaccatcctggtcaacaatggtgaaaccccgtctctactaaaaatacaaaaattagcttggtgtggtggctcatgactataatcccagcactttgggaggacaaggcaagcggatcacaaagtcaggagtttgagaccrgcctgaccaatatagtgaaacgaaaatacaaaaatacaaaaactacgaaaaattcaaaaaattatccgagtatggtggtgggcgcctgtagtcccagctacttgggaggctgaggcaggggaattggttgaacccagaggtggaggttgcagtgagcagaaatcgtgcctctgtactccagcctgggtgacagagcaagactctgtctcaaaaaaaaaaaaaaaaaaagctaatatctgggtccctctgctaaaaattctgacttaattggtgtgaggtacaacttgggcatgggcattttgcagaggctcccctggtgattctaatgttcagccagaattgagaaacaccaatctaaagtttctttctaatgtaacacactagaaagttgagctgcagaattccgtggacgcaggggaatggaatgtctctgggcattcttctgctatcaccctttgttagtttaacaggaagcattattgaacaagctcactaagctggaattccaagagtatttgtggattcctgagtgtttaaatttagcagctcacttcatccaggagaaacctggggaccagtgctctgagaaagagaaaacaatggttcttccctactctacagctctaacccaaggcctgggagtctagataccctggagttctgtattatggttaaaggaaagggaggaggaaagagtccttggtaatcggtataatccttttttttttccccaagggacagagtcctgctctgtcgcccaggctggaatacagtggtgcaatcatagctcactgaaaccttgaactcctccttcagcctcctgagcagctagacctacatatacgtgctaccacgcctggctaatcttttttctttttttaatgtttgtaccaatgggggtctcactatgttgcccaggctagctggaaatcctggcctcaagtgatcctcccaccttggcctcccaaagtgctgggattacaggcgtgagccattgtgcctggccccttgctataatcgtagtgggggcacctggggccctgactagaacagggtaggggctgagatttacaaatattcattcccttatcactgtactgtgctttaaaaccacattcacagccattacttgagtctccgcataatcttgagaaatgcagagcagatattactgcctctactttgtggataagcaaaccaagtctgaatggttaagggccttgccaaaagtcacagtgcattaacacgaagggtcagcatagagtccctatatcctgactctctgttgggggcagaaaaactcttcacacccaggtagctcagagtccttcttggcttcttggacttggagtcaaggttctaagtggtcccattaaatgctacagggaatgactaaaatacctcttcctggccgggcgcagtggctcacgcctgtaatcccagcactttgggaggccgaggcgggcggatcacgaggtcaggagatagagaccatcctggctaacatggtgaagccctgtctctactaaaaatmcaaaaaaaaaaaaaaaaaaaaaattagccgggcatggtggcaggcgcctgtagtcccagctactcgggaggctgaggcaggagaatggcgggaacccgggaggcggagcttgcagtgagccgagattgcgccactgcactccagcctgggtgacagagcgagactccgtgtcataaataaataaataaatacctcttcctgatgccctgtggtcagccacctctgagcacagttgcactctctgggatcatgagcaaaaccctcacttttgcaaagtgtgatgctcagaccagctttgaggcttggtcattcagggaggcatttagttataatgcccagtgtgtccaggaatactcagaagggcccagtagtgttggccaaatgctgagtcacagataggggttggcccttggccactggctcaagatgaaatagaaaaaaaaaaaaatcaggaaattatcttttactaagctaaatgtgattaaactcctgtcttattctgagattatgttctttctacttttttggtattaaaattaccttttggatgggcacggtggctcactcctgtaatcccagcactttgggaggctgaggcgggtggatcacctgaggtcaggagttcaagaccagcctggccaacatggcgaaaccccgtctctactaaaaatacaaaaattacctgggcatggtggcaggcgcctataatcccagctacttgggaggctgaaacaggagaatcgcttgaacccgggagacagagatggcagtgagctgagatggtgccactgcactccagcctgggcaacagagctagactgcatctcaaaaaacaaacaaacaaaaaaattacctttcatgaattagtgctgacagtagatggcagtttattttgatgtgctgaatgccagagttaacagatggccatcctatgtaaatcctcaaaattgcttttgaaatgttactgatccaaggaatcccaattctgctaatcaactccccattttggaggaccaggagtaaggccctatgactccaggatcttcagggtcgtgggaggcctcaccttgagagcagcaatagaatattcaacactaaaagaatcaaaatgcccagagttgggccttgccactcataagttcatgtagaaagaaaagagccattgtcacatggtttgtgtgtgtgtgtgtgtgtgtgtgtgtgtgtgtgtgtgtgtttgagacggagttttgctcttgttgcccaggctggagtgcagtggtgtgatctcagctcactgcaacctctgcttcctaggttcaagcgattctcctgcctcagcctcctaagtggctgggattataggtgcgtgccaccacgcctagctaattttttgtattttgagtagagacagggtttcatcatgttggtcaggctggttgtgaactcctgaccccaggtgatccacctgcctcggcctcccaaagtgcagggattacaggcacgagccaccatgcccggcctttttgtgtatttgttgctgttttgaaatggagtcccactctgtcatccaggctgtagtgcagtggcccaatctcagctcactgcagcctcttgtctcttgggttcgattctcctgcctcagccccccaaatagctgggattacaggcatctgccaccacacctggctaatttttgtatttttagtagagacgaggtttcaccatgttggccaggctagtctcgaagctctgacctcaagtgatccgccctcctcggcctgccaaagtgctgggattacatgtgtgagccaccgcgcccagacacattggttttatttaacaaacattattatcttcacttccattttaaagatgaggaaactaagacacgagggtgttaagaaacttgcccaaggccacagctagttagcagcagagccaagagttgaagccagggagtctggctgtggaatccatgctcttaatcccttcactacactgcctggttggaagcaatttaagactttgtggcatgtaatggtctattttcagcctgtgattccaaagatggcaagtgcctgtggactaagccgcctgatctgtgttgagctactgtcagtgatccctttttgagccccctccacaacaccacttggaaaatcagaacaggtggacagccctttgacagtctggaaagacatcagcagcaaaagcaatgaactttgggtaaggttagcaagcccttgtagcttggaacctgagaggtcctttagagcctaggctggtagctttcaaaaacagttttaaaagcaaccaaacccttttttccaatatagacctattttcagctaatagtatacatagaaaataggtaagatatgtaacatgtatgtatatgtacatatatacatacacatatatccttaggtggaaccccttcataaaacagattaaagtggaggtgttgtgtggaagaactagggatccagttggccttattctcatccctcatgtaacactgagccactatctgggaccctagagctttgaggaacagtctgaagaccattgctccagaccagctttttctagggaagatattagtctcatagaatgtgttatggaaaaaaacaatttcatgttcaaatgcatctgggaaaccctggatgtgctaactttgttttgaggtttgcaactataggtatacctcagagatatcgtggattccattccagacaatcataataaagcaataaagtgagtcacatgatttttgtttcttagtccatataaaagctatgttattgtagtctattaagtgtgcaatagtttaattgtgtaatagcattatgtcttttaaaactataccttaatttaaaaatactttgttgctaaatagtgctaacaatcatctgagcctttaatctttttgctggtggagggtcttgctcgatgttgatggctgctgacttatcagaccagtggtttcgctcttgttgcccaggctggagtgcaatggctcgatctcggctcactgcaacctctgcctcccgggttcaagcaattttcctgcctcagcctcatgagtagctgggattacaggcacccaccactacatccagctaatttttgtatatttagtagagacagggtttcaccatgttgaccagtctgktcttgaacttctgacctcaggttatctacctgccttggcctcccaaagtgctggattacaggcatgagtcaccgcgcccagcccaagcttctttcaaaattggagtcaatcctctcaaaccctactgctttaccaactaagtttatgtaataatcttttttttttttttgagatggagtttcactctgtcacccagactggagtgccatggcacgatcttggctcactgtaacctctgcatcccgagttcaagcaattttcctgcgtcagcctcccgagtagctgggattatagctatgtgccaccacaccggctaaattttatatttttagtagagacagggtttcaccatgttggccaggctggtctcaaactcctgacctcaagtgatctgcctgccttggcccgccaaagtgctgggattacaggcatgtgccaaagccaccgtgcccagcataataaactttttaatgtaatattctcttttttttgagacaaagtcccactccgtcacctaggttggagtgcagtggcgccatctcggctcactgaaacttctgccttctgggctcaagtgatcctcccacttcagcctcctgagtagcttggacgacaggcatgcaccaccacacctggctaattttgatatattttgtagagatggagttttgccatgttgcctaggcttgtctcgaactcctgggctcaagcaatttgcctgcctcagcctcccaaagtgctgggattacaggtgtaagccaccaccccttggctagtttatgtaatattctaaatgctttgttaacatttccacaatgttcacagcatgttcaccaggaatagagtctatctcaagtaatcactttctttgcttgtccatatgaagcaactcctcatctattcaagttttattatgagattacagcaattcagtcacatctgaatcactccacttctaattctagttctgtttctatttcctcacatctgcagtaacttccttcactgaactcttgaatccctcaaagtcatccttgagggttgggatcaacttcttcccagcttctgttaatgttgatattttgacctcctcccatggagaatgaattttttttttttttaagacagcatcttgttctgtcacccaggctggagtgtagtggtatgatcttggctccctgcaacctctgtctctgccttctgggctgaagcaattctcttacttcagcttcctgagtagctgggactactggcatgtgccaccacacccagctaatttttatattttttgtagagacagggtttccctgtgttgcccaggttgtcttgaactcctgggctcaagtgatccgcctgccttggcctcccaaagtgctgggcatacaggaatgatatagtttggatctgtgttcctgcccaaatgtcatgttgaatggtaatccccaacatgggaggtgggaactgatgggaaataattgggccatggggtcggatttccccctttggtggtatgctcatgatagagttctcacgagatctggttttttaaaagtatgtaccacggccaggtgcggtggttcatgcctgtaatcccagcactttgggaggccgaggcgggcagatcacgaggtcaggagattgagaccatcctggctaacacggtgaaaccccatctctactaaaaatacaaaaaaattagctgggcgtggtggctggcacctgtggtcccagctacttgggaggctgaggcaggagaatggcgtgaagccaggaagtggagcttgccatgagccaagatcacacctctgcactccagcctgggcgacagagcaagactctgtctcaaaacaaaaacgaaaacaaaaaaatgtgtgtaccacttccggctgggcgcagtggctcacgcctgtaatcccagcactttgggaggccgaggcaggtggatcacgaggtcaggagctcaagaccagcctggccaagatggtgaaaacccatctctactaaaaatacaaaaattagctgagcttggtgacaggtgcctgtaatcccagctacttgggagggtgaggcaggagaattgcttgaacccaggcagcagaggttgcagtgagccgagatcatgccattgcactccagcttgggcaacaaggtgagactccgtctcaaaaaagaaaaaaaaaattgtgtaccacttcccccgatctcttcctcttgctccagccacgtaagacatgcctgcttcccttttgccttccaccatgatttaaagtttcctgaggcctcccagaaggcttcatgctcctgtacaggctgcagaaccgtgagccaattaaacttcttttctttataaattacccaatctcatgtatttctttatagcagggtgagaacagactaatacagaaaattggtactgggagtgtggcattgctataaagatacttgaaaatgtgggagcggcttgagaactggataaggggcagaagttagaacagcctggaaggctcagaagaagacaggaagatgagaaaaaagttggaacttcctagaaactggttaaatggttgttaccaaaatgctgatattgagctggacaatgaagtccaggctgaggaggtctcagatggaaatgaggaacttattggaaactggagcaaaggtcacttttgttatgtgttagcaaagaggttgcaggcattgtgcccctgtcctaggggtctgtggaactttgaacttgagagtgatgatttagggtatctggtggggaaatttctcagcagcaaagcattcaagaagtgacctggctgcttctgactacctatgttcatatgcatgagcaaagaaatgacataaaactggaacttgtatttaaaagggaagcagaaggtaaaagtttggaaaatttgcagccaggcccacatagaaaggaaaaaccatgcctgtcgtccaagctactcaggaggctgaagtgggaggatcgcttgagcccagaaggcagaagtttcagtgagccgagatggcgccactgcactccaacctaggcgacagagtgggactttgtctcaaaattcaagctcactacacaaatttgcttaagtaaagaggagccaaatgctgatagccaagacaatgggaaaaaggcctcaaaggcatctcagaaacctttgcggcagcccctstcatcacaggccttggggcctaggagggaagaatggctttgtgggccaggcccagggctttgtcaccctgtacagcctcaggacactgctccctgcatcctagccactccagctccagctgtggctaaaagtggctgtagctccagccactgctccagaaggtgcaagccataagccttggcagcttccatgtaatgctaagcctactggtgcacagagtacaagagttgaggtttgggagcctctgcctagatttcagaggatttgtggaaaagccttgatgtccaagcagaagcctgctgtagaggtggagccttatggagaacctctactagggcagtggagcccctacacagaatccccattgggcactgcttaatggagctgtgagaagaggaccaccatccttcagaccccagaatggtagattcactggcagcttgcaccctccacctagaagagctgtaggcactcaattccagcctatgaaagccaccatgggggctgtaccctggaaagcctcaggggtggagttgcccaaggccttgggagcccacccatagcaccagtgtgcactagatgtgagacatggagtcaaaggaaattattttggagttttaagattcagctgggcacagtggctcatgcctgtaatcccagcactttgggaggccaaggtgggcggatcatgaggtcaggagttcgagaccagcctggccaatatggtgaatacaaaaatattctactaaaaatacaaaaattagccaggcacttgctagtggcggcacttgcctgtagtcccagctacttgggaggctgagacagaagaattgcttgaatccaggaggcagaggttgaagtgagatgagattgtgccactgcactccatgcactccagcctgggtgacagagcaagactccatctcaaaaaaaaaaaaaagatttaatgactgccctgctgggtttcaaacttgcatggggcctgtagcctctttcttttggccaatttttcccttttggaatgggaatatttacccaatgcctgtaccctcattgtatcttgggagtaactaacctgttttttattttataggctcacaggcagaagggacttgccttgtctcagatgagatttgggactgtggacttttgagttaatgctggaatgacttaagactttgggggccattgagaatgcatgattgtattttgaaatgtgaggacacgagatttggataaggccaggtgcagaatggtatggtttggatctgtctccccacccaaatctcatgtcaagttataatctgcagtgttggaggtagggcttggtgggaggtgattggattaggggagtggattttcccctttggtgctgttctcatgagacctggttgtttaacagtgtgtagctgtattagtcctctctcacattgctataaagaactatccgagactgggtaatttctgaagaaaagaggtttaattgactcacagttctgcaggctgtacaggaagcatggctgaggaggccttaggaaacttacaatcatggcagaaggtgaaggggaagcaggcacatcttcacatggtagagcaggagagagaaagtgaaggggaaagtgctacacacttttaaacaatcagatctcatgagaactatcatgaggacagcaagggggatgtcttcccccatgatccaagtagctaggattacaggcatgcaccaccatgcctggttaattattattattatttttttgaggtggagtttcgttcttgttgcccagcctggagtgtgatggcgcagtctcagctcactgcaacctctgtcttctgggttcaaatgattctcctgcctcagcctcccgaatagctgggattacaggcacccaccaccacatctggctaattttttttttgagacagagtcttgccctgttgccaggctggagtgcagtggcgtgatcttggctcactgtaacctccgcctcctgggttcaagcgattctcctgcttcagcctcccaagtagctgggattacaagtgcacaccaccatgcccagctaatttttgtatttttagtagaaactgggtttcaccatgttggccaggatggtcttgatctcctgacatcatgatccatccgccttggcctcccaaagtgctgggattacaggcgtgagccaccacgcctggcctgtctggctaattttttgtattttctgtagtgatggagtttcaccatattggccaggctggtcttgaattcctgacctcaggtgatccacccacctcggcttcccaaagtgctgggattacaggcataagccaccatgccaggccatagtttaaaaaaaaaatgaataaattcatacaatggaatactacagagcaatgaaaatatacgattgctacacttcttacaaatataatgttaagtgaaagaagccagacagaacctgggaggcagaggttacagtgagccaagattgtgccattgcactccagcctgcgcaacaagagcagaactccttaaaaaaaaagaaaaaaagaaagaagccagacaaacgcatgcatactctatgagtctatttatataaaattcaaaaacaggcaaaaaacccacatctttggaactggaaatcagactagtgattattcatgactagtctgaatgattagtagtaggaggtgaagcattatctgggaagagtcatgtggtgagttttgaagcttctgattgtatttttttgttgttgtttatttattttttgatacagggtcttgctttgtaatccaggctggagaacagtggccaaatattggcttgctgcagccttgacctcctaggctcaagccatcctcccacctcagcctctggagcagctgggactacaggcatgaggcatcataactggctaatttttaaaaattttattttttgtagagacaaggtctcactatgtggcccaggctggtctagaactcctgggctcaaacaaccctccccactcagcctcctgaagtactgatattatgggaataagccatggcatccagccaggttttattttatatcatgatttgggtggtggttacatagacgtgtttattttgtgaaaataatatatgcatttttcttctttctttctttgtctttttctttcctctttttttcttccttttttttttttttttctttcagagtcctgctctgtcacccaggttggaaatgcagtggcatgatcatggctcactgcagtcttgacctccaggcctcaagggatcctcccagctcagcttcccaagtagttgagactataggcctgtaccaccacaccaggctaattttttgtaacatttttctgtgtgtgtgtgtgtgtgtgtgtgtgtgtgtgtrtatatatatatatctataatatacatacacacataatatatatatattctaaatatatatagaatatatatattctaaatatatatagaatatatatagaatatatatataktatatatrtatatatattctatatatatagaatatatatatattctatatatatagaatatatatgtgtatatatatattctatatatatagaatatatatgtgtatatatatattctatatatatagaatatatatgtgtatatatatattctatatatatatagaawatatatatgtgtatatatatattctaaaccaaaaataaatttctaagcctctcatctgactgagtgggcccctcctcttggtcatggtgattccaaagtaaacctgaaaactagttcaagccttgatgggaagggaaggatccaacatgcctcattatactctcctttatctggaattcaggcacaactaaccaacattaacattaaaatagagatcttaagagtgacaaaacagactctttgtagcaataagataccatattctaactagactctagtatagcatcacatgagagatagcaggccctgaaagaagttaaagtatcttaccccaaaatatacttctttgacatattttgacatggccctgaagagttgtctccaatggagaaaatctacattctgtacagaatctcctttcctttccagttttttttcctgatccaggagagattagctgagaatatagcaccttttaaaagtctgattagatagcatttgccatctactgcttctaagggcaaccacctatgaaacttcatctacataataagaacctttgtctgcacgacactatatatatatatatatatatatatatatactttttttttttttttgagacggagtcttgctctgtcgcccaggctggagtgcagtggcgctatcttggctcactgcaagctctgcctcctgggttcatgccattctcctgccttaccctcctgagtggctgggattacaggcacccgccaccacacctggctaattttttgtatttttagtagagacggggtttcagtgttagctaggatggtctcaatctcctcacctcgtgatccacctgccttggcctcccaaagtgctgggattgcaggcatgagccactacgcctggccacaaccccatattttaactcagatactgctttcattgattctaggtctttagataataacttttttttttttttttgagatggagtcttgctctgttgcccaggctggagtgcaatggcattgtcttggctcactgcaacctctgcctcctgggttcaagcaattctcctgcctcagcctcccgagtagctgggattataggcctgtgccaccatacccagctaatttttgtatttttagtagagacacgatttcatcatgttggccaggctggtcttgaactcctgacctcaagtgatctgcctgcttcagcctcccaaagtgctgggattacaggcatgagccaccatgcctggccattaacttttaattctttcaaccaattgccaattaggaaatctttggatctgcctatgacctggaagcccttgcttcaagttgtcctgcctttccagaccaagccagtgtataccatacatacattgattgatgtctggctgttacttctgtccccctaaaatgtgtaaaccaaaaataaaattctaagctccccagccaactgaatggatccctcctcctggccaagggggttttaaagtagacctaacaagctagttcaggccatgatgtgaagtggtggtttggacatgcctcattatactcttccctttggaattcaggcacaaccgaccagcattaacattaaaacagagatcttgagtgacaaaacagactctgtagcactaagatatcaaattccaacctgactctagtatagcatcacatgatagatagcagtccctgaaagaaattattttacccaaaaacatgtttctttgacatattttgaaatggccctgcaaagttgtctcttttgggggaaaatatatacattctgtagagaatccctttccttttccaggtctttttctgatccaggagggattaagagtctggtacttttttgggtcagataagagacatttaccttctagtctctctgctacctgctacctggaggcttcatctacataataagaaccttggtttccacaaccccttattttaacccagacactcctttctattgattctgggcttttaaatagtaacaacttaattctttcaactaattatcagtcagaaaattttttgaatccacctatgacctggaaccccccacccctgcctcactttgaattgtcctgccttattggaccaaaccaatatatatctttttttcccccatgtggaaataatatgaaacattttttagatatactggacaaaaacagaactaagtactccaactctactgcagcattaccaaaaaaaatcatcctttcaccacagtktaagatttaagggcaacctgcccaaggatacatgttatataaaacacagcaagattgctgctgccctgccaagtaattccagtccctacctaggtcctactgaaatactggtggtcccaattagcttttttttttttttttgagacaaagtcttgctctgttgcgcaggctggagtgcagtggtgcaatctcagctcactgcaarcgtcgcctcccgggttcatgccattctcctgcctcagcctcccgagtagctgggactacaggcacccgccactatgccaggctaatttttttgtatttttagtagagatggggtttcaccatgttagccaggatggtctcgatctcctgacctcatgatctgcccgcctcagcctcccaaagtgctgggattacaggtgtgagccaccacacccagccccaattagttttattgaaataaatctttttttgttttttgagacagagtctcactctgtcacccaggctggagtgcagtggcgtgatcttggctcactgcaagctctgcctcccaggttcacaccattctcctgcctcagcctcccgagtagctggggccacaggcgcccatcaccatgcccgcctaattttttatatttttagtagagacagggtttcaccgtgttagccacgatggtctcgatctcctggccttgtgatccacccaccttggcctcccaaagtgctgggattataggcatgagccaccgcgcccggcttgaaataaatctttaaagaaaaagataaagcatttaaaaagacaagtcaaagtacttcaggaaccacatatccaacacaagctttttcctcaaatgagttatgtttgcctcgcagtaataaacttttatttcactcaaattacagcaataatcttccatacataagtatctttgctgcccaataattcaaaggaaaaaaaatccaaaatgattagtaaagaaaattgtgagaattaacagaccctttaaatttgttttaaatatttttgaggtttaaaaagtgcttaaagtttgccctagtaggaaaacattatctgaatgaataccctaatggcaaaccactgtaaaatgcttctgctacatttgggggacaggggtagggattatcttcaaagcaccccagctctcttgatgagaaggtcagaggtacactggtttgtatcattgcaacatccataaggtgatgtaggttgcttttccttcagaaaaggctttatcagaaaggcattaatcttgacctccaaatttggctgacaatttactgataagattcataacctttgtgttgctctggtattttgacatatttgctgggttctgagccacatcctggaaggccaccataacttctggatcctgcatggctgcaagaacctctggatcactaagaatttcattgagtccaggcattccrgccgttccaggcatgccccctcccattccaggcattcctcagggaaaattaccaggcattcccccaggaaagccacctggaaaagagccatactgagctcctgactgttgtctggcttctttctccctctgggctctctcatgttcttctcaagccttcttaacttttctatgctttctttgatctcttgctcttcacgttttcgctcatactttctctgatgttctgcaattttctgtgccctaggttgaacttctttcagcattacactagcatcttcatcataatccaatttacaggcaagggcaagatcatgggctgcttcttcccagtggcctagaagtctgtgtgctttctctcatcacttgtaaggctgagctgaatcaggatttatttcaatggctctgtcacagtctcggatggcagcatttggcttctgtaatttgatgaagacactggccctcttagcatacaaaatagccaagcaaggattcagcttgatggcatctgtgaataaatcaatggatttccgcagttcaccatcatttagggcttcaatagcagccactttcttatcatttgcctgatccatcatcacctctgttatcccatttcttgagggacatcagtgtctggttcaatcacaccttaattatcaatttctagctcactttccttacttgatgttttgtctgcctttaagtcttcctctaccttcctactatcaagtttttcttctttggtattttcttctgatttagctttctgagtagtaggtggtactttacccctgtgctctccacccactccctcaggaatctcatttcctcggtgtgcggaatgctcagatcctgcttacaaattttcacaaaggcccaaaactcgttcactttgcaggggtccatggtcaggaggcagtatgcgaagctgaggggctgcagcccagttccaggcccagatgctggcttggtgtgaccacgcagaagggccaaaccaatgtatatctaaatgtactgactgatgtctacctgtaatttctgatctcctaaaataaataaaatcaagctgcaacccaaccacctggggcacatgttctcaggacctcctgaggctgtgtcatgggtcatggtcctcacatttggctcagaataaatctcttcaaatattttatggagtttagtttttttgttttgttttgttttgtttttcctttgagacagagtctcgctctgtcagccaggctgaagtgcaatggcactctcgagtagctgggattacaggtgcgtaccaccatatccagctaatttttgtatttttagtagagacagggtttcaccatattggccaggatggtcttgaactcctgacttcatgtgatccacccacctcagcctccaaaagtgctgggattacaggcatgagccaccaggcctggcctgaatttggcttttttcatcaacaatattattcttcattttaagaaaaagagaaaatggcaacattgaagaacccaaaacagtacatgaatttcgcttatcaagatacaattttttttttaaatcctgcaggtttcctcaaccaggttatatggtccaaaggcaagtctcctggaaaactaatagaatgaaacagagggctttttctggaccaccactaaagaaagggtagtatgggcgggcgcggtggctcacgcctgtaatcccagcactttgggaggctgaggcaggcagatcacgaggtcaggagatcgagaccatcctggctgacacggtgaaaccctgtctcttctaaaaatacaaaaaattagccgggcgtagtggcgggcgcctgtagtcccagctacttgggaggctgaggcaggagaatggcgtgaacccgggaggtggagcttgcagtgagccgagatcccgccactgcactccagcctgggcaacagagcgagactccgtctcaaaaaaaaaaaaaaaaaaaaaaaaaaaagccaggcgtggtggctggcgcctgtagtccagctgctcgggaggctgaggcaggagaatggtgtgaacccgggaggcagagcttgcagtgagccgagatcgcgccaccgcacttcagcctgggcaacagagtgagactccacctcaaaaaaaaaaaaaaaaaagaaagggtagtatggcactgaacatggaggcctacatttgtttgactctctagtctgtatctctttctacccttttgtcctaatcctctgtgtattagtttcctactgctgctgtaacaaattatcatagatttagtggcttaaaataacacaaatgtactatcttacagttctggaagtcagaagtctgaagtgggcttcaatgagctgaaatcaggaagtcagcagggctgcattccttctggagactctggggagcaatcagttttcttgtgtcttccagcctctagaagcctcctgcattccttggtttgcagtcttctctcatcttcctagcttgcagtggcaggtcagatctttctcacatgcatcacttggaccctgactctctcttttccactttcccattttaggatccttggatctacctggaaaatgcaggctcttcttcctatttaatatcatctagttagcatagttaatttcatctgcagacttaactctcttttgccacgtaattgtaacataatcacaggtcctggggattaggccattattctgcttaccatgctgctaaggttagatgcagatcctagtactttacccatcctttttcttataagcatggatggctagtatctgaccaaagaattagttgaaatgaacttttttgtgtttggtgaaagtaaaagttataaattcaactacttgccactcaaatgaaagaagattaatttatgctgaacccaagatgactcttgttacaacaggagtgctctaggtgtcaggtaagggaggaccctagtatctcacgcttccgtgtcaagagaccaccaaacaggctttgtgtgagcaataaagctgtttatttcacctgggtgcaggtgggctgagtccgaaaaaggagtcggcaaggaagataggggtggggccgttttaaaggatttgggtgggtagtggaaaattacagtcaaagggggtttttctcttgtgggcaggggcggtggtcacaaagtgctcggtgggggagtttccgagccaggagaaggaatttcacaaggttaatcactcagttaaggtggggcaggaacaaattacaatggtagaatgtcatcagttaaggcaggaactggccattttcacttcttttgtgattcttcacttgcttcaggccatctggatgtatatgtgcaggtcacaggggataagatggcttagcttgggctcggaggcctgacattcctgttttcttatattaataagaaaaaaccataaaataatgttgaagtgttggggcagagaaaatttgggggggtggtatggagagataattggcaatgtttctcagggctgcttcgagcgggattaggagtggcgtgggaatctagagtgggagagattaagctgaaggaagattttatggtaagaggtgatattgtggggttgttagaaggagcatttgtcatatagaatgattggtgatggcctggatacagttttggatgaattgagaaactaaacggaagacacaaggtccgaataagagaaggaaaaaaacaggtattaaaggactaagaattgggaggacccaggacatccaattagagagtgcccaaggggttcagtgtaattacttgcttgcttggtgagtttttgggctctatccttgagattttttatgttgtcatacaccaggacagattgatttaggtaaaaacaacactcttcatttaaaaatatagagtcctgtttttttagcagtgagtaagtcgaggcctcggtgatttcacaggaaagagaaatgcaaagccagcaattgtttgttaaagaaggattagaaatggctaggagagagtggagtgagattgatagcatggtggagatagctagggagaggtagagggtggcgtaagaacaggaacgagaaaaagagtgagtataaaagtaaagaataggacttcttcagggtggaagtatcagtgtgccctgtcagcaaagatcacccatccactccaagagggagtcaagagtggcagactggggatagtatcaggagatatccgctacgatgatttggaggaaaagtgtaaaccggcagtataaacaagggcagggcatttacaagtagttgagaatggtgaataggagtatgactagacggaagatagtaaggatgacaaatttttggggtgcagtccaagtagtgggggtgactgtgtaaagccctgttataaagagtatggtaaggaaggtgagacctaataaaaatgaaaggatgtattagccttataagggttactattatcctttaggaatgcaggtgagtttaagggaagtaggagagagtacatgtaactcccaggaggaagatgagagatcaggctggctgtccgatggacacagctttattctggatcagtgaacctaatggggagggccctgcaggcagacggcagttggggtactatagatgactaagtagggtctggcccctcaaggttgtagagtttgaggggtcagattcttaacaagaactgatcgtccagctagggtgtcttcatatggctgggaatctggagtaggcaagagaagattagcagcctggcaaatttcctgtctagcctgctggaggactggaagataatcacctagagggctggtgtctggaatgagactggggcctaataaaaagtagcatccatacagaagctcaaatgggctgtactctgtggcatcttgaggacaggcctgaattctgagaagggcaagtggtaaaagtactgttcagtccttttttttttttttgagacagagtctcacttgtgtcccaggcagtggcgtgatctcagctcactgcaagctctgcctcccaggttcccgccattctcctgcctcagcctcccgagtagctgggactrcaggggcctgccaccatgcctggctaattttttttgtattttttagtagagacagggtttcaccatgttagccaggatgtcctgacctcgtgatccgcccacctcggcctcccaaagtgctgggattaaaggggtgagccaccgcgcccggcctcagtcctttttaagttggaggctgagtatggtgaggtgtgtctttaaaagaccattagttctttctacctttcctgaggattgagggcaataaggagcatgaagtttccattgaatgccyagggactgggagactgcatgagtgacttgactaataaaggctggtccgttatcagactgtatagaggtaggaaggccaaattgaggaattctgtctgatagaagggaagaaatgatggcagtggccttctcagaccctgtgggaaaggcctctacccatccattacaagtgtctactcagaccaagaggtattttagtttcctgactcagggcatgtgaataaagtcaatttgccagtcctgggcaggggcaaatccctgagcttgatgtgtagggaagggagggggcctgaacaatccctgaggagtagcagaacagcagatggaacactgagaagtgatttccttaaggatagatttccatgatggaaaggaaatgagaggttctaagagacaggctagcagcttgtaacctacatggaagaggttatgaaatgacggcagattagaatgggcctgtgaggctggaaggagatattttccttggtccaagaaccatttgccttgtgtgggaagagattgataggtggaagtttcagtgggagagtaggtgggagtgatcgatgagaaggagaaaaactggctgtgagggatagaagttggaatgctagctgcttttttagctactttatcagcataagcattgccctgagcgatgggatctgatgccttttgagggcccttgcaatgaaggactccagcttcctttggaagtaaagtggccttgagaagagtttttattaaagagacattaatgatggaggacccttgcatagtgaggaaacctctttctgcccatataacagcatggtggtgcaggatatggaaggcatatttagcatcagtataaatattgatgcatagtccctttgcaagagtgagggctcgagttaaggcaatgagttcggcttgctgagaggtagtggagtggggcacagtggtagcctcaaggatagatgtggaagatactatagcatagcctgcctttgctggtgagtggcgattaggcctggtggaactgctatcaataaaccaagtgtgctcagggtgaggaacaggaaagaaggaaatatggggaaatcaagtgaatgtcaagtggatcagagagatacagtcatgggggtcaggtgtggcatccagaatgaggtgggaggccggattgaagtccaggccagtaacaatggtaattgtgggagactcaacaaagagtgagtatagctgaaggaactggggagcataaagtatatgcgtcagatttgaggaaaaaaatagattttggaagttatgagaactgtagagagtgagttgagcatagtttgtgattttgagggcctctaaaagtattaatgcagcagcagctgccacacacagatatgagtgctaggctaaaacagtaaggttacattgtttggacagaaaggctaacggtgtggtcccagcttttgtgtaagaattcttaccgcacagccctgtagtttggctgtgtgtaatgaaaagggttgggatgagttagggagagctagtgtgggacagtttttagggctgttttttaaggaatggaaaggggagtggggaaaggatttaggatttatggggtcagctaggtttccttttatgagtttatataatggtttagtcaggatggtaaaactaggtatccaaaggcagaagtacctaaccatgcctaggaaggaaaggagttgttgttttgtagaaggggttggggttttggagataagctggacatgatcagcagggagagcacatgtgtttttatgaagaattatgccgagataggtaatggatgaggaagaaatttgggctttggagggggatacacaatatccttttgagaatagatgttggaggagcagaagggtgtcctgttgggaagttttgtaggaggggctataaagtagaaagttgtcaaaatatttaataaggtgagaagcagatggatggaaaraaagtaaatcatgagaaaggactttactgaagtaatgggggctgtcggtgaagccttgcagcagtacagcccgggtaagttgctgagactgatgggtgtcagggtcagtctatgtgaaagcgaagagaggctgggatgaagggtgcaaagaaatagtaaagaaagcatgtttgagatgcagaacagaataatgggttgtggagggaggtattgaggataagacagtatatgggtttggcaccacggggtggataggcaaaacaatttggttgataaggtgcagatcctgaagtaacttgtaagacttgtcccgtttttggacaggtaaaatgtgggaattgtaagaagagtttataggttttagaagcccatgctgtagcaggtgagtgataacaggcttcaatccccttaaagcctgttgtgggataggatactggcgttcagtggggtaagggtgattagattttagtgggatagtagtgggtgtgtgatcggttgccagggagggggtagaggtgtcccatacttgtgggttaaggtagggggatacgaggggaagacatgaaggaggctttgggttgggaagaagggtgacaatgagatttggctgtagtccaggaagagtcagggaagcagataatttggttaaaatgtcttggcctaataagggaactggggccaggcacggtggctcacgcctgtaatcctagcactttgggaggccgaggtgggcggatcacgaggtcagcagatcgagaccatcctcactaacacggtgaaaccccatctctactaaaaatacaaaaaaaaaaaaaattagctgggcgtggtggtgggcacctgtagttccagctactctggaggctgaggcaggagaatggcatgaactcaggaggcggagcttgcagtgagctgagatcgcgccactgcactccagcctgggcgacagagcaagactccatctcaaaaaataaaaaataaaaaaattaagggaactaggcaggtggggataactaaaaaagagtgcataaaataatgttgtccaagttggcaccagagtgggggagtttcaaggggttttgaagcttggccgtcaatacccacaacagttatgagggcaagggaaacaggcccttgaaaagaaggtaatgtggagtgggtagcccctgtgttgattaaacaggggacggacttaccctccactgtgagagttacccaaagctcagcatccatgatggtccagggggcttccaaggtgatcaggcagcgtcagtcttcagctgccaagccaagcaaatctgggaagcagtcagtcagagagccttgggccagacctttaggggctctaggagtggctgccgggtgagctgggcagtctgatttccagtgggtccctgcacagatgggacatggcttgggaggaatcctgggctgcaggcattccttggcccagtggccagatttctggcacttgaagcaacagcctgttggaggaggtcctgtaggaatgcttgactgctgcggcttaggcagtttgaagttcttgtgtgctggaggtgtggctgggttttgtctcacagcaaaggcaagtaattgtaactcagaaatgcgttgctgtctggctgcctcctctctattattgtacaccttgaaggtgaggttgattaattcctgttgtggggtttgagggctggattctaatttttgaagcttttttctaatgtcaggagctgactgggtgataaaatgcctatttagaataagacggccttctgacccttcagggtctagggctgtaaagcatctcagggttgctgccaaacaagccaggaactgggctaggtttttgtctttaccttgggtagtttctttaagcttgtcaaaattaacagctttgtaaactgcctttgtaagcccatcaactaggcaggaaatcatgtaatctcgcctaattatacctggggaatctgcctgatagttccattggggatcatcttggggaactgctctaatgccttcttggaggtctggcttgtgaagccggtggttatcagtgtgagattgggctagagaaaaaactctttcctgttcatctggggaaagggtagatgttaggatgacatttaaatcactccaggttaaattgcaggacagagttagatactggaattcctatatataattagtggggtctgatgagaaagagcctaaacactgactgatctgagagaggtctgatagagaaaaaggcacaagtaccctgactatgccttcagctccagccacctctctaagaggaaatcgttgggcaggtaggggagagccagtcatggaacaaaactgtaagctggactgggtgtgaggaggggaggtgataaaaggattatagggtggaggagcagaggctgaggaagatttggagcctgattcagcctggcagaaagcaacatagggagcagtctggggaggaggggagaggtcagatggcttggtagaaaaggaagattggaaagactcagcaatgcttggggttgggactgaggggacaggcggtagggaaagaaggaggatttgggacgaattgcattgggaacagagactagggagggaacgaagtgtgaaaaaatgcctgtatgtaaggcatctcaggccatttaccaatttttcgacaaaaattatctaggtcctgtaggatggagaaattgaaagtgctgttttctggccatttagagcatttatcaagtttgtattggggccaagcagtgttgcagaagaaaataaggcatttaggttttaggtcaggtgtgagctgaagaggttttaagttcttgagaacacaggctaagggagaagagggaggaatggagggtggaaggttgcccatagtgaaggaggcaarcccagagaaaagagagagtagacacatggagagaaggggtgggagggtacttgccccccaggggaggtggtgcttgccacccagtgaaagtggtactggccaccaaggtgaaggatcaaggccagacatccccctggtgatcagacacctctgaaacgtgggtaagcgtccccacagtgattaaacaccaagagaagactgtcttcctgagtccgtgaccagagctggagttttgggttcacagataaaacgcatctcctctgtctctaccagaaaaggaaaggaactgaaattaagagaagggagagattgaagggtggtgccaaaatcgaaaggagaaagaggttgaaggatagtgagagaggttggagaagagagtaaaaataggccacttacctgatttaaaattggtgagatgttccttgggctggttggtctgaggacccgaggtcgtaggtgaatctttctcatggagcaaagagcaggacagggtattgatcgcccaagggaggtcccccaatctgagtcatggcaccaaatgtcatgcatgtccgtgtgaagagaccaccaaacaggctttgtgtgagcaacaaggctgtttatttcacctgggtgcaggcgggctgagtccgaaaaaggagtcagcaaggaagataggggtgggacagttttataggatttgggtgggtagtggaaaattacagtcaaagggggtttttctcttgtgggcaggggcgggggtcacaaagtgctcggtgggggagcttctgagccaggagaaggaatttcacaaggttaattgctcagttaaggtggggcaggaacaaatcacaatggttgaatgtcatcagttaaggtaggaaccagccattttcacttcttttgtgactcttcacttgcttcaggccatctggatgtatacgtgcaagtcacaggggatatgatggcttagcttgggctcagaggcctgacacctagatcatggtgggcttggaaaactgtctgagtttcagggactgcaccctatttatgccaatgaaataccaacattgatgcctagcatctgacatctgaattggagccacaaaaggtgctgaagagactaatactctgaaggtgaggtgacatagggatttataatccctgatcctgcaatagtgagtttctttaggtcaattgtatagtttctgtagtactcagaagattatttttcaaagtggccctttgggctagcaaacaagaaagagacacatgaagtcaatgttgcctgggcagcagacagcagggggtggctcggattggctattaccatggcaacattgattgctgtcacaagcaccggtgaggcagatagttaacattttcagagaacacagggactacttgcatcagaattacttaggaatttgtttaaatttcgaattcctaggacccaaggccagagagtcacgattggtaagactgagatatggtatggaatctgccttttagaaaactccccaggcaaccatacctgatgaaatttgagaaccactgattaaaaaaatacagtgcatccctgttacaaatccctatataaacccatctcaccagagccattttcttgcttacaaggccttacaatctttaaaagaygcagtaaatgtgctgatctaggaatttatactgataaatgcccaagttttttgagtgctaaatgtttaagtaggtctttcaagttttcagcaagcatggaacttttttctttctttctttttttctttcctttcttttttttttaaattgagacaggtctcactctgtcacccagactggagtgcagtggcttaatcatggctcactgcagccttgacctcctgggctcaagcgatcctcccactttagcctcatgagtggctgggactacagctacaagccatcacagccagctaactgttttttttggttttttgtttttttgggttttttttgagatggagtttcactctgtcgccaggctggagtgcagtggtgcgatctcagctcacttcaacctccacctcccgggttcaagtgattctcttgcttcagcctcccgagtagctgggactacaggcgtgtgccaccatacccagctagtttttgtgtttttagtagagatggggtttcacaatgttggccaggatggtcttgatctmctgacctcgtgatcagcccgccttagcctcccaaagtgctaggattacaggcatgagccaccatgcccggctgccagctaactttttaaaaaaattttttgtggatatgtggtctacctatgttgcccaggctggtcttgaacttctgggctcaagcaatactcctgcctcagccttccaaagggctgggttttcaggtgtgagccacagtgcctggcctagaactttttttctaagtaacatctattaatatctcatagagctgtcataccaaaatgtgctctgagactcccaaagtaaatttcccaaattgggaaattcagctcaatatcactgtgaaggactagggtgggatccaagaaggggacagcatgaaccaggactacagaggatggctaaggtgcaggactaggttctttataccactgagacataccattctctctcttgcaaggacagactcaggacataaagaacaccaccaagaatataggcttcctgatgtttctgagaatcactgctgtcatgagccagtctctaatggtgaattaaccctcatgagggttaagaaccagttgagcaggcctagcgcggtagcttacacctgtaatcccagcactttgggaggccaaggcaggcagatcacttgagctcaggagttagagaccatgctggccatcatagcaaaaccccatctctacaaaaaataccaaaattagccgggtgtggtggtgtgtgcctgtagtcccagctacttgggaggctgaggagggaggatggcttgagctcaggaggcggaagttgcagtgagccgagattgtgccactgcactccagcctgggcaacagagccagaccttgtctcaaaaaaaaaaaaaaaaaaatttaagaaccagaagattagtggatatgtgacatccagtgtgttgtttttctatttctctagtactactcttaacccaaggcttaggcatattcagttttgctagttgtagtggatactcttggctgcctacttagcatccactctccactccttctgcccatgaaaaattccagttttgctcaggtatcctctccatccccagccccagggacaatatctaatttgttggtgtatgatcctttcttggcaatgacttttagtctgaggggtctgcatgtttcctaattcattccaattaggttgaaaggaaggactgttgtggaggagaggtgtctgtgctttgttgacatgaaggaggaaacttgaagccatcctatacatcgtaagatgaagcaaactttcaggactacagggcagagagacaaaacttggtcctgtttttttttttttttttgagataagggtgtcattctgccacccaggctgtagtgtagtgggcatattctcctctcactgcagcctctacctcccaggctcaagtgatccttccattttagcctcctgagtagctgggactacaggcacacatgactacacccacctaatcttaaacattttttgtagagtcagagttttgtcatgttgcctaggctggtctcgaactcctgggctcaagccatctgcccaccacagcctttcaaagtgtttggattacaggcatgagccagcgctcctggctgaaacttggtccttaatggcaatattgattactgaatatttaccacagagcgtaccatacctctgaacttccttattatgtaagccattttaactgggtttcttgttacttgtgatcaacagtttcctaatgtctgtggtcaccggtttgccttgcactctctggttcatgcaattttttttttttttttagatggagtttcgttttgctcttgttgcccaggctggagtgcaatggcacagtcttggctcactgcaacctccgcctcccaggttcaagcgattctcctgtctcagcctcctgagtagctgaaattacaggcacccaccaccaagcccagctaatttttatattttttgtagagacagggtttcgccatgttggccaggctggtctcgaactcctgacctcaggtgatccgcccacgtcggcctcccaaagtgctgggattacaggcttgagccaccatgcccagtggttcatgcaatttatatgtaaaatgtaaaaaagtaaaagcagagagaagacaatggcttgtggtctgagasaatcaatggtatgtgggctaaaatgtgtttaggtaaaagctgttgtgagcgaactgtgtcttcttcctgagttgtcacgttttttcagtttccacaagtgtccacatccacaaaacaaattcattaaatcagcttttatttgcatttcttatctcaaaaataattatatgtttgtttgacttcttgttagcatagaaaattgtttactgaggtagatatggaatgccaagatgagaaaattaaatcgattaggaaatgctctcactgacaaatagtagaaacttacctgtatataccagaagaattggctctttaaatagacaagtaaatgcactttttcactcygacatgagttcacctgaggctttggtgttttttttgctttgttttattttgttttgtttgtttgttttgagacagagtctcacttgctctgttgcccaggtgagagtgcagtggcacgatctcatgatttcagcttactgcaacctccgtctcccaggttcaagtgattctcctgcctcagcctcctgaatagctgggactacaggagcatgccaccatgcccagctaatttttgtatttttagtagagatggagtttcaccatgttagccaggctggtcttgaattcctgaccttaagtgatccacccaccttggcctcccaaagtgctgggattacaggtgtgagccaccatgcccagcctgaggctttagttctaatataagcgctgctaaacccaaatatgtgaaatgctcaggtggtctgaactgctctggtggagggatatgggttctggttgcacagggaagaggtgtttcattttaagtgcggcaacttaccacttatttagatggatatttagaggctaaggttggaatggttggtgatattttagatctacctggaaacaaactgtactagtgatttgctcaggttccttctatgagagggctgcagcttcacagggtagaggcaggaacgtaagaatgagagctggctgggcctggtggctcacgcctgtaatcccagcactttgggaggccaaggtgggtggattacttgaggttaggagttcgagaccagcctggccaacatagtgaaacactgtctctactaaaaatacaaaaattagccaagcgtggtagtgtgtgcctgtagtcccagctacttaggaggctgaggcaggagaattgcttgaacccaggaagtggaggttgcagtgagctgagattgggccactgcactccagcctgggcaacagagcgagactccatctcaacaacaacaacaacaaaaatgagagccctagtttgcttccttttttttttttttttttttttgagatggggtctcgcactgttgcccgggctggagtgcaaatgtggccatctcaactcactgcaacctccacctcccgggttcaagcaattctcctgcctcaggctcctgagtggctgggattacaggggtctgccaccacgcctggctaattttttgtatttttagtagagacggggtttcattatgttggccaggctgggcttgaactcctaacctcgtgatccgcccgccttggcctcccaaagtgctgggattacaggtgtaagccactgtgcctggcttcttcttttgtttaaatactttaatccaatttacagcatcgtaaaaggcattaaaataaattctactcacaatcccatcacaccgtcatttagttactaattaatttatttaaaagatatatagggactcccccagtgtgtcagaccctgggctaagtgctgtctccctctcagtgaacaagacagactgtccctgccctcttggagtttacaggcgatattgtgaaggcagatattaaaaacatatcacacaaatatttctttcattgcaactgtggtaagttagagaagggaaaggaaggtacagggcagcatgaaagaaaataacaggagggaatktcaggtagattggcttggagattagcgaatgcctctgagaaacatttgagttaaggccttcaagatgagtatgagttagaaaggtgaaaagaggctttcaggtagagaaacagtttaacgtagggacaacgagacctgggatgttctaagaactggaaaatggaagtttggaagaagtcaggtgaacatggagtaaacagtgctatttatgtatttgattccttttttggaaagttaaatttttttttttttttactgtggtaaaatatatataacataaaataggccattttaaccatttttaagagtactattcagtggcgttaattacattctcaatgtggtgcaaccctcaccactgtctrtgtccagaatgttttcatcaccccaaacagaaactctgtcaccattaagcaataattctccactcctttcttcccccaacccctggtgactgctaatctgctttctgtctctatgaatttgcctattctagctatttcatataagtagaatcatgtaatatttgtccttttgtgtctggcttatttctcttagcattttttttctttttctctctgtccaccaggcttgagtgcagtggcacaatctcggctcactgcaacctccgcctcctgggttcaagtggtcatcccgcctcagcctcccgaagtgctgggattacaggtgtgagccaccacacctggctgcgtaatgttttcaaggttcatccaagttgtagcatgtatcaaaactttatttatttatttctgagacagagtgttgctctgtcacccaggcaggagtgcgtggcatgatctcagctcactgccacctccacctcccagatttaagccattcttgtgcctcagcctccctagtagctgggattactgcatgcacccagctaatttttgtatttttagtagagatagggttttgccatattggccaggcttgtctcaaactcctggcctcaagtgatctgcctgcctcagcctcccaaagtgctgcaattacaggcatgagccacagtgcccagccaaaacttcattcctttttatggccgaataatattccattgtatgtatataccatgtcttgtttatccattcatgtgttgatggacacttgggttgtttccatcttttgggcattgtgaaaatggtgatacgaatatttgtgtacaagtatccgtttgagtgcctatttttaattattttgggtatctacctagcagcagaattgctgagtcatttgtttaattttttcgaggaatgacaacaatgcacgagggttcaaatttctccatatccttgccaacacatgttattttccattaaaaaaactatatccacgcgtatgaagtgtatgtatttgattctaactctcctatatcctcgagaatccatctcttctgaaactctgaagatctttggggtcactaatctggcatgaggcttacaatgacctgccttcattttttacccaagtgtctgatttccttaatagatgttcagcaactttggaacaaggtgtgggtgggggatcaatttgaatctccagtgtctactatctggtagatgttcaacaaataaaataattgcgataaaggtcgcagatcttgtctctctcacactgtagacacccagtggaagtttccaaaaggcatctgagagatttttgcttaattcaaatgaattaattttcatgactatgtgaggcagttagttgttggttacatttaaactgctaatctgatccctgccactctgcttgatgcccttcagttactctccattgcacttaaggttggggcccctgttcattaacgtggtctgcagtgccctgccaggtctgaccttgcctccctccagggctttctccctttttctttaggcttgggttattccttagatacacaagactcatctctagcaccagctgttttctctttcactcttgcaaacaagttccccctcacttttgcctccctcactcccttccttccttcctctccctctctttattcctctctttctctctctctttctttccttttttgaaacagggtgttgttctgtcactcaggcaggagtgcagtggtccggtcatagctcactgaaacctcaaactcctgggctcaagtgaccctcctgcttcagcctcccaagtagctaggactataggtatgtgccaccatgctgggctaattaaaaaaaattttttttttgtagagatggggtcttgctacgttgtccaggctggtcttaaactcctgggctcaagcgatcctcctgtctcaacctcccaaagtgctgggattacaggtatgagccactgcacccggccctctcactttttcacctgagtcctactcacccttcagatctcagctgagatgtcatttcctcagggaactgtttcctgaccctcacccgatcctaactctaaactccattttgttctccctcatagcatcttttacttttcctgcatagcacttatcaaaattgtagtaaagcaactttttgtttatttagcgttcatcttccaagtagtcagcagtctccatgagggcagcaactcatgtctgtatccgtcagtgttaggcacatagtaggcactcaatgcgtagttttgaggagagcttctaccaagaagcagaaaaactgatgagtggcttgtgaatgctgctgatattctgggtgactcagagtttctgggtattctggggaaaacagtgtaggtcagattggataggacagtcacatgagtgcctggcaggaagttgatgagaggccatccaaggccacagtggggtggcctcttttgccaagcagtgcccaggctcttcagctaatgtcaggttagagacctcaagcaagctctttatggttcctcagcctcccagccctttgttagaaggttgtttcatgagttggcatggcttttcttacccttgaaagtcatgaggcaaaattgttctatccttttgcatttaaaagaattaattttttgttacaaaagcaatacatgattacacttatcttccaaaacattaaaaggaaagccaatactccctttgaacattctctcaataaaataatggtcctttatccctagcttagagagaacttctgatatattttgggcatgtagctttacagacctgttttaaaaatctttcataaacctaatgtatgataatagggaataatggtattatttatgtgtgttctgttttagctttttattttgaaataattttagatttacagaggagttgcagagctagtatagaaagtttcaacatacacttcacccagcttctcttaatgttaacaatttatgtaaccctggttcaaaactaagaaattaacagtagcacaatactaataacagaactacagaccttattccagttcagaccttattccagtttcaccagttttttcactaatgtcctttttgtgttccaggataccacattgcgtttagttatcagatctctttagtctcctatctgtgaatacgacaatctctgacagtttctcagtctttccttgactttcacaaccttgacaattttgaagattacacatcaagtattttgtagaatattccctcaatttgggtttatttgatgttttttcatgattaactgaagttttgcattgggggaataattttttaaatattgatactatccatctatctatatataatagatagatatagataaataattctgcaacttcctattttcattcaaaaatatgactaagatatatccatgttgattcatgcagatcagagtcacttcttttattttttattattattatttttggagacagggtctttctctgtcacccaggcttgagtgcagtggcacgatcacagcttactgcggccttgacctcctgggctcaagtgatcctcccacctcagcctcctgagtagcagttgcaactacatgctggagccaccacgcccggctgatttttaaaaactgtttgtagaaatgaggtctcactatgttgcccatgcttcatttaaattctctatagaattttattatataaatattctacattttagttagccaccccccattggtgggcatttagctgattctaaattttctttctctctctctttttttttttttaaagacaaagtttcactctgtcacccaggctggaatgcagtggtgcaatctcggctcactgcaacctctgcctcctgggttcaggcgattctcctgcctcagcctcctgagtagctgagattacaggtgtgcgccaccacacctggctaatttttgtatttttagtagagacaaggtttcaccatattggtcagactggtcttgaactcctgacctcatgatatgccagccttggcctcccaaagtgctgagattacatatcaattctttttttttttttttttttttttttttttgagacggagtctcgctctgtcgcccaggctggagtgcagtggcgggatctcggctcagtgcaagctccgcctcccgggttcacgccattctcctgcctcagcctcctgagtagctgggactataggcgcctgccaccacgtccagctaattttttgtgtttttagtagagacagggtttcaccacgttagccaggatggtctcaatctcctgacctcgtgatctgcccgcctcggcctcccaaagggctgggattacaggcgtgagccaccgcgcccggcctcattctttttattattgatttgttaagagtcctttatagacaaatcctttgtcttttgtgtattgcgaatagttttccccttattctgttatcttttaactttgttttcagtttttttcaagttattccatctctctgattttttaaattcttttttctgatttattttttaaaacaaagttcttgattataaaagtaatacaaacaccgtaagaaattaatacaaaagtacaaagaagaaaccaccccatcttatcactgagagaaaacaacataatcaattacatatttccctgtagtcttttgtgtgtgcagttttttttcacagttgtgatcacattcatttgtgtgtgtctctatatttgtttttctctcagtaccatagtgtttagacacaaaccctggccttttttcgtttcttctttttttttttttttggagatggagtctccctctgtcgcccaggctggagttcagtggcgtgatcttggctcactgcaacctccgccttccgggttcaagcgattctcctgcctcagcctcccgagtagctgggactacaggtgcgtgccaccatgcccagctaatttttgtatttttagtagagatggggtttcgccatgttggtcaggctggtcttgaactcctgacctcaaatgatccacctgccttggcttcccaaagtgatgggattacaggtgtgagctaccacgccccgccaccctggccttttttcaaatgcacttggtttaaagattgtgttatgccagcttccaacccctattcctcttttccatatatcctgagaaatttagaaggtgaggggcccaaggtctatccttagctgacctgaagcgaagttggctgagaagcacaagaaggagtagaagtgctctggcggagcacttattaaaaagacgcggaggttttggttgactgcaagcccaatatgagtcaacagtatgggtgccaagaactttatcgcaggagtgcaaagcgataggtcccaaaaggaggaagctatagtcctgctttgctctgatgataccacaaacatttggttcagtcttgggtgatgtattctaaagaaatcacagtcaaatctaccatttgcgtgagagggataaagaccctcaaaaccagggcagaggaggaacaatggaaggaacgggagacactgatgtggaatgagaagaccttgggcagaggtgatagaagtaaagtatctgaaaagtcaaaggtccaggagagattagacgtttgttctctgtggctccaaggcatcgaatttcggccctgagagtggaagtttagacacattttctcactggtgagagctgctcggaccaaggaattcagtcctctggaaatagctagctgcttttgcggagtcttcctgctgagttgctggtggtggggtgaacatttattgagtgcttactgtgtgccaggatcctgctgagggcctcacctatattgtgtgatttcatcccgtcaacaccctttgatgtggggactgttgttccctatcctggtgctacaaatgtgggcaccgggtataggaggtcaggtacctcgcccgaggttacagtttgtaagtggtggtactgggactggaactcgttctgacaaacttcaaagctggtgtttttagccatcaaggggattcgagggtgccatgggggtgtggacgcatgaggggccttgaggtccattagaccaaaacattctgtgactgggaaaaaggatgccctctcctcccaaggaaaagcttcttctgaatgagacacagtggagaggttagcccagggccaggctgaggggcgcaggcagaatgccaagggatggagaccctcagaagggcaaagccggtgttccatcgtttgaagatctccagacccgcgggacagacagacgcagcgcggtcagggagcgtcggcttcgccgaactctgcggcggagctgggggacggaacagcgcgccggtccctggccgggcgcgagcagaggggcgg

SEQ ID NO: 97795 - DNA, 116054 bp, Homo sapiens
  misc_feature (1)...(116054): n = A,T,C or G
tggtaggctattaattactgcctcagtttcagaacttgaatattggtctcttcagggattcgacttcttcctggtttagacttgggagggtgtatgtatccaggaatttattcatttcttctagattttctagtttatttgcatagaggtgtttatagtattccctgatggcattttgtatttctgttggatcagtggtgatatcccctttatcgttttttattgcatctatttgattcatctctcttttgttctttattagtctggcttgtggtctattttgttgatcttttccaaaaaccagctcctggattcattgatttttttgaagggtttttcatgactctatctccttcagttctgctctgatcttagttatttcttgtcttctgctagcttttgactttatttactcttgcttctctagttcttttaattgtgatgttagggtgtcaattttagatctttcctgctttctcttgtggtcatttagtgctataaatttccctctccacactgctttaaatgtgtcccagagattctggtacgttgtgtctttgttctcattggtttcaaggaacatctatttctgccttcctttcattatttacccagtagtcattcaggagcaagttgttcagtttccatgtagttgagtgagtttcttaatcctgagttctaatttgattgcactgtggtctgagagactgttatgatttcctttcttttgccttttctgaggagtgttttacttcaaattatgtggtcaattttagaataagtgtgatgaggtgctgagaagaatgtatattctgttgatttgttgtggagagttccgtagatgtctattaggtccgcttggtccagagctgagttcaggtcctgaatacccttgttaattttctgtcttgttgatctaatattgacagtggggtgttaaagtctcccaccgttattgtgtgggagtctaagtgtctttgtaggtctctaataacttgctttatgaatctgggtgctcttctattgggtgcatatatatttaggttagttagctcttgttattgcattgatccctttaccattatgtaatgcccttctttgtctctgttgatctttgttggtttaaagtcagttttatcagagactaggattacaacgcctgccttttttttttttttttttttttttttttgcttggtaaatattcctccatccctttattttgagcctatgtgtgcctttggccatgaggtgggtctcctgaatacagcacagtgatgggtcttgactctttatccagtttgccagtctgtgtcttttaattgaggcatttagcccgtttacattcggagttaacattgttgtgtgtgaatttgatcctgtcatagatattgaatttcttatctaattagtgttgaaatttggtaatggggatttgaatttatttggttttattttctatacatgataaaaaatgataaaaccataggaaagaaatctcttgtatttttctgtttttttgtttgtttgttttggtgagtcttttttcatttgtttaaaagacattcataattgctttttgaaacatttttaatgatacctgctttaaaatccttgtcgggtctatctagcatctatgtcatcttagtattggtgtctgatgattgtcttttctcatttcagttgagagtttcctagttgatatgatgaataatttttaattacatccaggacattatagttaccatgcgactctagatcttactgaaatattctgttgtagcagtgggggctggaggtgctgctgtcaggtagaggtgaaggtccacattacccactctgcctccttttactttctagggtggatccagtgagggggctcgttactgggtgaaggtggaatttcaagctctccactaggcctttgctgaccccttcctggttgtgagggaggggggcaccttgttactgctccacatggcctccactgtcacctctgttggttgggggcttgctatcaccaggcaagggacagattctcaactctgtcttctttgatagcacctcaatgtgtgtagcatgagttggggagaggggtacctcatttcaggctgctaagggtggctgcctaggctctccattcagtgtagggaggcgagagtggggccaggatttgttcccttgtaactagctggaatattatttctttggccagagagagcaggcttttcttggggctttgtttctccacttcttttggcgtttctgggttgccatcctctctagcactcagtccaggatatgtgaggcaaaagtaaaacccaggaaatgctgctttgtcgtttcttgcatcctgagatctctagcctatcatcttttttctctctacctttcagtctttatgttcatttatatatcaggtttcagagtttttagctgtacttagcaggaggaatagagagaatttatgtacttttaaaagttattttttatgaaataactttgacattcctagcaatttacttctgaaaaaatgttttcggcctggcatggtggcttacgcttgtaatcccagcaccttgggaggccaaggcaagcagatcacctgaggtcaagagttcaaggccagcctggccaacatggtgaaactctgtctctactaaaaatacaaaaattagctgggcgtgtcccagttattcgggaggctgaggcaggagaatcctttgaacctgggaggtggagattgcagtgagctgaaatcatgccactgcactccggcctgggtgacagagcgagactctatttcaaaaaaaaaaaaaaaaaaaaaaaaagtttttggatccttaaaccaacaggcttttgcttgcaaatattttaagacccaattaaaatataatagaaatgtttaaaatgaaatattagaggccattaaaatgatattgtaaatttgaatttattgacatgaaaagagattcacaatgtaataaatgaaaaacagatttcaaaataatgtttggtgttaagtatatacaaatgtgtataaaaatatatgtacatatatatgtacatatatgtacatatatgaaggtttagaatgatataagggggtatatctctgggaagatagaaattttgtgtgcattattttatgcttgttgctcctggagacttttagttcttttgtagaaaacattgcttgattttgaaataagaatgaaatataaaagttcttaatttatttacagtgaataaaaatatattttcacaatatttttctcattgggatattgtaatttttgtttattttcagagttcataatctattaagcatctgtgatcattatatttaatatcttacaggttcctctacctggcatgaaatgggtagataatcacaaaggtgtttttaatgttgaagttgttgctgtttcgtctatccatacacaagtgagttttaataatttttattatcaaatttcacttaaataaattgaacgtaatatctaatacttgtgatgtcagttttgttacctgtcataaatctgtcattgctgtcagatttatgagaatatatgtcagttaaaaacatacaatatttagaagatttttttaaaaagaatcaacaaaatgtcattgaatgtcaacaaaagcaaacatttttgtttcaaaatgtcattgacttcatgttttttctaagtttctggtacatgacagaattaattagaattgagaaaccatcatcagctcactttatttctcatagacttgagtatttcaaatggaaagagtttttagggatcatttgttccaaattccttatttttggaatataccaagttctgataggttttatacatcctctttctctgcctggaatgcttttcctcctggtattcatttgacttatgaattagagtttctcttcccctcagagaggccttccatggttactctttaaaacatagcaacctcattactgtatgtcatcttaccctgcacttattactgcctacgcccagcttctctgttgcgctttgactctgtcactctttctgtttgtgtgtatgtatataacacacatacatacacatttgtttattgtttctttcccacattagatgataagttccgtgagatgagagatgttacctgttgaggaaagagcttttccttcaagaaccttacagtgtaatatgggaaagtgtaaaaagtatgataaaattagtacagtgttacatatattaactaaattctttgaagtacagagggaagagttatctgttttgctaggcactgagatgttgcatttataagtagccatttactactcagagaaagggagagtggacaactcagatgatgagtagcaagtacagagttacagtagtctaaggaccatcaggtgacctggtgtgaaaatagtttaaagtgtgtaggaaatcatgatacataaggatagaaggctggtaatagattgtgaaggaccttgaatgccatagagtccaggtggatggtaatttctaccctaaatagagaacatgagagaaatacttttggggccatgctaaggggaagcagttatggtgcctgtgagtttatttttgaacctgttgagtttgaagtgcctacgtacttcagatggagatgtcctgtaggtggttgtaattagtttgaagtttgggtttggaggtaacagaataaatgcgatagctgaaactatattagtaaatgtgattttccatggagaatatgtacagggagaagaagcaagtatttaaaatgaaattcagggattcactaacctatacacagaaagggtggtgtggagggacttcccaaagccatctcaggttcagtgatttgctaggaggacttacgggactcagcatatagtcatactcagagctatgatttattttagtgaaagaatggaaagcagaattcacaaagggaaaaggctcatggggtgaagtccagaggaaacaagaaataagcttccaaaaatcctctcccagtggaatcacatggggcaagttgaaacaacatatgtgaaatgttgtctgccacagaagttcagtacagactcaattcccagggtttttacttgtcacgtaggcaccctttgcctaacatgtaccaaaattccagattcccagaaggaaagtaggtgttcagcttataccatattgttttgcacaaacgtttgaggcacagtgagccatctctgtcaatgggaacccccctgaaatccaagttcccagtgattagcccaaggccaaacttgtaaacaggactttcaaagaatagctgtcttaagcccactatgttaattcttttctgcacagtgaggtaggggaaaagaagaagatacagcacctctatgctgtctttaggaagaaagttggtagtatatagattttatttagaactacacaggtagtctccagtaaaagaatgacgccagtatcataaggtatggcgatgagtttgccttatatccaaaggctttggagctgaaagacaataaattaataatggacaaaagtaggttactaatatgcctgccacaataattgaacttcaaactaataaagcaaactaaaactaaaaaaaaaaaatcttaattagtatcagttttcttaagtaactaatagtatttgaagtgatcattttataatgataaatgaaaatagatttgtttaattggaaacaatgtttgtatacctacttgaactttttagtgttatcaagtaatatgacatgtttgtggtccgtggtcctttagaagtgggaaatttataaagttataagtgcttagtgcttttgtttattctttgttttaggatccttatcttgacaaattttttgctctggtcaatgctctggatgaacacctgttcccagtccgaattggggacatgcgaatcatggaaaataacttagaaaatgaattgaagagcagtatttcagcactgaattcatcccagctggaaccagtggtccgatttcttcatcttctgctagataaactgatacttttagttattagacctcctgtcattgctggccaaataggtaatttacttttgtttggggatgagacgtgaaatttataacttgacatttctaaattttgttaaaaaaaaaaaacatgatttctatttgctatatataaggastatatttgatttggggtggaagatgttatttacttgtttataatsccagaaaataacttttattttgtttttataaaatgtgttctataggcatatactgaaattatagaaacaaatttatttatttatttaccaaatatttattaagcacttactatgtacctgacactgataggcactgttcagggcatggttcctgactttaacatctcacagactagttaagaaaacaggcaaacaggtaaatcatgttgtattttacaggatgtataatctacctactctacattttcattcatctgctatcctccgcttaatgtagctcttctttccttcattttcttagtctctgttttctctttttattttctataattctggaaggaaaggtgttcttcattcccatcgtttttcaaggtttactccttatttttttaccaacagctttcacccaaatcctgcagggaagttgaacttgaaagaaatttcagctaaccagatataatttttatgtttgactagtgacacaaaggagaggagtattcaattatttgagtttttttaggggagatttataagtagaaataattcctgggttgagtatttaaagatgaataggagtctgacaggtaaatattattccaaggagattaaacagcatgaaacagcatgtacatagtacacagacataatgaactcagaatgaatttgggggaggaattttaagtaattagttataaattagaggattgattagaggtaatatggagagtgggagatgaagttgggtcttccacactttaggaaattgggactttttctgtagggaataaatagcctttgaagaatctggtcttaattagagaagtaacatgaccaagtttgactagaaaaagatggctatgctatgtagagatgacttaaaagtgggaaaacctacaggcagggagacaaattaggagtcttgcagaatttcatacaaaaaatgatgagttcctgttaaaacatgggtgacaatgggatggagaagagagaatggattgtgagatcacagagtgtacagttacagaaattatagaagaaggttttaaggaaaaaaaggttagcattgttctttgttatagattatataagtaaaataatagtaataacagtaattgcaaacacttgcatagcatttactgtgtaccaggaataatgctatgtgctttatttatatttgagagccaagattcaaactggttccagagtccctctctctcttatctagtatgcttgagaaatgtctactcgtgaaattacatcagtaattttagtctaagtgaaggtagaagccagattacagggaattaagaagcaaatagatgataaaataaatacaagaagctatactactatttaagaagttaagttagaagagaaagcagggttgagtagggcaaaagagtggagacattttagcatgtttatgtgctgagagaaatcagcatctaaacatgctcaaatgggagaagggagaaaaatacatggggagaaaagaggttaattaatgaagcaattctgggagacaagagtaaaggtgatagatagatcactcttacataggagagggcactacttcctttggagaggagataaagtaatttcagattctgataaatttgtagaaaaagatgaggacttttggccaggtgtggtagctcacaactataatcccagcactttgggaggccaagatgggaggactgcctgaagctaggagttccagaccagcctggtcaacatagcaagaccccatctcttaaaaaaaaaaaaaaaagaaaagaaaaagaaaaacatgagaactttcatgctttatacatttcttctgtgaggtagaaggcaagatttgctaaggaggaattaaggaggaccttagttttgagaaggattcttgtaacttggagtagctactgtaagaaaaaggaaaaggattaaccagaaacacaggtaggatcgcttaacttcgctcaggtttctgtctctggtctctttcccctctagttcagtatatatagattaatcttcctaaatgaccattttatctgattattctacttttgggaaaacttaattggcctcattatcycttcataatttcctgtcttggttaaataaattatagaatctaagatcctattgctcaaagtggctgttcagtttacccatttatgcagtgtgcaatttatcacaattctccaatttttgtaaaattattgttacatactgacttgagtgaccgagtaggtattgcttagcctgggatttaaaatgctgtagtcttacctcaacctgtttttctagccccctctttttttttttttccttctaatcattttacagattcactcattccaatcaagttgcttattcactattttcttattatactgttattattttcaataatctcttttattattgatatttttaatttttttaaacaaaagtaatatatgcccttatatgctatttagatttttggagtaatctttaaaatgaaaaattgcttcttaaggtattacacacgatgtattttcttttttcttatgtactttgtattgttttactaaataacatatccgttgagcattgttttcttttttgactaatcaaacccatataattttcatcttaaattagtaaaatgagttctcattttgttcagaaaagtatttttggctcagctaatgcaacgtgtaattaaaagtcaatatcaaatagtaatcatctttatacacttactgtgtagtcactatacttaaagtatgcaaagatgacaaaatgttgatcttcgtggaatttacagtctaaaaaaagttaaagcaaaggtaaatacttcttctttcttaaaagttaacctaggtcaagcatcttttgaagccatggcatcaaytataaatcgacttcacaaaaacttggaaggaaatcatgaccagcatggcagaaacagccttcttgcatcatatattcattatgttttccgcctaccaaatacttaccctaattcatcatcaccaggtattttattctttttactatgaagctgtctttcataaattatatgttcatgtcagtattgagataattttgtagtccatactgtgatccatttattcaaaggcaaacatttattgaacacctgctaagtaccattcactgtgctaggtgctgaagttaaagagataaataagttacatttttagacatctttttttatacagtttgctttagtttgaattagagttcttggttgagttaatttttggaaatgagctttgaaaataactttgtctctggaagcattttatcattccttgttaagataaggaattgcttgcccctgtaatcccagctgtttaggaggctgaggtgggaggatctcatgagcccaggaatttgaggccagagtgagctatgatcttgccagtgcactccagcctgggcaacagagtgagatcctgtcttttaaacataaaaaagacaagaaaaatagaatcttgtatttgtcattcagagtgctgttgggcattaaaggagaaatgtggtggctcggtagtttcctgaaaaccctttgaaacctacagtgatatagaagattgttctctaggaaagttctgatctcttcgtggtcagtgaaataatataacctttctgagtactggagactcgacttgttattgtcttttgtgtaccactgktgatagtggaggtaacggtgggagatgtcttagtgtgaataatcctttggttgttcatttaactaactaatgattatgttgtgcgtatcatttaacctactcacatacatgtctgtatgacattaatgataatggcaagtgccttttatcagcttttggcaatgttgacattgataacggtgactaataattgtgacgttcgttatgaacactagacataatagtaacctgwttttaaattttagcccaatttatttctttacttaattgcaaaaagaaaagcaattgacatttatattctggtttataatttcctatgttaatttttaaaattataccacttgaggacatgaatgtgtgagtgattatgtaatatctacagtgctcctccatttactgttttattcagtacactattagaattccacagattttgcaaagcatcttttttttacatgctgacctgaaagattgtatgaattaattaggcaacaggtatgtattaatatcatttgcaaatatgacattcagaaagatgaagataaattaacactataattcctggatgttttattttaaaaataaaagacaggttggaagatgatgttaggcttgattttagtcaggcaaaaagggaggcattgcttttttttttttttttttttttgagatggagtctcactctgttgcccaggctggagtgcaatggcgcaatattggctcactgcaagctccgcttcccgggttcacgccattctcctgcctcagcctctcgggtagctgggactacaggtgcctgccaccacgcccagctaattttttgtatttttagtagagacggggtttcactgtgttagccaggatggtctcagtctcctgaactcgtggtctgcctgccttggcctcccaaagtgctgggattataggcgtgagccaccacgcccagccgcctttgcttttttatcactttggatctgaaaattatctttagttttttgtatgtatatcataaagatactattttgttattcacattgtcactgatgaagatagagaaatgaaacatgctctcatttaaaagatgttagcagtaatgaaggtagagaaataaaacacggtttaatttaagagatgttagcaataaattggcactctctctagtgactgtcaaggggcagagtaggagaggtgggaaaaaaggaagagacaccagctggagcatcttgggtccgaaataccaactataccgaagtgaaagggctgcgtgtgcgtgtgtgtgtgtgtgcgcgcacgcacgcacacgtctgtgtgtgtgtgtttcctattttggtttttattgtatgtgtaatatacaattatagaaatactgaagagataatgattttatttatagttcatatggttttataaactgctgtaaaatagagtatctttgtacagcaatcattagttcttgagtgtttttattttctttctttctaaaaaaaacatttcccagtgcttcaaggaggccaagagaggaggattgcttgaggccaggagttcaaaaccagcctgggcaacatagcaagaccccgtctctacaaaaaaaagagagagaaatttacccgggcatggtggtgtgtgcctgtagtcctagctactcaggaggctgaggtgggagtccaggagtccaagattatagtgaactatggtctcactgctgcactccagtgctgcctcttaataaaaaaaaaaatggcacctgcctattaaaaaaaaaaaaaaaaaaaaaaaaaaaaaaatatatatatatatatatatatatatatatatatatatatataaaatactttttatttagaagaccctgcctcttcaggcggatcgcaaggtcaagagattgagaccagcctggccaacatggtgaaacttcatctctactaaaaatacaaaaattagccgggcgtggtggcacgcacctgtagtcccagctactcgggaggctgaggcaggagaattgcttgaacccgggaggcagaggttgcagtgagccaagatcaagccactgcactccagcctggcaacagagagagactctgtctcaaaaaaaaaaaaaaaaaaaagtatattttttatttagaaaccaaagcaattcatgatctttgtggaattttctaaagtggcagagattttttttcagatcctttcctgactaattttctttaattatgtgctatttcatatacaactctaggtcctgggggtttgggaggatcagtgcattatgccacaatggctagatctgcggtgagacctgcaagccttaatttaaatcgttctcgaagccttagtaatagyaatccagatatatctgggactcccacgtcaccagatgatgaagttcgatcaatcatcgggagtaaggtaaactgaagacatgcatctgtaaatttggtttttgttttgtgaacaaacgagaaatatccagttgttgtaatgtattctgaattttgagatgtatgtaagttaggaattaggaaggaattgtacatttctgttctatcagtaaacactgttttatttttctgttaaatatgcttgctcttacaaactactccactaaaaattctaaaatttgtctggaatcactagttgcrtataacttattgttgtcagtctgatactccatcatgtgaaaaatggctagattgatttcatatagaattaaaataaatctgtgactgatatgtagaagagagatgtcatcattgattcaagtcatgagatcctcttctccaaaaaatatccagaagagtgattaaacaattttccatttttgtaaactagaaagagtgatactcagagttatttataagggatactgcagagtaacctgagtactatggcagctgcgaaaagagaacgcttcccccaccccccacacacatttatttccatgtttaagaaaagaactcaggttttttattcctgttttcattattgattatattttattgtaatacaggtagtacgtagcattatttatatactgtatatttatatactgcataggtcttcagtagaataagtttgatttttggattttcagaaactttcctaaagaaaagaagctatagacagcatttccttaaggttcttttaaaatgtctcttaatttttgtaagatttacattaagactcatttagcataattctatttatttcttttaggtttgatagattataaactcaagatttagaacaaagaggcctatatatatatgtaatgattttttgccttttttcaagatgtactttaaatggatcaatgatttttaaaatatatataaaaatatatacaaatatataaatacaaggtagtttcttagaaagccattgcaagatgagaatttgtcagccttgtcctaatcaagtattatttacatagtttttatgttgttttctttttattgcaaaatttttgatagctaccttcctattgagtttagttgtaatcactaataatgtatataattttatctcaaaattataaggaatctaaagtttatttatagctacccttcattttttcttattttattgacctggcagttcaagaaactcttcttcaggtgatcttgttttccactccacctcagtcatggtcttcccttatatcacacttgttcaacctgtggcttgcaggccacatgtggcccaggacagctttgagtgcagctcagcacaaatttgtaaactttcttaaaacattatgagtttgttcagggatttttttttttttttgtaagttcatcarctgtcattaatgttagtgtattttatgtgtggcccaagacaattcttcttccagtatggcccagggaagccaaaagattggacacccctgcaatcttgtcattaccaataactttaattttcacaatctcaatttcatgtattttgttctctgttatctcctgtttttcttgtagtacctcaacttagtttatctactcctttgcaatctctaatcttgatcctccaacctttttactgtgtctcacccccttaatgttctctcttcttccttagccagcttaatgtctgtgggcaatcattataattattcccatcaggctgggtatggtggctcatgcctgtaatcccagcacttcaggaggctgaggcgggcagatcacctgaggtcaggagttcaaaaccagcctggccaacatggtgaaacctcgcctctactaaaaatacaaaaattagccaggcacggcggcagatgcctgtaatcccagctactctggaggctgagataggtgaatcgcttgaacctgggaggcggaggttgcagggagccgagatctcaccattgcactccagcctgtgagacaagagtgaaactctatttcagaaaaaaaaaaaaaaattactcccattataatcaaacctcagttcccttatctttcccaaaccttgaaaccatagttaaacccaattgactgcctgtgccatgtcagcatctgtgcagctaaacatgtcttgagaaataccatggtgattgatctcatttgaaataaacctcaagagagcccttaatgctattgggcaattatactgtatttctgtatctccatcactttcctgttctcccaggaaatgatttaattccttctttcattacctcaaacctcctaacacctctcccctcattccttttctcattttatctcccatttcattgagacaactgaaaccatcagaagaagactttgataaacttttaccatgctatctagctacctattaccatctactatctactgcctaatactcttctgtattaaaaatgaatagatgagctatttatttttctaaattaatttctttcactcaagctctcatctggtctcacctgctcaagatctacactccaccagtttttccatatctcttccacatcatcagtttctccctaaatactgaatcattcccattcacatataggcatgctattgtttttctcattttgaaaaaaatgattcctctcatttgaaagcaatctaagtgtccatcaacagatgactggataaacaaaatgtggtacatatatacaatggcataccattcacccataaaaaagaatgagatcctgtcatttgcaacaaggatggaagtggagatcatcatattaagtgaaataaaccaggcacagaaagacaagcttcacatgttctcacttatttgtagaaggtaaaaactaaaacaactgaactcatggagatggagagtagaatgatagttaccaaagactgggaaggggcagtgggtgttaggagggaaatggagatagttaatgggtacagaaaaataattagaaagagtgcataagatctagtatttgatagcacaacagggtgatttgtataattaaataggtaaatactgtttattatttagttatttaaaaataactagaagtgtatatataatttgattctttgtatcacaaaggataaatgcttggggtgatggataccccactcatcctgatgtgattagtacacatgatacatctttatcaaaatatttcatgtaaaccataaatacatatgtctacwatgtacccacaaaattaaataaaaataaaaattatagtaattattctctagtatttcaactgctaccttacttgctatttctgtgctacctttcatagtagaattccttaagaattttctttacttgctatctgcagttcttttacttctatcatctctacttcagtcaaatattcctcccattttccaccaaaactgtccttgttagtgtcaccagcacccttcatgttgctaaatccagtggttaattttcagaactcggcttacttttacctaccagcagcttttcacacagttaaatttttttttcctctgtgatttattcatttatttggcttccagggtactacattctgttagtttccctcttggtttactgattataccttttcagtctttgtggattcttccttttctgatctctttatctggatgtgtttcaggcctctgtccttatttctcttctcttgtcttctctctacactctaccttggtcagcttatcaggttccatggctttaaataccacgtaaatgttatgctaatgattcccaaaattatatttccagtacagatctctctctggagttctaaacttaactgctttttctaaatagttttgttcagatttggatatatatgaaaggtagagacacttctttccatctccattgctaccatcttggtctgagcaaccatcatctctcccagaactaatgtactagttttaaagatggtttccctacttctaccctgtgctctgttcacaacatagcaaccagaatgttgctttaaagacttaagacatggctgggcgtggtggctcacgcccataatcccagcagtttgggaggctgaggcaggtggatcacctgaggttgggagttcgagaccagcctgaccaacatggagaaaccccgtctctactaaaaatagaaaaattagctgggtgtggtggtgcatgcctgtaatcctagctactcaggaggctgaggcaggagaatcacttgaacccaggaggcggaggttgtggtgagccaagatcgcgccattgcactccagcctgggcaacagagctagactctgtctcaaaaaaaaaaaaaaagacttaagacacacacaaaaattaagtcattatgtcattcctctgagcacaatcttctaatggcttattctctcagtcctttaagtctttactctgaaggccgccttctcagtgaggttgactctgattatcttatttaaatgtataaccagtggctgtgtcctcagccttctaatcctgttattctgttttttgtctttttttttttgtctgacatttactaccttttaatgtagcatatgaattaattattcttatgttgatttttttttagtgtttatctccctttaacagagtgtaagcttcattgtggcagggaatatttgttccaaggcacctgtaatgtctaacttattcaaggtgctcagtagatatttatccaatgaagaaatgttagtatgagttaacaccgcaggactagatcacttgtttaagaacagaattatgcttttgtttgccctcttactattgggattaattatgtatttaaaggtctgcagagatttgactttatgaaagttttggttatattttattccccagtataaaatacagaactcctaaaatttaagaatatttatataacctgaacaggcttttattactccagtggctgtaatgtaaatgtgaaaatatttgtgagacttcttcatacttatattgccaaaactagctgtgctttcttaattctagtaatcrtcttttaacattcagttatgtaaatacatggttacatcaggtctgaactttattgctttttatcaaatgccagtggaattttgcactgatacgtttctttctcatatatcatctttttttaatttctcaaacactgagagcttactgtgtgctaggcactatgctgaggacttgtggatatgaagyaaaatctttgtaatataacacaagtgttgatgtcacatcaaatacagtatgggccttgctcaaggatcttatctayatgtaagggaagaaatcaatagtgttactgggatttggcaaaaaaaacctcacacttacatacacgtgggcacacatttggttaatctgttccatgtttgttggaaattggtaaacataaagttattatattaaatataagtgatgagtttgcttaaatgtgggctgtttgatataactcttagctttataacacctgaattatggaatttacttgctttgccaaataactggccacaagttttctttaaatagttagctttgactagtgtaattacaactgttcagaacatcagtattgtgtatataaatataattcatagcacaaagagatttttttattctcatattagcgattatcatatattgtagttttaaaggaaattattaaacagtaagttaagtaaatttaagagtacagcaaagttcttattctttttgtggaaattcatgagagaaaagaggacagttataattttgcaaaaatcaaatgctcatgttttgttatttttgtaacatgagtagtgactgtaaaaattgaatatggtaggaagaactttacacttttatacaaaaaagacataattttgggcttggacataattttggagactaatgagaactttattttaacttctatgaaaaacataagccttttggtttgcttttattcgaaatattgtaatgggattctgagaaggcagatattttattttaaacaaatctgattgcataatcttactagtattttgatattgtctaatttactttgatagaaagcattttaagaaaaatatgtatgggaaatttttataaagctgtttttgagagtttactatattcaaggcattgaacttagtaatttacttccattatttaatttgattcttaccatgtgaagggagacactctcatcatttttattttatagttaagaaactgaaaaagaaattaagtaatttatcttagattttacagctagtaagcaggagagcctggattggaaccttaactcccatattagacagtcactgtcaaaaatgattagaaatgggtgattattgtaccaccatttcaacttctctatatatttgggaaaaaatgaaaaaaggtggaggaaatattctcctgaaacctaagcccttgagggttgcggtttttctttcttttctttttaaaattttctcttgaagtatttaaaaaatactgatgtctgggccgcactcacagcaattctgatttaattgttttaaggtagggcgctgcacatttgttagttactgttgttgttaagcttcccaaatgacactaatatctagacagagttgattacagttgttccaactcttcacttttacctgtctttcctttggtggtttctggtttgggtctgtactcatgtcctgatatgtttacatcagcttgtcttcgattgtctttgctattcttaccctaataattctttaaaaatcttttacaacttgctccagttccaattattagattctcaagtccccagtccaaattactgaatcgaatttatagagatagagcccaggatctgaattttataaagcttctcaattgattctgaccaacagtcagttttaggaaatagaagaaaagcctctgtttccttcacctggaatcacagtaacccctttcagacagagataaacataaattaacttctggacatatactttagtagcgttttaaagaaattttaaattaatgaagatgatgatgaagatataattcctataaacagccccagcataatgtttttccttataatatttattaataaatagtagcccattattattataagtgcagctccaaatccattattaggaaggagtaaatattaggtatcatttttttcttaagtttttactttatttctcctgtctgtccctaaaagagagtgaaggtggtagcaagctcaaatagaattatggggtatcactgcatagtagttttcagttgatgagagatggaatgaaattaaagtttataacaaagaatggagtgtttttcttccattttttcctttaaacctcagttagatacagaggaaattacctgttgctaacttgtactatctttaaagaaagtttgggggtgtggtgctgtgggaacattagttattggtacttcaagagtattcctttacataaagaaaaattacctttaaatactatacttaatggtcttggtgattttttttaaaattgtgttatataataagataattttgrtgaactaatactctataggtgcctacaaattttggttgctwtaacagtactaattaaaaacatgtttgcattagaagatctgaatttctttaagaataatttatagcatgcaacatgtaatatttctttcctttcaaactgctttctattatatgcttagggtttagatcgctccaattcctgggttaacactggtggtccaaaagctgccccatggggatycaaccccagtccaagtgcagaatcaacacaggtggtgtttatattagaggtttctttattggctgctgatgtttccctttagaacattactttttagtatatactatgatttcagtggcttgctttttttaatcattaaaaagtgtgtatttttgtttacttagcacattttccaactactatgcatgagtaccaccaattgcaccagtaatgttcttctttcctatttcctatctctgtcttctttcttccttacacaccctatcaatatttcagtgcctgctgcttatgcaattgatggcttttataacagtttcttctttaggggtagcacgtctttaatagcaatttttaaattttttacgtggaggaaaaaacccaacagttttctatttgcttttggtttaaagtgtaactattgtatcattttcatttaacatttactatcttgttattttcttcctaatcaccgaatagaaagactggcaataagttgaaattgaatgtgaacagtatatgatccccgtgctataagactsaataccagaagcaaaaatccattttaatttgtactgtgttgcaaagtatgaaatttgttataccttagctgaattaggttttgcttacttaagactagttgcttgatagctaatactgcatgatatctcaaaatatacttctcatctgtgttgrctttggagggaaatcctgttcctaaataaaatttttaattccatttctaatattgyaaatgatttatatttgatttagtatatgacaaacctgaatagtagtttttgataataatgaaaaagtgaaagaaattattctaaactttttcttttctttaatataaagttactgatttcttttttggtctgagaccagttgagaagtatgtttttactttttatatatttttactagatatgtgcatgtatatagatcacacagataaaagtttcattctttgcaacactctgaatattatataatcactgaaatactcatcattttttaaagaccaaaaatatatagaagccattttgatactacttatgcattgtcattaaagcagcttaacatggtgaaaatgagatgagcaataaaatagatggtttttgaaaccataataaaactctgttttaaacttgtacataatccatcagctgcaaagtcatccactgcaaacgttaatgttatctcgtcattcattcatcttcactccataggctatggatcgaagttgtaatcgtatgtcttcgcacacagagacgtcaagtttcttacaaacattaacgggacgcttaccaactaaaaaggtagattcatatgaagacaattcatagagggggaaaataatttcaccaattaaatagatgtaagatttctttacataaccagtatgagatacttacagtaaytgcattgtgcttaaaaatatatctgaacaagcattgcttgtctgatgccttttggggcatatcttgtcaatgtatacttttttacattatgataatgtttatatctttgggattgactatttttaggatttagtgaattcaaatttgatcatcaaattttagtaccaaaaaaatgtatcaactcttaattctgtttctgtaactgcttctgttttgtgttttaaatctccagggaaaggaagatgagttagaaaaattgtcactcttagtaagatatgttgatttgcttcccttatgcacagttttgttagtcctttttcatattaatatacactactttgcaaatgctttgtatgcatatccattataaggcagaaatcttctgctattttttttttaaaaagaccttacctgaaaacttgaaaattaatggctcatagcaaagtttaaattttaaaatgtatttcctaaattgtaccagcaaagttcatgcatgtatttgcgtatgtttaaaaatgtacttaagatacaaacaaaatattactgtactataagtttttagtctagtttctgtttgcaggtacaatttaggaggctatcttctacctgtccttttaaaattacattttactgcaagataacatgtaattttttcagctgttccacataccactgtcttacatacataaatagccgtttcgttaatgggtgtcttcagtgcatcattgaatggttcacgtgccttattttgcttattctcattatatcttcgtttgtatttgcattatgatttggtttatgttatcagcagatttgactttgataataactttggatttacttctggatagctttttcacgaggagctggctttgcagtgggttgtttgcagtggcagcgttcgggaatcagctttgcaacaagcctggttcttttttgaattaatggtgagcaaaaactgagcatgttctttaatattttttctcttagtgaacaattttatgctagctcatttgttaccttagaaatctttttctgttgcacatcttaacrcttttccatgtgcctctaagacaaaattacatgtgttacatctctaaataaacactgtggacactcaacacagtttaggtggaattaagagtgaggctcattttaactcttattttctcagggatggttgcataagctagctatattttcaaaggaaacttgtgatacattctttgctagtcattatacatgaagtgtataatgacagtattgtagattttataccaaagatggaaagagctttatagatacccactgctattgttatggctagtaaacccttagggaaatgccagttacaatcaataaaaaaacaacagtactggctgggtgcagtggctcacacctgtaatctcagcactttagaaggccgaggcaggaggatcacttgagatcaggagtttgagaccagcctgggcaacatagcaagagcccatatctaccaaaaaaawttttttttaaattagctaaacctggtggcacaaacctgtagttccatctacttggaaggctgaggagggaggcttgcttgagcccagaagttcaaggctgcagtcagctatgatcaccactgcactccgcatggataacagagcaagatcctgtctctttaaattttttaagtactttttgcttaatcaaataagtgacacttttaaaatgagtgaattaatatttcaattaataaatacatatatatgaacagttgacccttgaacaacttggggtttaggggaaccgactcccccacacagtcaaaatctgcatataacttctgactcacctaaaacttaactactaatagcctactgctgaccagatgccttactggtaacataatcatattttgtatgttattcatattatatactgtgttcttagaataagctagcgaaaagaaaatgttattaagaaaattataaggaagttaaaatatatttgctyttcattaattggaagtggatcatcataaatgtctccatcctcattrtcttcacattgaataggctgaagaggaggggttggttttgctgtctcaggagtggcagaggtgggagaaaacctacatataagtggactcatgcagttcaaacccatgctgttcaagggtcacctgtacatataaacttgtatatgtaaacacacacatatgtaaacaaaggcaacaaacattacaaacatttatcaagtgggcacaatatgccagtactgccctgtggcctaggtattactaaggcacagagaagttaagtaacttgtcttagaatgcacagcttgtaggtagcaggactgtaattaaaactcaggcatttcagcacttgggaccgtcktcttcaccttcactgaaactttttcttccaaaaaagaagtatgtaaaaaaatataaaacaaaacaacaaaaaagagaaaaggatcttccagagtatgtcatagggtggtcctcagcattgaatgttacctatattatgggtaagaaaacatttcttctagagatttaataatctacagaaaaaataaatcagggactatatataagtgacaattcatttwtttcctagaaaataaaccttaaattcgtaattcatgtacatctctgcttctcctgtaaggtaaaaattgtaattttcaccgttttttagtagtcttacatatatgttcaggtttctaaaatacaaaatagtcaaaagactgcaatttaaaacttggctgtgctctatattaagtttaggactttagcttcaatttccctgaatttaaagtttaaaattctttgttaccattaccacagtgttataataaagaatctgcacaatattcagtacaaatacaatacaatatagtcctcatatttattgtattcccactatatgctatcatctgtgtattagctactgaggacactatagtgaagacagggtttctaacctttcaaagcttagaatttgggagctttggaatggcaaaattattgagtcttggaaaaatttaattaaactttttttggctggatgtgatagattacatgcctgtaatcccaacattttgagaggccgaggcagatgaaacacttgaggccaggagtttgagaccagcctgggcaacacagccagaccctgtctctataaaatttttaaaattagctgggcatggtagtgtgcacctgtagtcctagctactcaggaggctgaggcaggcaagtcacatgagcccaggagttggaggctgcagtgagctgtgatcatgccactgtactccagcctgtgtgacagagtgagaccctgtttttttattggaaaaaaaaaaaaaatttaaaggttgaaatttttttttgttgacatacacagaatttttttgtcctattgttagctagcataattttctgaaagtaatatggtggtttttttattttattttaagcaaatacaaaacattgtagggaactttaaaaaatatttgagaagctaaaaatatttcagtcatctattaaattacatgccatattttaaaaatagtccaagtgtttagagttgttgtaattgttaaatatattcataggaaattaataatttatatctttttttcaggtaaagagcatggtgcaccatttatactttaatgataaacttgaggctccaaggaaaagtcgttttccagaacgtttcatggatgacattgcagctcttgtcagcacgattgctagtgatatagtttcacgatttcagaaggtaatgataactttttccccacttatctctctttcaagctcagattaagctatcatactttaatttgtttttgttttatattctgtttcacaggacacagaaatggttgagagactcaatacaagccttgcattctttctcaatgatctgttgtctgttatggacagaggatttgtttttagccttataaagtcctgctataaacaggtaatgcatagttaggaataattagtaatcaaataatttaaatactatgttagttcttttcaaagttagagctaagagaccttaagagcacatttatatactgatgttaaaacaaaaagtagccaaagtaacatatttttattagcaaggcaaaagtaaattacacatgttttatcaggacacaaggactgtggcaagctgttatcagtacagccagtatttccttgagttatactggcctactcatgactctttaatcctcattctggatcatactatcaagtcagtagtaatgtaaagcagtctcaagatgtcatgcaagtggagcatttataccgagtggacttctgtatcttgagtgatttttaaagcaactgcattttgctgggtattcctcctaatccagccctggacattgtagagtttggaattatggatgtttacccatttgccatatgttcattatcttgactttacgaaattaaaagcatcctggaacttttccaaacatagctgattttgttttaaaatttttatcaactgattagtgaagtctgccttctagaaaacattagttattggttctgctgggccactttggtagtaaactgtataagcctttcagaattaccttttaaaggagctttaaaaatatacatatttctgagtcccatcccagaattattgagaagttcaaacttatggtggtggggatgaggagcacwcagtgcttgtgaagcacctcacaactggtctacagattagttttagggaactaatagtccagaattctatttggcagtctaatatttagaattttgaatattctattggatgcctttattgtttatttcttctaatagaaaagttaaaactatgcatgggcactcacccacatggaaatacttgcaacacgatatgtatcatttttacctttcccccaaaactttatgtactattgctaccagaacttgtcctgtctttattctttaagcattgatctcctatatttgtcaaacattgagctaagctgtagggacactaaagctgttaaatcagtttatagtatgtctcctcaagtagcttatgatgttgctgagaaaacagacaaattataaatacaggtaagcacaaagtgctataaaaagaattgataatttcttttaagaaggaagtaataagaagttatttttggtgatatacgttttccctgttttatgagaagtagaaatattgatgctatattggaaatacaagaatgtggcttttaggttagtcaaatatgtttatacagtaaacctgatagtttaaaatttttaattttagcagtaactctggaaaaaggtgatactgctacttaagccacaaaacccaaactggataccaagtactatctctttaattctaatttgccattctggtattagtattaaagaaataatagattcaattggtgttctcttacttatgcattgcttacaaggtgtcttcaaagctttactcattaccgaatcccagtgttctggtgtccttgaggctggattttctacgaatcatctgcagtcatgagcactatgttacattaaacttaccctgcagcttacttactccacctgcatctccatcaccttctgtttcttctgcaacatctcaggtatgcaaattgtgtgaatatacatatatttaaagtcacttttgtgaagaatagttttaaacaatggaaaaaataacacttattgaataacagctgtatgataggctcagttcttagtgctttgtaagtattaaaagtcatttaatcctcagaataactctaaaaaggcaagttctgttattatacccattttgcaggttagaaaaacagaaacacagaaaggtcactgagtaaaaagtggcagagccaggttttgaaccaaggctttattttagagcccaagttcttttttttttttttttttgagacagagtcttgctgtttctcccaggctggagtgcagtggtgcgatctcggctcactgcaacttccgcctctggggttcaagcgattctcctgcttcagcctcctgagtagctgggactacagacgtgcgccactatgcccagctaatttttgtatttttagtagagacggggtttcaccatgttggttgtccaggatggtctcaatctcttgacctcttgatctgccggcctcggcctctcaaaagtgctgggattacaggcatgaaccaccgctcccggccgagcccaagttcttaaccactgttttatattcctttcatagacttaatgcacatgtgaatgaattcacctaaataaacttactaattaagatgttttcacaaattgagttctcttgaagcagacaccaagaatgagtttcaaatgcaagatgtgttttagagatcaatacctgtgaaaggaagtgggggatgaagcataattgaacagagaaagaagtcaaactgcagtggaggcatgacaaagccctgcttaactctcttgtatccagaaaccccaaaggaaaccagatgaaaattgatgggtttttcagtgggtggcacttgacttcaacagctagtaggttctctgtagatgaaaaagtgttattgtagcagttaatatgtatgtcctcttttataaattgagatkaagagattttgyggttttagtatcagagaagcctatattttcctttgtccagtgaaatactcgttctactgtattattcctgaggcaaggaggctactttttttaagctcttaatttctaaagtgaaagttagttaatcttaatacttcttaattttgttttcaatatatttaattcctgaataggattctgtaggtgatatctcatatgcgtgatttaaaaaacaaaatttaaacttcagctagaaagactagaaaacatcaaagagtacccacaacttttcattttatctctgtaaaaaaatcttctggatcagcctatttttccacaaactcttcagtctggctagcatgcccttaatctaatggatgaggctggcctttttctttctttccctgtcctctgccaaagatgtagctacacaaagacagattaatcataaatatggttgctaacacccttaaggaaacatatttgtttatatctaattccttactgaacatctctttcagccaggaaatgctcatagaatttcttctgttatcttgttgcccactttctcagctagctatgtaattttcagattctttcagataacagagacatcactcttttttgaaaggctaagaagagttttatattcttattaggagaagatttcgccatagagaaatgtgaaatctattgttgcactaagaaaccccacatgagtcctgaatatggactgtatcttggagaatgctataatattttgaagtattaagatgttaaaaaaaaaactcagttagacaacaaaatgatggtaattttccagagatagtatattctgtgaaaaacaattgtactggtgtttcgaatttctctggaaaccaatagccttgactatgaatatttctcttgtactttggggtaagtgcatactatgtcatttggatttagttgcttcttttttccatcagagtgtggtattgaaaagtggctaagagaataaaggggaaaatatgtaggaaagtatatgtgaaaaaagaaatgtaaaataattaaattttcaatgattaatttctataataaagtaattaacttaataaagcaatctcatcatagtttcctgtcccaaaagtctgaaaagttgctttgtcttcagtgttagtaatataaaataaactaccctgggaaaaagtatttcatttcttatattgctctgtctgtaggatgctttgttgcactgctgttatagtcttgttctgcctcactttccracagagttctggattttctacgaatgtacaagaccaaaagattgcaaatatgtttgaattatccgtgcctttccgccaacagcattatttggcaggacttgtgttaacagagctggctgtcattttagaccctgatgctgaagggtgagtacactagtttttaccttgtagaatatgagtttgatttkgaacagtggacagaagtattccactcacatttcctgaggattaggagaataatctttcacactctttttctacttccctcttcactaagtttctcacttatattatttatctgtttaatcagttttatgaaagactttttctcatattttgtcacctctgaatttgggatttgtcttaaaattggtggcgtatcataattcatttagtagtgttctttttcttcttaatartatataaaataaattatgcatattagtagatagattttttgatgtaaagtaaatgcttgtcatttgaggaaaatggtcttttatttgattccttgtcaggaaaatttatctttttttgtgtgtttgtttgaggcagagtcttgctctgtcacccgggctggagtgcagtggcaggatctcagctcactgcaacctctgccttctgggttcaagcaattctcctgcctcagcctcccaaagctgggactacaggcacacgtcaccacacccagctaatttttctttttgtagtagagatggggtttcaccatgttgtccaggctggtctcaaactcctgacctcaagtgatcaccacctcagcctcccaaagtgctgggattacaggtgtgagccactgcacctggccaaaaatttataatttgccatcatactatgtagcattttatttcaaaaattgccctataaacaaatatctttaggttttaaaaacttccaaagttgtgtacattattaaaggatgtttggaaattgatgtagttagaaaagtatattgtctgatgatgtgatttttgtttgtttgtttgttttgtttttttgagaataggtctcactctgtcaccctcacccagggtggacaacagtggcatgatttcagcctgctgtaacctctgcctcccaggctcaagcaattcttctgcctcagccttctgagtagttgggactacaggcgcgtgccaccactcccggctaatttttgtaattttagtagaaatggggttttgccatgttggccaggctggtctcccaactcctggcctcgagtgatcagcccgcctcggcctcccagcatgctaggattacaggcgtgagccactgcaccgacctaatgatttgaatttatagaagtagcttaatgtagccaggtgcagtggctcacacctgttttcctagctttttgttaggttgtgtaatcnnnnnnnnnnnnnnnnnnnnnnnnnnnnnnnnnnnnnnnnnnnnnnnnnnnnnnnnnnnnnnnnnnnnnnnnnnnnnnnnnnnnnnnnnnnnnnnnnnnnnnnnnnnnnnnnnnnnnnnnnnnnnnnnnnnnnnnnnnnnnnnnnnnnnnnnnnnnnnnnnnnnnnnnnnnnnnnnnnnnnnnnnnnnnnnnnnnnnnnnnnnnnnnnatagagcaagacttcatctcaaaaaaaaaaaaccttgatgtgttgtggtccagcatcccatatgaggtatgtccatcttaatagtatgaccataactcatstgggtgataatsgcttaaaattttttttttgtagtaggaataatccaagtttataatgcagtttagcctcatgcaagaacgaaaagagatactttaaataggtttttacaaggttctgctgatatatttattgaatgaataaaagaggaggtatgtcaagttcttagcagtatgtcaggggcatagtcaataccgaataaattgtgaaaggccagatctgcaagtgaaagacatgtgttttttataatggcaacttcctaagtttggaatctattttaaagaagtagtttttcaccctgtgttctaaacagaactgtagggtcctgaagaggtgcttaatgggtttctgtgtagattggggtgggcagtgtgtgtgcagactttggagtatagagagggcaaactaaatgggtgaaactctgggccttccacccctgcttggcgccacttttgtattttgccatttgacaaatgactrtgatgtcattaaaaaaaaataaataaaggaatctgttatttggggaaaaaacactctaaaaacaacttacctaaacatactagctttttaaaataactggtatagctcactcatttgaatctgtattttcaatatttttacttggtatgtgaacctgtttttggttacaataaatagaaaattcttcctccagctggctttattaaaggaaggaaatttactatttcaaaattggaagaaagataggatttttattatttattatttattatttttggttttaaggagcagaaagtttaataggcaagaaagaggaaagaaataagaaaacggctgcctgatatagagggagggggggctccgaacggataaacccccagaaagataggtttttagcacagtaatatcatcagctcagtgataccatcatgattccagttctttacatttcttacctctgctagaagtgtcagctttatcctaaggctggagcctctcatgactgcaagatagtcttgcatatagttgccatatataggttcttaaggccctgtgtatctggctcttgtctactcctgccactctcttcctcctcatatactaagatctagccatgctggcctactttctgtttctctaatgcaccaagctcattcccaccttcaggcctttgcacttggatttttctcctcttgaagcaatgttgaacagccctcagatgttcacatagtcatttcttgcttgtggttcttcaggtatctgttcaaacagcatcttctcagtgagattttcattgaccacctaacctaaattacagccatattggccaggcacagaggctcatgcctgtaatcccaacactttgcgaggctgaggcaggaggactgcttgagtccaggagttcaacaccagcctaggcaacatagtgagaccctgtctgtaccaaaaaaatttttttaattagccgtacatggtggtgcatacctatagtcccagctactcaggaggctgaggagggaggatcacttaagtccaagaggtcaaggctgcaatgatcacaccactgtattccagcctgggtgacagagtgagaccctgtctcaagaaaattaaataaataaataggcctggcatggtggctcacacctayaatctcagcactttgggaggctgagatgggtggatcacttgaggtcaggagtttgagaccagcctggccaacatagtaaaaccccatctctactaaaaatacaaaaattacttgggcatggtggtgcttgcctctaatcccagctactcgggaggctgaggcatgagaatcacttgaagctgggaggcggaggttacagtgagccaacatcacgccacagcctagacaacagagcaagactctgtctcataaataacagccatgttgtccttgtcacaatcattctcagccatgtaaccctgttttagtttctacaaggcacttatctgaaatttgcttgtttatgatctgtcctctcccagtagaatgtgagcatgtgagagcatgagaacaggcaccttgtctttcttgttcagtgctgtattcccagtgccttagtattatgtctggcacaaagtggacacttgctaatgtatgttaatttgatgaatgaaggattaactgtaagaaactcatatctcatctttaaattttactgtcttgggaggtatatagattatatgcagcattgtcttggagagatccttgagaggaatgtttgtcttttaatccacatgcttgctacgtaatcaagaataattccttaagtggcaataatatgttctataattaatgaaagatttgctctttagaaactttcattgtaattagaaagttaagactgcaaaacagtacactatgattaaatgttagttttgtagtacatggttctttagaagatgagaggatttatgttccttaattgtagcatttataaagaattgaagaattatttgaagtattgaagaattattatgtttgtgtccgtgtttctctcttgctaaagtgagccacttaaaaatggggaatgtctttatcttcaacatctagaataggatattacagatcttgtattaatatatatttaataacaatgggattgagcaatgtaagcatatgaaaaggctttatgaagacaagtggatagagtttakatagattggagtatgagtatggtagctgctgagagataaggcatacctttggcaaacattagtgctgatacagaaagtcaaagaggagaacgtgaaaagcaattggcsagaatctaagccttgagaataatgatgaggaatctggggaaggtgggaactactggagaaaatcctgagaagagaatatataaggtgacaaagtgtcaagtggagctggagaatgagatctgagataggttcactagatgtggttcttgacaatgtttaaatgtatactttccacccaccgaccctccctatacccactagtcartaaaagggaaacattattgaggccccagggccatggggcttgggcaggaggccacccagtgggagaaggaggagccaggggaggtgtcttatttgaccttcttttgggggcacagcatgttttgtggctgtacttcttgcggcagttacggcacagggatgcaggtgagcataacccttgaggcagatcatcttgtcgcagttgtgtttctgagcgagctggtgcaggcaaggcccattggtgccacctcacgggcaaagcaccaagtgcaggcagactctttctggatgttgtagtctgagtgtgtggccatctctcagctgtttgctttcatgtgttttaagcctctataaaagtatactttatgattaaagagctggaagaaagaagaaagaatctccatctagatttcacatacagctttgtaaaatggcagatacaatcaagggctctgggagaagactacctgttttctaatctcaactttttaaagtgatgatgtattttcaagataggaaaggcatatttgaagaaagaagggaagaacctaatgaggggagacattgaagctgttgaaaaaagacagsgttcattgaacatatgaagaaattattttctgtgagaaggtacactttttctgagacaaaaaggaaagactctttgtgagctataaagatggaattgtgttaaaagacctggccagagcaaattcagaatggctcttctttcctaagttggaagtaaggtcttctgttgtgattgacagtaaaaggcttaaggagagagagtgagatctgaaactgcttagtggatgcagcattaagggccagttaaagttggagtagatgaattttaaattagaatggtttgcatagttaaagtgctgtcagcttaagaagagacaaaaatgtttaagtgaaagtgacccttgttagtgtattagcccatttgaaactgagggggattgagagtctaaaaaagttgtaaggacccaaatgaggtatattagtaaagaagtgcagtttaaatagagatgtcaaaggcaaccccagcctgtgggctacataatccattaggtaggggatttttctttccgaaaaagggaataatttatttttggtaaatgtgaaaagatctgatttgatgaaataacaattacagcattttaaaatttaccttgtttagcttcaaaatgtaactataagtagtcttagtttctttatattcaaatacactaataaggagttaatgtaaaaatattcagatttacttctaagtgaatttgtatagcatttccttttcttcaattcttattttacacattttttacatttttatacatttattttaaaatgagaaatgttttataggaatggaatgcatgcaaatatatgacaaaggtaagaaattgaacaaaatttattcaataccatgacttactgtttgttttaaagatgttagctaatctctgtggccttactgctttttcttctttgtcttcttctttttaaatagactgtttggattgcataagaaagtcatcaatatggtacacaatttactctccagtcacgactcagacccgcggtactctgaccctcagataaaggctcgagtggccatgttgtatctacctctgattggtattatcatggaaactgtacctcagctgtatgattttacaggtacctagtataattaaggcaaatattaaaggcaaagctcaatgtttaaaagtgttagaaaatatctcaaggatgaagatcttattttaggaaaataagaattgtgtgctgatcaaagtaaactataaatattaaactatattgccagaaaacctttgaccgtgtgagagaattccgtataagattgctttaagtagttcttatgatgaatttaaaaataatgattttatagcaattctgtacctacattttaggaaatgtttgtgtgaacatgcagtatacatctgaaaaaatacaagaaaacttgacagatgtttaccacctcagttttgacttgattcatatatataaaattgaaatgaatattcacttgaatatcaggaattgtgtttattgctaacaccaggttaataagttgaagtggtattacttcttcaaaactagaacctacagagttttattgctcttgctttccatatttagaatttacttaaatacagaatttagtttgcaacaatattttctttagggcaaatgagggaatttaaaccagcaattagcccgatagcttccagttcagtaaaacagaaacatttcctgagtatctaatgtgtattaagaactttgacaggtgctggtgttgcaaagataaccagctatttgccttaagagactgattgttgagcagtctttcaagtattttgatcactaaaatgaatttccttacctgaaggcagaaatgtttatattcttacatcttctgactagcaagttaatgttctctgtaaactataaattattaccatagcaatgagttactgttaaagatatttaaaatattatccaaaagaagtaaatctaataactataacatgtcaacaagttattcttttaaagaatagtggagaataggaaagggaattagttcagctaaacagttttatttatttttttggattatttttctttagaaactcacaatcaacgaggaagaccaatttgtatagccactgatgattatgaaagtgagagcggaagtatgataagccagaccgttgccatggcaatcgcagggacatcggtccctcaactaacaaggcctggcagtttcctcctcacgtcaacggtaaaaacaatcctcctacagaatttttttttctagaaagacaaatatttactaggatatgcccttaaatatatgagatgattgtatcagctgatgcaaaagtgctcagttttatttatgaaaatattaaagttcccagaatattaactgtcttctcccaaacagttttaaaaaatgattacctcaaggtttatgggaaaargccccgtattctgtcattcagaatttggaaaattgcctyattatagatagttcatttctttttttttttttttttatactttaagttttagggtacatgtgcacaacatgcaggttagttacatatgtatacatgtgccatgttggtgtgctgcacccagtaactcgtcatttaacattaggtatatctccaaatgctatccctccccctccccccaccccacaacaggccccggtatgtgatgttccccttcctgtgtccatgtgttctcattgttcaattcccacctatgagtgagaacatgcggtgtttggttttttgtccttgcaatagtttgctgagaatgatggtttccagcttcgtccatgtccctacgtccatgtccctacaaaggacatgaactcatcattttttatggctgcatagtattccatggtgtatatgtgccacgttttcttaatccagtctatcattgttggacatttgggttggttccaagtctttgctattgtgaatagtgccacaataaacatacgtgtgcatgtgtctttatagcagcatgatttataatcctttggaatagttcatttctttatttttttaaacctgttttattctttgtcagccctaagaaagattctcagtcatttgagggtttttttaatctgtgaatatttatacttttttatgttttgaaaacacttgatatttactatgcccctgaacttttcccctcttaaaggcagaaggatcagggcaggaaggaaccaaattgccaatagagcaagatcaagttctaaaagttttaaatgacatttttttccagaaaaatgcagtaatatttaaggaaacttgacaattttatagctttattaagattatttacatatcaaaaaattcacctattgtgagtatatataccttaatggtttttagtatatttacggagttgcgcaggtatcaccacaagctaattttagaacatttccaatacgctgaaaagattccttatacctattagcagtcgttcctaccccagcactagagagtgactaacctacttctatctatagaattgcctattctggacattttatataaatgaaattatttactatatgatcttttgtgtttgtattctttcactaagcataagtttttgaggttcatccatgtcgtgtatgtatcaatacttctttccttttttattgccaaatagtattccattgtattgatacaccaaagtttgtttatccatttgtcagttgatgaacagctgtatcatttccactttggggctgttaagaataatgctgccacgaacatttatgtacaagtctgtgtccacatatgttttcatctctcttaggtagatacctaagagtggatttgctggatcatatggtacttctatgtttaacatttttagagacttctaaactctttttttttttctaatgtggctgtactgtttttcattctcatcagcaatgaataagaatttctgttctccaaatcctcatcaacacttgttattatctgtctttttgattaggacacctttagtgattgtaaattggaacttcactgtagttttgatttgcatttccctaacaacctacagatgttgaacatctttttgtgtgcttattggcacattgttttgtatatctcctttggagaaaagtctattcaaatcttttgtcattggtcagrcacagtggcacacacctgtaattccagaaatttaggagactgaggtgggaggattgcttgagctcaggagtttgagaccagcctgggggacatgacaaaactctgtttctatccaaaaccacaaaaaatagccgggcgtggtggcatgtgcctactgtagtcccagctacctgggaagctaaggtgggaggattgtttgagcctgggaggtggaggttgcagtgagccaggattgtgccattgcactccagcctgcacaacagagcaagaccctgtctcaaaagaaaaaaaaggttgctattttaagatttcttaagagttctttatgtattctggatttgtaaaataatcagctatctgatttacaaatactttctcccttcctatggattatctttttactttcttgatggtgtcatttgaagtgtgaaagtttttaatgaattccagtgtagcaaattttttttatcaattgcacttttggtgacattctacctataaaataatacaataaagtgcatgtacaaaatgtaatgataaaataaacagcagcatatccactgctcagtttaagaaatcagacattacagcctggtaacctttgaagctaccagtggccttcctcaatttgatctctccctcccctgggaatgaccattgttctcaattgtattaacctttttattttttttaacttttcttttgtgaagtatactacatatgacaaagtacataaaacataatgaggttttaaaacattagaaaataaacagctttgtaattaccactcaggtcaaaaacaaggatgttggctgccatccagaagttcttagcatgccctttctcaaccacagcaacccaccaaactctcagtgtcctgattgatgatataattgcataattttgtttagagttttaccatmtaggccaggcatggtggytcacgyctgtaatcccagcactttgggaggccaaggtgggcagatcacttgaagtcaggagttcgagaccaacctggccaacatggtaaaacctgatctctactaaaaaatacaaaaaaattagccagacatggtggtgggcgcctgtaatcccagctactcaggaggctaagacaggagaatcacttgaacctgggaggtggagtttgcagtaagcctagatcgcgccactgcactccaacctgggcaacagagcaagactctatctcaaaaaaatgtatagatagagagttttaccgtctaagtttgcattttaraaatatatagtttatagtaataatatatatatatatatatatagtttggttggttggttktgttttgttttttgagacggagccctgcactgtagcccaggtaggctggagtgcagtggcacgatcttggctcactgcaacctctgcctcctaggttcaagcgattctcttgtctcagtctcccgagtagctgggattacagatgactgccatcatgcctggctaatttttgtatttttagtagagatggggtttcactatgttggccaggctggtctcaaactcctgacctcagttgatccacctgcctcggcctcccaaagtgctgggatcataggtatgagccaccacgtcctgccaaaatactgtagtttagttttatattatgtttttagtattcattaatgttatgaaatgtagctataattcactgattttcatttcagtatgatattccattgtctaactataaatcagtttatttgcccattctgttgataggtgcatgaatggtttctgatccttggttattgcaaataacaattttgcagactttcttttatatatatcctgcatgcatatatatacttttatttagagtattttctagaagtggaatttgttgggtcatagactgtgggtatcttaatctataccaggtaatggccaactattttccagagggcgtaccttaatttatacttaacacatacaatatgagagttctcattccttcacatgttcatcaatacttagagaattgtcagatttttaaatttttgccaatctggtcatttatagttgaatctcattttagcttgtatttccccgaagacttrtgcggtgtgcacttttccataagtatgattgaccatttggattctctcttttgaagtgtctagagttctttgcttgttttccatttggttgtttgcttttgtttaatgatttttaggactttgtatgttctagatcaagtccattgtcagttataagtggttcaaatatttcttctctgtggcttgctgttttacccatttaatggtgaatttggtggttagaatgcctaattttattttactttttatttatttatttatttatcttggagacagagtcttgctctgtcacccaggctggagtgcaatggcacaatctcggctcactgcaagctctgcctcccaggttcacaccattctactgcctcagcctcctgagtagctgggactayaggcacccgccaccatgcctggctaattttttgtattttagtagagatggggtttcaccatgttagtcaggatggtctcgatctcctgacctcgtgatctgcccatctcgacctctcaaagtgctggcattacaggcgtgagccactgtgcccrgcctagaatgcctgattttaatatacttaaatttagtcttgcagctaatattttctatatcttatttaaggaatttttttctgtttcagaattttgaaggtattctgtgttacattcgaaattttttgttcttccttttacatttaattttaaaattaaaatctacctgaaatagatttttttatatacagtgtaagttgggagtccaggttcatttatttatttatttatattgcatattatgccagattatttcagcaccgtttattaaaagaatattttccctacrtctctgaaatactgcctgtatatggtctaccatgtagagaaagtcatacatttttaaaatttttcttggctactttttggccctttgtatatctacataaatttgaaaatcagcttgtaaagttccactaaaataaataaacaaaaaccaataaacctgttaaaattttagttaagattgtattgaattatgattatactattgaatctcgtaatttttgaacacaaatccccccattgtttaggctgcctttagtgtctttcagtacataaacttttttagtttctaccaaggaggactagcatatcttttgtagatttattattcgtgcttgatattttttaatgttcctataaatggtgtctttttcaaaaattctgttttctaacgttgattgctttatatggaaatagaatcaatttttgtacagaaacaaaatactcattatcaaaaaaattgatttttgtacaatgatttttatttccacaatataaaataaatgataaagtgataaactaataacatatttgtagattctttttttctacacacaatcatataatttgtgaataataacaatgtagtttcttcctgtcagtttttttatatatrtaatttattgtactggctagtacctccagtacagtgttgaatagaagtggtgatgtttgtatctttaaaggtaaaactttcaacatttcattcttaaacatatgttctgtatgttttgggttttttttaagataccttcctttattgtggaagtctctttctgttactagtttactaagcattttgttttttagttatgaatagttgaattgttatcgaatgctttttccacattcattgagatggctgtattgttttgctttttggtcttttaatgttgtttatttaaattgattttctagtgttaaaccaacattgaaatcctgaattaaactcaacttcttcatagttgtgtactaatggatttcgtttgctaatattttgttaggatttgtatacgtatgttcctaagattgcctataatttttctttcttatattcttttcaggttttagaatcaagtttaggctagccaattaaaatgaggtagggagttttctcttttatcctcttctctgcaagtacctaagattagaattatctcttcctggaatatttggagaacttatgaaaccatctgtgcttgaagtgttttctttttcaagttttaaaattactgttataatttattatctgtgagactattgaagttttttgtttcttcttacattgattgtatttatttatttttattttattttattttattttttgagatgatatctcgctgtatcacmcaggctggagtgcagtggcatgatctcggcccactgcaacctccgcctcctggcttcaagccattctcctgccttggcctcctgaatagctggaattacaggtgcctgccactgtgcctgactaatgtttgtatttttagtagagacagggtttcactacgttggccagactagtcttgaactcctgacctcaggtgatccccccgcctcagtctcccaaagtgctgggattacaggtgtgaaccactgcacctggtcttcttaacaactgatttttgtaaattttattctagtagaaatgtattcaaatttcttgacttataaagttattcaraaataccttgtataattttttaaatgtctgtatcatctgtagtagatgtaaacttttttctacggctagatttttgtaccttttcttgtctttatcagtcttaccagacagtcgaaatgtattgttagtctttataaagaaccagtatggtggcactgttgaccctcactttttaawgtttattatttactatcttctgctttctttgggtttacattcatgttctttttctaacttcttgagatagatgcttaactcactaattttcatcctttcttttttgatatgtattttcagcctatgcatttttctttgattgtttagttaaatgctrtttatatgtaacatttttttccctttttttaaattatactttaagttctgggatacatrtgcagaatgtgcaggtttgttacataggtatacacatgccgtggtggtttgctgcacccctcaacccatcaattacattaggtatttctcctaatgctgtccctcccctacccccctaccccctgacaggccccagtgtgtgatgttccccttcctgtgttcatgtgttctcattgttcgactcccacctatgagtgagaacatgtggtgtttggttttctgttcctgtgttagtttgctgagaatgatggtttccagcttcatccatgtccctgcaaaggacatgaactcatcctttttatggctgcatagtattccatggtgtgtatgtgccacattttctttatccagcctatcattgatgggcattgggattgtttctaagtctttgctactgtgaatagtgccacagtaaacatacaggtgcatgtgtctttatagtagaatgatttataatcctttgggtatatacccagtaatggaattgctgggtcaaatggtatttctagttctagatmcttcaggaatcagcacactgtcttccacaatggttgaactaatttacactcccaccaacagtgtaaaagcgttcctatttctccacatcctttccagcatctgttgtttcctgactttttaatgatcgccactctaactggtgtgagatggtatggtatctcattgtggttttgatttgcatttctgtaatgaccagtgatgatgagctttttttcatgtttgttggcctcataaatgtcttcttttgagaagtgtctgttcatatcctttgcccactttttggtggggttgttttttycttgtaaatttgtttgagttctttgtagattctggatattagccctttgtcagttggatagattgcaaaatttttctcccattctataggttgcctgttcactctgatgatagtttcatttgttgtgcagaagctctttagtttgattagatcccatttgtcaattttggcttttgttgccattgcttttggtgttttagtcatgaagtgtttgcccatgcctatgtcctgaatggtattgcctaggttttcttcaagggtttttatggttttaggtcttacgtttaagtcttcaatccatctcgagttaatttttgtataaggtataaggaagggatccagtttcagttttctgcatatggctaggcggttccgaacaccatttattaaatagggaatcctttccccattgattgtttttgtcaggtttgtcaaagatcagatggttgtagatgtgtggtgttatttctgaggcctctgttctgttcccttggtctatgtatctgttttggtaccagtacctgctgttttggttactgtagccttgtagtatagtttgaagtcaggtagtgtgatgcctccagctttgttctttttgctcattgtcttggctatacaggcattttttttaaaaaatgtgtatcttatttattcaacttagttgcattctcttacatcttccccaaatggtttcatcttctctctctcttttagccagttagtcatcccttctcatcgcctctaggatcacattgcctactacattctcccttctgtcatctgtgacttctaaattgtgagctgggggaacaagtttatcataatcaataggtagcattttcaagattcatctcagaatgactctgaagttcattatgatttcttcttaggcctttgagctatttaagaagttgtttttgtcttaaattttcagtcatgaaaatttctagatatccttgtttctgattttggccaaattaaatgatcagagagcataactctgtatgatatcagtttgttatgtttgtggaaactagttttatggtctagtatatggtcagtttttgtaaatatctcatgtattctaaaagaatgaatattctttcattgttagttacagcattctatgtcctgtactcttgttgtttaaatctttttggtctttactaaattttgcatrcttattctaatatcccactacaattgtggttttgtaatttctccttgtcattctgtcagatttttgtttcttttgaggcctgattatgaaacatttaacacttttatataatttttggtggattgcactttcatctacatgaactatgatgctttttaaagtagttataattacactaggttttctttgctctgtgtgtgtgtgtgtgtgtgtgtgtgtgtatagcatgactttttcatccctttcaacatttttgtattatgttttagatacttcttttaaaaacagcatatagttagatttttttcttgtatcttaaaaatctggtttgttaatctctctctttcactagagtttctaatccatttacatttagtttaattaaattggatgtatttaacattttatgttttactttatattgtcttaccccattatagttttttttttctctcttttattgacttcttgttgttgttgctgttgttgagaaagggtcttgctctgtcacccaggctggagtgcagtggtgcagtcttggctaactgcaggctctgcctcccaggttcaagtgattctcccacctcagcctcctgagtagctgggattacaggtgactgccactgcgcctggctaatttttttttttttttttgagatggagtctcactctgtcacccaggctggagtgcagtggcgcaatctcrgctmactgcaasctctgcctcctgggttcacgccattctcctgcctctgcctcctgagtagctgggactacaggcgcccgccaccacgcctggctaacttttttgtatttttttagtagacacagggtttcaccatgttagccaggatagtctcaatctcctgacctcgtgatccacccacctcaacctcccaaagtgctgggattacaggcgtgagccaccacgccsgaccaatttttttgtatttttagtagagatgagttgcactatgttggccaggctgatmttgaactcctggcctcaagtgatttacctgactcagcctcccaaagtgctgggattacaggcatgagccaccacatccagccagttttgtctatatttctaaacaatattttatttagcttcacatattttcacctttttatgaatatatactatrtgtacttctatgacttgatttttttgtatatgtttgtaagagtcatttatgttgatakgtatagttgtagtctgtaatgtcatagcagtccgttagaaaatataattatgtattcattctcttctcaaaggaagtttgggttgtttgtagtttcgggctgttacagataaaggtattatgaatgttcctttacgtcactctgtagaagagtttcgctaaggtatatacctaagagtggcatttttgggttagaggttatgcacatgttcagttttacttggttagattgttttccagtgtggttctagcaatatatattccttctagcaatgaagaaatatttgttgctccatgttctttctaatacttgatattgtgtgtgttgttggagttgatttataagaagtaatgagatggaaagttgaagtggtggttgtgaagagagatcattaaaatggaggtggtttttttgttgttgttttttgagacagagtttcactcttgttgcccaggctggagtgcaatggcgcaatctcggctcactgcaacctccatctcccgggttcaagcaattctcctgcctcaacctcctgagtagctgggaatacaggcatgcaccaccacgcccagctaattttgtatttttaatagagacggggtttctccattttggtccggctgatctcgaactcctgacttcaggtgatccacccgcctcagcctcctgaagtgctgggatacaggcgtgagccactgygcccggcctgtttgtttttttgtttgtttgttttgtttttgttttttaattggcatggtgggacatacctaaaatggaaatttaggggaacatgccataatgrtaataaaaggcataaggtttgactgcaagggtgagtgtgtgtagtaagtggtattcttgagaattagacaagttggttaaggaagtaaaaaatagcacaggatatttagagaatcaaatacatagacattgaaatcactaagaactgtgacaaaaagtagtgtttaaaatagtgaaagtgagtcaggagctaaaagcatcaagatataagggccagtcttctggagattagtatatgactgcagtgatgaaggttagtaggttgtatagtctgacaaagatacatgtgttcttatacatctatgagaacataagctatgtattcttatagatataaagcagttttgttaatgattgaccatgtgtttcagaggtcatagtggaagaattttaggagaaggggcagacatggcaagtgaggtaagaagagacaatataaagagctatgtgtgtggtgatcagagtccgagtcatgaatgaagccttctgaaggctgggcctgttgaggtggtagacacaaactggggaaaataatttaatgaggttaatcctgatggtctgaaggcagagagtaatcgtgaagctctggttgttataatatgaaggagaggtatgaatcttggcctagaaaatgtagaactctgggacctcttcctcattcctggtaataatgttatgaaacaattctttctgttttctagaggtcatcccttctcaaccagaaaattaagaactaatgggctagggcatttattgtaggtgatagattaacttctatacacctagagtggtccttgctatcaatgtctttgggagaatggggaaaatagtccctcaaatccttttttgtagggcttaattatgccacggaaccctggttgagactgttctggatactaatctcaggttggttttatatgtgcacatttctactaatttatgatgtgcctttttaatgtatttatttgaatgaatacaaattctcatttttaatgtaggcaaatgtgaccatcttttttatggtttatgttttttatgtcttatttaagatatactatcctttccccaagattataaatatattgtcttatatttcctcctgaaagttttaaacattttgtatttaaagttctttctttgtctagatttattttctgtatggtggtacaaggtaggaatctgctttttttttcctcaaggaagatcagttgtctcaacatcatttattaaacagttcatcctttcagtagtgatccacagtgccagctctgtcacagatcagattttcagatatgcataggacactttttgtgttctttattctgtttcatttgactgccaaaaatatgccaaaatcaaattgtcctaattattttagttttttagtaactgcagatatctggcagaacacattcatctccctgctccccacatcccaccttgttcttcttcaagagtatcttggctctctgcttttcccccattaaatttaaaaatcattggtcaaagttccaggaaaacctgactgggattttgattagaattgcactgatcctatagaacaatttgatggaaaactgacatctttacattactgagtctttttcatgtttgtcttaattcttcccagagatgtcactgtgttactggcaatttatgtgggaatataagagatgtcagcatatgcctgtttgtcaagatgagaataattttttattgtatttctaaaaaataggtacttgaaaattcagtcagtgctgtgtatttatgcatatctgaaagttcggctataaaaagtgtctgtctttaaaataaaggagcattttccttatgagaacaattgtggatttagggatcagggtcaaagttcttttgtgcccagctcagaagcagtatagcaaaatagttaagcaagcttatgtgggtgaattcacttatatgcatgggcagccatgagaggcagtaaacaaagtggatatgagcttggagcttgtgtctcgggagccacactttctgtgttgaaactgttgtcccgcctcttattacaaaatacttctggtggtcaggtttttttttttttttttctgtaagatgaggtgagtaataatacttatttctttgagtgattgtgaaggataaataacttaatacacataaagcatttggtcattaattatcatccactatagaaggaagattggtgaggtagttgagatcatgacttcaacagttgtgtatgttcagctttcctatgtctttcctctcaacatcccctctacttcttcctcatttttagttagtatatttgtcagccgagtattagaacattgtataatagtgaagagtatgggctttggagtctggttaacctagactaaaatcctagctttaccctttcttggtatagtaaggcaaattactctctagccttcagttttcttgcctgtaaactaataataataatagttaatgttatagtttacagttgtgagagctaaataaaacatgattagcatagtttcttgcacatttcaaattttattttttgccatcatcattattattattattatcatctgtatttttatctgtaaaattgggatgatacgacctgcttggcaatactgttggaggactaaatcaaataatgtatgtaaaatgtttagtatgatgactgaaacagagtgtatgtccaataagtggtactgtaaatgtgtttttatttttycatttctgttttacatactatatactaatatagattgatgattgaaaatagcatttcaaccttatatgctataagtagaaatagctttttacttctatatagcctaagacttttcctttttgtatcagtggtgcttgattaaaaacaatagtcttctaagtctgacatacatgattttgtcattactttctactcttagcccactcttatttactgtgagtcagttgcttttttcctttattttcattatatctgatattctgtgatatatatcttttagtttttaatggtagaatcttttagtttttatctttatgttttttattaacatttatttatcccctgctggcagtcatgcagtagattaaaacaaacttctgttatcaggaaaggttcattaaacttcaggctcttaaccttaaggttatatatgatccttttgtacaagtgttgtctgaatcaaatggtttttaattatattatttttaagcaacttttgttttattgtttttagaagaaaacagttgatagccaaaaaacaagaaatggtctttgatcaatctgtctcattctactgctctttattttcagagtggcaggcaacacactaccttttcagcagaatcaagtcgaagccttttgatctgtctactttgggttctcaaaaatgcagatgaaacagttctacagaagtggtttacagatctctcagtcttgcagctaaaccggctattagatctgctttatctctgtgtgtcttgctttgagtataaagtaagtggtcattgtaccattgcaaagaacaagaaaggagaaacataatgtggaaaaaatagaagaaaatttcctcaatacctcttctcttctaatgtttacattttaggggaaaaaagtgtttgaacgaatgaatagcttgacctttaagaaatcaaaagacatgagagcaaagcttgaagaagctattcttgggagcataggtgccaggcaagaaatggtacggcgaagccgaggacagctcggtacgtacacaatagcttctcctcctggtgagaatttcttcaatttccttgagttgtatattgtaatgatcattgttgctagtcttcaatgtcaatcctatgctttttaaaaagtgttttaagtgtaactgtgaattaacttgaataatcatttctctgcagtaataaaagttagaattctgatttaggtgagtcagcataccgcccccccccccccgttttctctagaaagtcttctctagaaaacgttctctagaaagtcctctctagaaaactttctctagaaagtccttatgtgattaatagcatccatcctccctttttaaatagactttatttttgtagagcagttttaagttcacagcaaaagtgagcaaaggtacagagatttcccatataccccttagtatgcgtagcctcccccattattaacatcccccatcagagtagtgcatttgttgtaactggtgaacctacattaacacatcatcacccagagtccgcagtttacattagggatcattccatataacatctatttttactttttttttttagttgagacagattctcgctctgtcacccaagctggagtgcagtcgtgtgattgtggcttactgcagcattgacctccctcgcccaagcaatttttacaccttcatcccccaatacacacctaccctggtagctgggactacaggtgtgtgccaccatgcccaagtaatttttttttttttttaaacatggtctcactgtattgcccaggctagtcttgaaattcctgagctcaagtgatcctcccaccttggcctctcacagttctgtgagccaccacgtctggcctgtttttactctttatttgcaaaatgaattaatatgccctgtatataaggcaaaaatattgcccatcaaactcaaatatcagtgagacaaaacagtttagtagcatttgagactggttttctaatcccaggtctgctacccattagccaaataaccttggccaagtcacttaatctccccatcttccttttccttataaatttgtgattgttttcagaatttagaagatagtgtaactaactgatcttatcatctttatagtaaccatgcatgcagaaacgttttgtaaattctaaagtgacatacagacaatactgttgctaagagtttcttaaggccagggccatgggttggtcatctgtgtagatgatacatgccaacagcacaatatttatttgttgacttaaaatatgaatgtaagtgtgaatggatttttaattgttttctgacagttcattagcataataataatctaagtatcatttatatactatgttttgtaataatgaaaaggcacagtctttgcctttaaaaaaattaatagagcaccattttttcactttagttatatacaatttacagtgtacttttgggtttgtttgaatataacaattgaagtcttcttgtcttataattcttgtaattcttacttgtcttgtaattcttatttacatttctacatttaagctaggtcaataatagacattggcttattaggtctactaatagacattgttttckttttcttaactttcagttctaagacattattaactattgagagtttcgtgggaaaaaatgtaaatgatagaatattatagttaattttgctaactatcttaatataggcatatctttttgtttttttccataaatttcytaaagacatggatttcagaatttaaaaaagagaaagagataaggaaagaaaggaaagaaaagggaaagaaattagaagaaatagagccatgtcctttattgtacaggaaatgattcttatttctcagtattttttgtatttctttaattgacatatgtatagttgtattcttttgtatttgtttttcagtatttttaaaaatttatatttgaactctgaacatttactttcattattcttcatcctcttaaccaatttaaagtcttaccttttccaaaaacaagcagttttatagttgaaagtttgaaattatgactgagtccattgtttaaatgtatatttgtgtattctccacattctcaatgctgtctccactcctaatggatttgtatgaatcatttctattgctgccaccccttaaaggaacccatacatgcagtctgccttcaaacctagaaaccactttatcagcctagacataacatgcttggacaaagtacatatcatttctgttcttaaggagcttatatacttgtggtcctaagtgttatggaaaggaacaaagcaaaagaaaaggaaaaggaggtattggagagtgggaggcctttctaaggaggcgataaaggaaaatttgtgagaagaacaattaggaaaaaggaacaacaaccattgcacaggttgtaagtcagaagcgtagtcagagtatatactgatagattcgcaaggataacagaaagcggtaagcaagaggaagaatggtaggaaataaagtcatatcatgtaaggccttataagccatggttaagattttaagcaaaccaatgttagaacatttgcttatttaagtgggtattgttttaaagaaaagatactgcatatagcaagtacatttcttctgaaattattgtgaaaatttttaataaaaagcaccattgtcaggtttttcmacttgtactgaggataaaatggcttgtacaaattattgttgtatatttcttacatgattgcaagtatacatatatgtggtccaactgaaataacatttgaaaattggttttgaaatttatttgacagagagaagcccatctggaagtgcctttggaagtcaagaaaatttgaggtggaggaaagatatgactcactggcgtcaaaacacagagaagcttgacaagtaatacagctttctattttatgttactgatgggtgtgttgaattttaaaatgtaagaggaaaatgataacttttactttatatttacatttagtatttacacttaataaatatattaagtcttagagaacaaaatatttaatttaaaaattttagatttaaaaagatttggaggaagaacttctcgtggtatagtaaggcaaaatattatattttaaactccattttctttaaaacatcctcttggaaaatgcattcagcaactattttttgaacatattttaggtgtcacattgaactaatatttcaaatattacaaagaatcagaaacctgacatttgtcgttatggagcttataatataattcaagaaagacaaaacaatacaggtcttctgtttctagcataaaggcagacttgatacattgactgatcctactgccataaacacctacaatacacttacatgaatcttcttactgcccaagtggctgcaggtaaacttttctggcttgagatttggcactgagtcaaggggctaaaatttttttcttgagaatttctaattataagttagcccgcaagtagcttcactggcccataaaactttgagaatggagtgaccaactcatttcaggtttgcctagcactctcccagttatagcactgattgtcccacatcccagggagccctttagtcctgtcctaaggcaaaccaagatgattgattaccctatctgagaaccatcatcagcccaagcctcagaagattctcacaaataaactttcacaatattttctcacagacagtaaaatcataaaacagaggaaacaagtgagagccagcagagaaacaagtttcagtaccatatgtatgagagcttgaaataatcagatattgaatgtaatataaatatattaaaattcttaaccttggaatgtgtgctttcctttctttttctccgtctgtccaaatctatttctctgatggtttttctacatgtgttattttttagaaatcacagagtagccaggtactgtactatcagtatagtagtgctttatttctgcatttgtagaatgtgttctcttggcttatcttgctgtgttttgagggagacttttttggtgttctcctgattctttttgtttaaaccatcttatgtttctttataaaatgtcactggaaattttaagtttgaacattaaatattttattttccagtttaattttgataattgtattcttttttttttttttttttttgagacaagatctcactctgtcactcaggccaaagtgcagtggcacaatcatgactcactgcagccttgacctcctgggcttaggtgagcctcccacctcagcctcccaagtagctgggattatagctgtgcaccaccacgcccaaataatttttgtagagacagggttttgccatgttgtgcaggctggtctcttaactcctggtctcaaggatcccctacctcagcctttcaaagtgcttttattcttaaattgaatttgtaaactgtaaattaatgaagtattctctttagtggtaataataaagactcacagacttacagatctaaaaacttagaaaagttagtgtttaatatggccttgtactttatgtgttattttgtctactttggtgtaatatatagtatctgtatatctattattgctaaaacaaaaatctcaactatattcataaatcatgtgtaattattcttacatttttatttgcattaaatgatacttttacaaatattagtatttaagtaaaccactttattgcatcaaactgttttgttcttttttctttattatttttctagctttattgagttataattgacaaaattgtatatatttacagaatataacatgatcttttaatatatgtgtacaattgtgaaatgattaccacaggcaagctaactagcatattcgtcacctcacatccttttttccccaaatttgttgtgtttccaatgagtaattccatctagtctcactgaagagttaaattatcatctgagcatatttatataaaaaaaattgggggaaaattagatgaaaccttagacaaawtaagtacatttatcctgaatacagacattggaaatatttgaaatagtaagatgaatactaaatatttgaatgttgttttccatgaagcagtcctaaatacaagcccacatagcaccacctagtgtcagtgtcacttagaataaaactgtctgctgcatgtttgaaagctaaaacataaacatttatgcttttagtggcattacacttctgtaatggggtgagaaagtgtgtattgttgtggttaacaaaaaagctgcataartgtgtaaactactgccttttttcttattctcttgtaattttttatcaggcaaatattgaaaatggtttgaaattttttatttctatgcatccytaagtcttttcagaattgtagttttcaaaaagataaatataatttcttacaatattttgtattagatcaagagcagagattgaacacgaagcactgattgatggaaacctggctacagaagcaaacctaatcattttagatacattagagattgttgttcaggtaagaatgcaaagaagagaaatttaaaatacggatttggtaaattgaggttggagggaaaagtgtttactgtgagccataaaattacattttattaaatattggtagttcctaaaagtttcgttccaagcattctgagattctctgtaattataaattcccatagcttcaactgtttcttcatggaggatgattatgaaatctttatctccttgtctttccccttgatggcctagtcttgcatttccaaatatcctctgagtatttataggtggaagttctgccatcaggtgagattcaacatgcatgtatagctatagctacatatagataaactgggtttatgcagtatcctctgtataccacagcaatgtttcaggctttttatctataatcattgtgttgggtcctaacagttgccctctgggcagtattctgtagtaacaatgtgatagctgacatttatttagttttttctgtgttaaacattgtcctaagcactttacaaatattaactcatttgatccttctaagaaactcatgacattgaaactgtcagtatcctcatcttgtagatgagaacacttaggcacaaagatgttaaataactgcccataatgacgcagctagtatgtagaagagccaggattcaaatcagttagcaagatctttcagatgttttagtaaatatatctctcacctattccttccattccttttctactaccactactctgccaggttcatatttccacgctattacaatggccacctacttcataactcactctgtattcttcccaccatccattctgtacattgttgtgagaattttcctttaaaagtattttatggctgggcacggtggctcatgcctgtaatcccagcaatttgggaagctgaggtgggtggatcacttcaagtcaggagttcaagaccagcctagtcaacatggcaaaaccctgactctactctattttatttatttatttatttatttatttatttatttatttatttttgaggtggagtttcgctcttgttgcccaggctggagtgcagtggygcaatctcagctcaccacaacctccgcctcccgggttcaagtgattctcctgcctcagcctcccaagtagctgggattacaggcatgcgccaccacgcccagctgattgtgtatttttagtagagacagggtttctccacgttggttaggctggtctcgaactcctgacctcaggtgatccacccacctcagcctcccaaagtgtggggattacaggcgtgagccactgcacccagccaaccctgactctactaaaaataaaaaaattagctgggtgtggtggcgcacacctgtaatcctagctactcaggaggctgaggcacaagaattgcttgaagccaggaggtggaggttgcagtgagccaagatcaagccactgcacttcagcctgggtgacagagtgagactccatctcaaaaacaaaaaaaaaagattttatcagtcattatcctgactaaagttttaaaaatagaaaaaatttaataagtccaagataactgatcccaagatggttgcttgagctgcggccatcatgtctgtatttcattcagtgaaaagaaacagcagggacagagtacatttctttttttaagggcatgactcagaagatgtaacttctcttttgttcacctctctctgtagccggattcaaagtcttcagctaaaattcaggatttcaattattaaagaagaaaagaatggttatttgtgtaccaccaacattttttgctctaggcaccactcaatttttcagccttatctctagttattttctacatgaacctcaagtcaattcaaatttacttactaattttcctaaaacacaccttatgatttcttgccattgtatcttactcctgttttttctcatttaaattatatttattctttttcccccttttcttattcaaatcctgcttagctccttcttgaagccatcctagatcttatgttatcatttttttatcttttaaaactttacttatacatacagggaggcctttatttatacatagggaggcctgtaacatccataactaaattgcaagtacatctctattttatttgtttatttttaaattgcagaccgtttctgtaacggaatccaaagagagcattcttggtggagtgctaaaagtgctactacacagcatggcctgtaaccaaagtgcagtttatctacaacactgttttgctacacagagagccttggtttcaaaggtaggttattttgtacctgcagtgttgtcagactttgttttttttattaacattgtctaagatcatttgacacattcattggttaatatatgtagtaatatattaatgaatatgtgtagttaaaatttaaataataacctaagacccttaattcttctttgcctctctactgctgcctgccttttagaatttttcatttattcgaatcacctttaaccagttctggtttgaaaaacagtaacttggatgtggagaagggcctgaaattaatagccaatcttaaatatggggcttctcttgttttctcttcacttggttctgtttttataaaaaactcaatttataaagaattcaatrtataagcaattcaacccactgaaattattttatgatgaatggaaaagaaggtatgtgtttgttcaactgctttaaatgtttacttcttatatttgttttcccttagaaatatgtatattcttaaattttgaaggtagctatttcattttaatcatcctagaggatggaatgcagagatgttgatgaaaataacttacgtattattttgtaataaatatagaattcatatatgttgattactargtgttttatgcacattctgatagaagcttcacaacaatcccttgtagatatattattaggcctattttgtggatgagaaaacttgtccaaggtcccactactagttagtaagtggaataatgagcattcgaacccagtttgactctgtgtctcacactattaaccattagctaatattgtcctaaccattcttttaatttctgggctatactaacaagtctccagttcaggttatattaacatatctcagaaacttttactgtaaaaattcagtggtggtttgttttgttgttttacagtttcctgaactcttatttgaagaagagacagagcagtgtgctgatttatgcctcaggcttctccgacactgtagcagtagcatcggtacaatacggtcacacgccagtgcctccctttacctactaatgaggcaaaactttgagattgggaatgtaagtattttatcatgaaaattctctgtattcataatgaaatataacttctgctgatagttattaaatcagtttttgggagagcatggagttttttgtatatttttagtctaatcrtaggctatcttgatatttctcattctgtgtatatcttacaaaaatccaaatctccaattgtgtgcatatcatgtgtacgtatgtatgtatgtatgtatattaatacagacttagaatataaatgtacattgagcagttttaaattttaattgtccctaartaaaaagaaatacaagtttaagtatcttggcttgatattttacaattacatgtcacagcctttgaagaattccattttttcatttgtcttttattatatgttatattcatgtgttatatttttcctttttgagtcaaatatttagttcatttatttttgcttatgtaagtatttaaggccttgaattttcctttaagtgctatttttggcgtctccttggttctgatatttagtaatgttgtcatttcagtttgtgttttctttttaacccaaagagttgactagccttattttttttttttttttgagacggagtctcactcagtcgcccaggctggagtgcagtggcgtgatcttggctcactgcaagctccgcctcctgggttcacgccattctcctgcctcagcctcccaagtagctgggattacaggtgcccgccaccacgcccagctaattttttgtacttttagtagagacggggtttcaccatgttagccaggatggtctcgatctcctgacctcgtgatccgcctgcctcggcctcccaaagtgctgggattacaggagtgagccaccgcgcctggctgctagyctttttgtttcaaagttttggctggctcyagtggctcacacgtgtaatcccaacactttgggtggccgaggaaggaagattgcttgaggccaggagtttgaggccagcctgagtgacatagtaaaaccctatctctacaaaaaaataaataatactagccgggcttggtggcctgtgcctgtggtcgcagctactcgggaggctgagatgggaggatccctttgagcccaggagtgtgaggtcgcagtgagctatgaacacaccactgtactccagcctgagtgacagagtgagatcctgtctcaaaaaaaaaaaaaattgtttatgttaattttcagctttattacattgtgattgtacaatgtgtattctgtttctccctttctttactgtggatctgtgtatttgtgtgtctaaatataatccatttttatgagtgttctacaaaaaaactttaaaaaggaagtagttctgttttcagaatattgagttaaacatatactagataaatacaccttattaattacattattgtgtctctctatatccttgtttttgtttcacttggtagaagtaaattaaagcctattactgtgtttgtctgtttctcctttagcttttatttggtgtactaatactcataactactgtatcttcttaagagtttttctcctttggaatttaaaagaactcgtcttggttttacttaaaacctttattctattttattttttggcctgaatttcatctcttatggtattaagattttgacctctgctttctttttaatttgaacttaatttaattgcctttgcctgttctttaattttcactttattttagatgtgcctctcatatacaacataagagttgagttttgctttgtgatccaacctctaattgaattaaacctttcatacttgttattatattacatacrtcctggaattctattattttgttatgcctttccctcttgcctcccctttaaaaaaaattgtgttggttgttttcatcttacactatatggtctgtttaccttgttttggggatgtagtgtttatcatatttagcaaaatttctggttttgctctaatggttgcctttatagttatgtaatacccctagtactctatttctttagatcatgcattctcaaccagggcagtaattaccaccaagggagtgaaaattcgtttttgtggaggatgagaaaaatcttagcttatggtcctccaaagctcaacactacccaacaacatggcattccttagtatttatttgtctcattggtcttattggatatcacatgagcagcattgacattaagttcatggaagataaacaaaaaacaaaatgtatgcgaaattgggcttataaaactggagaatagatgactgtgatagggagacttttaatcaattgcttgatctcagtcatatgrcaagaggttgcttccattggctgccttgtggatattgtttatgtttggttctcagtgcattcgtgtgtgacttgggctttgaaaattaagcccaagaaaaaaactttccaatttattagttcattctacaaaagttattcaacccatttttaatcatgtcatttgctgaaaataaaaaaagtcaacaatatctgaatgaatatctagtagccagaacttatttccttctatcaagcaaayagtgaaagttcactgaaataatttttaagaaattaatttttaattcctttcttttgctgaataaatagcagttttgaatggtttaaaaaattgattacattgctgcttttgttttgtagttatataagttgctaatttatttgtgtaatttgatacattatagtttatttaagctaaaagattatattaaaagtttttcagaaaaccagcctataaacataagctaaatgtaaatcattttcagatttttaacttaaaatttttatctagtcattcataaccttgcatcaagtaaaaagagtaagctttatatttactttcttacgtgtatataaatccagaaatacatagagtgcataaacagatgtatacatctctgatattaaaatatcatagggatgtaattagaaaaaatgttcaaaaagatttattagggggacaataatgaaaaaaatattgagaaactctacttgagacaagtatctattaactccctttaatgaacagtgataaaattgctgattttcttttctctcctccaccctgtcattctttgtacctcaatatttcaaaaaattatctttcttactgtttacatctgtattgttgaatctgcatatacttcacttgatttaattgccaccttcaaataatattatttgttttatgtctactgtagatagttaagtacttctttctatctcctttctcaccctcctagtgtttttcttagctgtaacatttcagtcttagtttgtagtcttagttgtaaaatgaaatattgcttaccaccagttttttagggctgtaattatcttttatttagctaaatattgtcctcatcaaggttcttaggagtaatattctccaagtgtttttttgtttgttttagtmgagacaggaactcactttgttgcccagtctggtcttgaactcgtaggctcaggcagtcctccctgcacggccttccaaagtgctgggactgcaggtatgagccacctcgccctgcccaccccactcacccccccttttaaaaatagagacagcgtttcctcctgtcacccaggctagactgcagtggcatgatggtacttcactgtagcccagaactcctgggctcaagctgttctcccaccttgtccacccagagtgttgggattacaggcagtaaccattgcacccagccagttttccaagttcttgattgtttaaagttgtctgtacttgtaggacagcaagggtggttatgaaatctttgccttatactttgaataataataagcacgagaaaaatcagcaaaacttatcagataaagaacacctcataggaaaaaaagggtacttgagtaccattgtcttctgacattaaatattgttgtagatatattgaaaggtatttttctccgttttaaataacatttttcccccagctgctcatgagattttctttatatttataattaaatgacttttctagaatatttgtcttagtattgactgatttgtgttaagtttctcaggtacatgatgtgtacttttagttcatttatttcagaaaattttcttgaatataaaatacttgttttgttcctgtgtttggggtttctgtgctgggttcattatacatatgttggaacttttactttacctatcattttgtcttctcctttttaacacttttaaaatttcatcttcatttctgtttttttcttacttttccaagtaaaaaaatttcttttgccagctcacatgtaattgattatatgttattgttttctgatttttgccatctttccttgacttcttgtatttctgccttttttattctaaagatgtcttcataaattttgtataatttaaatcaaaatatttcattagaattttcgtctgttttatgacatcatttgtctattaagtattctttatctggtgagttttgctgctcttccttacctttttactactcaacataggataagctgggttatcttggcccaagcatttatagggagttccttcagaaatgtgttttggctgggattttgctattgcaggcacatcttgcctaactgcctaaactttctggatgatccatctctgtccaattttaccagatttttagctcwttttttttttttcagaacagttttacaacttcaagatgggtttcttgtgtatttatttatttattttttagagacagggtcttgctctgttacccaggctggagtgcagtggtgcagtcatagctcattgcagcctcaaaactcctgggctaaagggatcctcccacctcagcctcccragtagctggggctataggcacacaccaccatgtcatgcctggctaatttttttttttcttgtagaaacaggatctgtctctgttgcctaggctggtcttgaaatccttgcctcaagcagctctcctgtcttggcctcccaaagtgctgggatttcagatgtgagctactatcacaccgggctaagtttcttacttagaggaaatatttgtttccctcattagttctaaaatctgtgccctaggattcctcactctttgctttcctttccttgccttatattggaactgcttcctaacttagcttgtgttggcaacctcccatttttctaataaatgaattatatctgactcctcattttgataaagatagagtttgtggggttttttctattcccccatcttttatttttacatgaaatccagaagtgggaaattgctatctcatactgtcctttttttactggaagggaagtcttctgtcttaacccagaatagaagaatatggttactttattgatcttactttgtttatgaaataaagtctctaaaatttgaccacactcagttttcttgatacatgtttctgttattttggaaaagctttatataaaagaagaaaggacaatttatagtattagtatcaggcagtgtttccaaaaaggaataggtggctggacgcagtggctcacgcctgtaatcccagcactttgggaggccgaggcaggtggatcacctgaggtcaggagttcaagaccagcctggccaacatggtgaaaccttgtctctactaaaaatataaaaattagccaagcatggtggcgggcgcctgtaatcccagctacttgggaggctgaggsaggagaattgcttgaacccagaaggcagagattgtggtgaaccaagatcacgccacttcactccagcctgggtgacagagtaagactctgtctcaaaaaaaaaaaagaaagaaatgggtaatttaaaactggcagtgatatatatgtttattcaacagatgcagtattatgtctgtatattgtacaacatagtaaaatatggaactgtgtcttggctgctttggtaggcattgggcagacatagataaaaggacagttttttgtttttttttttcaagtagcttggcacctagtgggagaagaggattagaaagtgatgttcatttaataacagatgaatctagttcagatggttttgtaagtgttacataaattaatattaagtaaaacatagcagtagatggcactaagcaagtgctaaataagtacttggtgttgttaatataatgcgagataagcacagggtacttcataagcacatagaaaaatagcttatgattcagggatgggttttcagaaagaagagatgtttgaagtaagaatgaagaattacccaatcagatggctaaatggatagagctttttaggtaaagataatgacacatacataattagaaagggatggagatgaaagaaggaaatgggcaaacacaaagacagttttttagcastttttttaaattttgggagatgaggtcttactctgttgcccagactaaagagcagtggcacagctttgaactcctttgctcaagggatccttccactcagcctcccaagtagctgggactacacgcatgtaccactacatctagctaattaaaaaaaaaaaatttcgtagacatgcyggtctcaaactttgggcctcagtgaacctcctgtcttggcctcccaaactgctgggattacagatgtgagccaccatgcccagcccccttttttttttaaaagcactttttgatggttatggctggaagaaagagtaagggataaaggtgtaattgaaaaggcctagccaactatgaattattttatcactatactctcagtgcctactatgtagtgtgacatatttactgagttgaattctttaattttatcctcaaaactttggacagctgccttaggagcattttaaggagaggaggaacatgttcagatctgcattttacaaaaagttccgtggtgctaggtagaggttagactgagagatatgaaagaaaaaggcatggagattgattaggaagttattacagtaatccaaataagaaatggtgagggtgtaaaataaagcaaagccatttggaatggagaaaggatatattggaacacattaggagatggtgtggatttggatttatggtatgaaaaatgagaggggaggatgagtaggggtgacccctagatttttggcatgactacaagaatagtatcacttttttagataatcaatagggagagaaggtattttagacatgttgactttgtggtacctatgagacatccagatggtgctatctagtaaaatatagtagcctggagttctacagacaaatatcagctggagacagaaacatgtgtatatactggttgaagcaaagacatggatgaggctctttagagtatgttaagtgagaaaaggtttttgacagaatctttgggaatactggtatttaggaagaataaccaaggaataaaatagaaaaagagtcgaaaaagaataggaaaaccaggataaagtggtgccactgaagataaggtaggagattttcaaggtgaaagtaatttaaatatacaaagatgtaaagtagaatattgaccaaaaaatattggatttgacaattgatataytatcaccaataatctcttcagagtgatttcatggtagaaaatggtggagcagaaatgaatttacactaaaaaaaggaagaatgtaagttataaactgttaaaggcatcactccaaaagattctaccttacattactttatgcatgatgtgtgttaaattactttcatcatagtatggatgtcatgaaatggactagaatttaaatactccatctaccatttaagaattttataatgtcagtcaagctatttaacctcatctgtaaaatgttatattaataacatatgcccataataaataaatgtaaagasataagcagaatttctaattcaacccttaacacatgacttcttaaaatcctgttttgtagcacattattcacaacaaaattctaagttttacaacctttctaaaataagattttgatatgcatattttattactttaaaaaatattttgcttagaatggtattttttcactaaatatacttttagcaaggaaaaatagcagactttttaaagcttttctatattaagtattgactggacaatttctctgttacagaactttgccagggttaaaatgcaggtaacaatgtcactatcctccttggtgggcacatctcagaattttaatgaagaattcttaagacgttctctaaagactatattgacatatgctgaagaagatctggaattgagggaaacaacatttcctgatcaggtcagaaatgctgctttctagatcattaattgaaataggcttgttaaataggcactttccaaattgttaaatcaaaagttgrtttttgctggaggatcatttatttcattttcaatccacacatcatgtgccatagataggactgaatctctttgttttattaagctacccttctttttggaaataattaattctgtggtgtttaattctgtgcatttataataagtagaacagcagacttggacagtgcagacaaagctttatgatgaaacgttcctacttattaatcaaacaataatatgccttaaaaactaaagtttctacaaactaccttttagtaaaatcagaaatataggagagaattttccttttgtattcttgtatttcccatatccctctgttttatttctacttayagttctgcttgtttccaggtgaaagaacaaaaataaacatagtctgctgaggaatttatataaagtttactacccttcacttaccatatccccacatacctatactgtacagaatcatatcagtatcctacaacttgttttgaaatctttagatatttatctgaaatatctctgaaactaatttggtgattatggatgaatgacaattcaagaatgtttttcatataattctctgctgcaggtccaggatctggttttcaatctccatatgattctttctgatactgtgaaaatgaaggaacaccaggaggatcctgaaatgttgattgatctaatgtacaggtagcatttatttgattcatttatgctttgtataagggacttagtaagacatacagtaagcattagatgaaaaaaataaacacacaaaaatgatttgtgatttttctttatttacattctttattgtttttatttttattttttacttttttgtagagatggggttttaccatattgcccaggctggtcttgaactcctgggctcaagagatctgcctgtcttggcctcccaaagttctgggattacagacgtgagccaccgcacctggccttgagtgatttttctaatggtagattgaaagtccaaatgcactttttccaggtggcatctttggatcttctgtgtctcttcttttaagaacaatgcaaatgtacttattgattatcaaaaacgaggatttttttaagtattcataacacacatttaacaccttggtgtcctgggccccagagttcctttgaaggcccataccaatattttcartgtaaaactcagtcttttcagaagaaaatacagtatatgaatgttttacgataacattaattacctgattttcaatacagttatgactgaagaatgatatttctaagggcacattttgaaaactccataaatcgtattgtattaacaccttaatagatacaatagtaaaacttaagaatttttctctgtcatrtgaccctctgttcctgcagttttggggttcattaaaagcacaaataaaacaatttaatctctttgaaataaagtaataaaagtaccttttagaagttttctttttcccttgtgtataaaacttctctatgtttctgtaatgaacacataaatttccatactttttcccttaactggttattttcttaaaagtcagaatttaatatggcgtatttcttttttgcccctcctgccccccccaccaactgatattatccattccataggccacagttatttctctaggcctgcatagcgacattttcatactactttaaaactaagtrggttgtgcacagtatcaaaaacctttctaggtaaactctgagcgagctatctaaactccctcccagcttgggaagcacatactaatggagaagaatttctgttctaattagaattgccaagggttaccagacctctccagatctgcgaytgacctggttgcagaacatggcaggcaagcactcagaacgaagcaatcatgctgaagctgcacagtgtctagtccactcagcagcacttgttgctgaatatttgagcatgctggaggaccggaaatatcttcctgtgggatgtgtaacatttcaggtaggaatcttccagatgtacattaaatcaaggtatatctttttttggttttagcttttctcactggtgtttagatttttttagtttataaggaaagcttaaagacttaagccaatgcttcacaaggtgaattaacatttcacagtgattgtcattaatacatttttaaggagtacttcttgttgattctctttccacagtttcttacctctgaattatcagcactatgcttatttattctctttgtctttactgccttgtaatccgttacatactttaacatctatggaaatgtattactgataatcagaattcagtagaaattcttaattggcttttacttcacatagcagatataccaacattctctattccctacataaaatattagattattttatgactaataccatgactcacagatgagtttgccctctagtagggtacataattctgacccactagttgaattctctgcttaccaagagtcagttatgctttgcttttcttcaaaacctgttaatagtaggtttgagatattataaaatttagttaaatgttatatcttctgatgaaatcagaatgcaaaaagaaagttatcgtttctcggaaaacaaagttgaatgttttacaaagactcaggaaaggtgaatctccaaaacaattgctgttgaattaactgtgggccagacaaatagattgggggaggggaaactcctaaaattctagaataatttgataatcttttaagttttcactcaaaagaaaccaaaacttgaaatctttaaaaagagtgttgccttatcggtatttacccaaaagagattccgtggaaatctgatctggaaacccatacacacaaagaaaaggccttagatctacttcaaaagttgatgaatgagtgtacatctactgtaaatgtttaggttaaaataaaatagggtatgtatgtatcatttcttttttagaaataatggctgattccaatctcattgaataagagggcttttattatacctgacttttttcattaactccgtgtacattagataagtcaagagaccatttttgtaccctttttcctttacagagagttttgaaaagatcaattaaataaataagaaagactattgatgtctccttagatgtcttatgttatattacaatttcctttagcccatgatttttcttaattttctttcatacaactttttattaagagaaaagttatctagcaatggtgttttcattttattatcatcttcaaaatacagaaagtttttagagrtttatcttttacctttatatcactctcctttttttaacctaacctgatagttacagttcatcttcagttatttcttcttatacatttttatgctagaaaattctgtttcaaaaaccttttcaatatattttttccctagaatatttcatctaatgttttagaagaatctgcggtctcagatgatgtggtatctccagatgaagaaggtatctgctctggaaaatactttactgagtcaggacttgtgggattactggaacaagcagctgcttccttctctatggtagatgactcttgttaattcttttcccacagtttcatacctctaattatcaatgacatgtgtatttattctctctggcttatgaccctacttttctttaaagataatttattctggacccagtatggtggctcatgcctgtaatctcagcactttgagaggctaagacgggaggattgcttgaatccaggagttcaagaccagcatggggaacatagtgagataccgtctctacaaaaaattaaaaattcaccaggcatggtggctcatgcctgtggtcccagctacttgagaggctgaggtgggaggattgcttgagcccaagaggttgaggctgcagtgagccatgattatgctgctgcactccagcctggacaacagagtaaaaccctgtctccaaaaaaagaaaaaaaaattgttttttatttcaagtcccctaaaaactatctaggaaaagattttctttctagattcattattggcttactccttttcatcttaataatctgtcacttcccccagtgttccagtggtttggctcactgcggcctcaaactcctgggctcaagatatcttcccacctcagcctcctgggtagctgggaatacaggggcacrggggcacaccatcacacctggctaattgttgtattttttgtagggatggggtttcactttgttgcccaagatagtctcaaactcctgacctcaagttatattcccctcatcagccacccaaagtgttagaattacaggcatgagctactgtgcccagacccaccagtgtttttcgtttgcttgtttattaaccagcatgtgatttgtagcagattttttttggttaataaaactgttactgccaaacattttctaaaacctttaagttaaaaaacgtagcaaaacaaaacagaaagtctctgagtgatataagttcctagttggtagactgacagggctctataaatagatcttgtctattggatgaaatggagaatcttttttccagtatgatgggcattgccctggtgtccaagaaagttatgaccactcattccattggttgcatagtaatcctcattaggtagttattggaggcctgggccttactctttagttttatgaactgcatcctgaatcctttacctgactatgctgtcatgctataaccccaatcttsttcccttccatccgtatgtgaagaattaaagcagtcagatgaaacccagatgggatgtttattggagaaagaaaagatagttagctgaattcatgcttaccttcttaaaccatgttgataggatcagttacttcctctgacttttctgctaaatgtttagtgtaccagcaccgaggtttaggacacgctgaggttcatgttagggtaagagagaagcttgaggtaatatgcaatgctgccctctttccccatttctactgctgttgggaattgattcgttcttcaccaggccttatccctatcctgcaatatattgataaagggtagatttagaaggcatactgccaaagttcaaatcctggctctgccatttagtagttgtcttacttcaggcacaaattatttaacctgttggtgcctcacttttcttatctattaaatacatctagtaatagtacctacctcataggaatgtttttagaattaagtaagttcatgtatttaaagtgcttatcacagcgcctcgttccaagtaagtactagtgtgtttactgttaccatcattttcatcattattggcaattgtgagactcttaagagtgtttttgcagagttaaaatattaggtgtcgatcctcttttaaaatgtttgcctctaaggaccttgaccattccaattccagttccatccctacacttgtctaagctagcagggggaaaaatttttttgtttttggaggaatattttaattaacataactctgtgtgtttgtatatgtgtgatttttaataattcacaatagtgcatttagattgggggacagtaacctatattattaaaattcttttgcagttgtatataattgtaaattttattctttttcaattaatctgattttagttaaaataattactggagcattttagttacactaaacatatttcactagtacaactacatgattgtttaaatatactcctacgaacttactgggaaattcaaggaccatatgtttttctttgggaaaatatgtttgctgatctgtgaaccgatgaggactcrgtggcttttggaaaacatctctctcttctcttactacagcaccaatccattattaaagataaaggctgggtcaagcccagtgcctcacacctgtcattccagtgctttgggaggttgcatagtaatcctaggattactgtgcaaggtgggaggattgcttgaggccaggagtttgaaaccagcccgctcaatgtaacaagagcgtcatctctacaaaaaatgaaaaaattagctgggcatggtggtgagcacctgtagtcctagctacttaggargctggggtgggaggattgcttgagaccaggagttcaaggctgtagtgagctatgatcacaccactgcactccaacctaaacaatagaacaagaccctgtctcttattatttaaaaaaaaaaaaaaaaaaaaggataagggatagaagaccaatacaaagacatcttgtctctcactctgattatgtgattataaccatagcaaccactggccaactagcccacagtggaaggaaatctggtggctcaaaactttctatgctttgttaaagatttgtgatttttccataggagatttacaataggagattgccttcgtcagcttaatattttggaaaagtaaatgatttttatgtcccaggatgctattataggagaattgggtatctgtgaccagtgtaatattaaatttatttttcttctgctcagaattagtttttgcaaaagattataagcatagataagtacacatacacacattaaccttagtgaagtaattattgggcagataaaaggaaaatgcccaattcaaattatagaaatataaatatgcacatatgtgtatgtatatatattaatatacacacacatacacatatctacatacatacccatttatccagaggagaagatacactggaaaattcttttattaaaccttaatacagttaaaaattagtagtatttgtttttattttctattggaaaaatttcagtggtattattactattattatttttccccaagatggagtctcgctctgtcgcccaggctggagtgcagtggcgcggtctcagctcactgcacactccgcctcccatgttcacgccattctcctgcctcagcctcctgagtagctgggactacaggcacccgccaccacgcccggccartgttttgtatttttagtagagacggggtttcaccgtgctagccagggtggtctcgatctcctgacattgtgatccacccgcctcggcctcccaaagtgctgggattacaggtgtgagccactgcgtctggcctcagtgtattatcttaatagaaatattgcgaattcatataattacttttctttcttattgatgtaaaagaaagcaacatcttaacaaaattttttcttataggctggcatgtatgaagcagttaatgaagtttacaaagtacttattcctattcatgaagctaatcgggatgcaaagaaactatccacaattcatggtaaacttcaagaagcattcagcaaaattgttcatcaggtaatgattccaatttctagcttcactataaagggaaaaaactgtctgaaagcattaatgttgttttgcactgatgtcaaactagatcccgtgaaatgaccattttaatcagactacaaatgagcggtcaaaatgatagttcatggccaaagcaaagctcattaacaataaaaatgaattcacctaaagtaaatggtgatcatcataaactttctgcatagcttttttttttcatttttgaattattaattagcaagtttttaaaaattgtgattttctgtttcacaaggtagatcatagttgtgaatctcattttaaaattgatacctattcctttgctgtgaaaatgaagtttttatatttcagttttttaaattaaatgatgtgaaactttaataattaaactactaatatttttaatgactgcaactgaactttatttttcctagatgtttacaatcatcctttgatatatttctaatacaaaaatattattttgtgaaaataatgaataaaatggttgtcttaatgtatatttaattctaatagtatttcattacttaatctttgtagttcattatggaatctacatattatcactaaaattagcatcaaattaaacttaattttaaaatgaagtacactactagcagttgatttctttgaaactaaatccttggcttcattgaaatactgcaaaatatcctatcgagtctcctcctcctccacttttctgttcccttccccgtgctaccctactgttacctactgctgctagtgtcaaaggagttggagtatgactatccacttttgtattcagtattagtcctactttgttacctatcagcttgacctcttcttttttgcaatgaattaagctgttctaaatgaactgattaatctgaaaagcctttgacagtctaaaaatagggctgctatcctgttaagtcaggattttattgtcatctattaaaatgttaaagttgaaaaatattgattaggtttcatgaccatgacaggtaggtcttttaataatcagttgtatatatactatcacaggaacctcaagccagtttctagagctgtaaattgcaaattataaatgttaggtctggaacatttagagctagtcgtttctgagaaacttttagccatttgtgtcgttggcatttgagcagagttgcagtttgtattttaatttatcctggatacttggtgaagtgyagctcacyttagttagagatcttacttaaacatgtaaatggaacaagctgctggctctctttccctaaaatttgtactttcacttaaagtttttaaaaggcaaaattttagccactgggttttgaccaagcaatttatgaaattattgcaggtcttaagtaaatgaatatgctgtttaaaatatcctgctgtcttctrtttgtggagaagaatttatggtatatggtgcctttggccttttttgttctttcaaacagtttttttatgacttgcccttttttactttttattatacagagtactggctgggaggtaggtaatgttttagttagttaaagacactaatagattgattttatcagatttcttatgccaatgctttgcccacatgtgctagctgtgggcattctgttgctatctgctatcaactgaattcattaaccaaagaaattttgttaaaatattgtaagttattttaagaaatatcttattatgaggtcgtaggcagtgcatggaaatccatatgttacactaatgagattctttggtaaatgagccactttgtcatcactttagtttttaccctttgaagcatttctctcatcaacatttatacacagatttctttttttaaccatattgtttcacctcattttacagaggtcgatttatgtgttattgctcagaggtgtaaataaaaaatactctatttcatctgatctcagatggcatcaattacaaaacatactagtattttatatgcctttaagaaaggaaaaaaaaaatccctgtgtattaaaccaggatatcctattagttgaaagatgaataccaactacaaaaacattaaaatgtgagcaaaaaaagtacattttagaattgatgagatactgtgttaatttgatcttgagtcacttcaccttgactatgagcactactgaggaaagaaattcacttttgtcatttaatttttgttggggaaagggataaagaaattaagagaacttataatttaatttgacctcgtattctgacagcatttgatatattgtttgataagactacacatgcttccttttatgtagtagttaagactcacaaaaagttatatgtaaatacaatcttacccgaaaaaaatgccaggaagaattgattaccattattttaaacgtttctgcaaaggaaataattctataaaatatgccctaatttattttgatgaggtaaagcaaggtagtaataagtcaggtttatttaaagctaggtatatttgtaaagttgtgtgctttgcctctcacttgttgtcagatttatgttgatcgaacacttaggcttctctttttgggtttgcattgcaatccttgttttaagacccaaatagaaaaccttgggaataaatattactactgagttttcctctatttctgaaatagtacccaagtcttgtttttctttagatgaagccagtacttttataaatctaccttaattctctagattaaatgtatatgactgtatcaatactcaaaatataatcctcattcctatggctcagttaagacatacataaagagacttgccatggttatctatgaatgataaaactccttataaatttcctaacattaaatagaattagttgaaaattaggcataaaataataaattgaaacctctgagcagtttattactagtttccgtgatgctaaatcgacccctgaaaggtataattttcactggttatgacattaatatcattctgtcatcatgtttattgcatggtaaaagtctcacagactttattttcttgttatatacttgtcactaccttttactggacctttagctttgtagctgctaaatttgttgcacgtttgttttttgcttttcctttgtaaaacttaaatggatgcctgcatttaaaaaatgtgttttctaccatttgctgcttatttgttttgaaatttctgtaattaaaatgctttctgttttctcttctctcttgtccctggttgctgaccctactccccacttttactattgtctattgtggtaagttctatcttgtgtatatttttctttttgactcgatgaaaacttcagtaattttgttttttctaaaagcaatgtttcctagctaattttctagtattctggtagatctttcactggattgaagtccagtaaggataatctgtgcattgtagaaaggctctttgaattgataacttgctccccaacttacaggaaaaccccatctgggcttatatattagtcacatgtttcatttttttattgtgctccttgatttagtgcaaattatttgagttggcaaagctttttagaagggtgtgtgtgtgtgtgtgtgaaagataactctaaaacttagtatttcagtaaagtctttaccatgcaaaataataaatcatgaacctttcgggagtcatgtggctgttatctcctctggtagtttcagttctttaatggctgtttagtgttcacttttatttttacttttccctcgaaatagtaggaagtaaaagcatgtttgttgtcttttaaaatttttgtttatgagatggggtctcactctgtaattcagactggagtgcagtggcacgatcacagctcactgcagccttgacacctcctgagttcaggtgatcttcccacctcagcctcccgagtagctaggactgtaggcgcatgccaccagctaattttttgtatttttgtagagacagggttgtgccatgttgctcaggttgatctcaaactcctggccccaagcaatccacctgcctcagcctcccaaagtgctaggattataggaataagccaccatgcccagcytaaaagcatgttttgaactcttctttttttatgattcatatttaattatttttagcagaaagagaaatgttaaatttctgtatgaaaatttttataaccactttctatgttatgtatgtatatatacatatatatttttgtaattatgtttgtaccagcctggacaacatagtgagaccatctctacagaaaattagaaaaattggccaggtatggtgttgtgcatatgtactcccagctactcgggaggcagaggcaggaggattgcttcaccccaggcatcaaggctgcagtgagctatgatggtgccattgcactctagcctggatgacagagtgagaccctatcttagggtcagggttaaaaaagaaaagtttgttcagttatcaaatagtgacgaatttgtattcagaagtacactaatacaagtttaaatttttcagaaaaatcaatccccagtgataacatagtcatgtgatacttttttttccattcaaagatcacaacatatttctttaaagaacaccactactctagtaaagtatatcttacattttctggaaaggctagagaagatctctactagatccctaaggaaatatagattaccctaacttttgagattgacagatgcaaattgactatatcttaactctcattattggactgaatggacatgaatgtgagccagtattttggtttttatatgttcagaaatactggccatagttctggctcagtggcttctgttggatttttattttcttcaatccacactaaagctgagtgacataaagtaacacatccaagcagttaaaagatagaacaggattagaaacagcaaattataatgagcagggcgatcaactctgaaagarggaaatgaaataaaaattcaagaatagagcatagtgaaaacaagtacttttgggtagtcaagtgggtaaatgtgacactctaaaggagaaagtaaaacaggtcaggcacagtggcccacacctgtaatcccagcactttgggaggccaaggtgggaggatcgctttagttcaggagtttaagaccagcatggtcaacatggcaaaacccatgtctctaccaaaaagaaacaaaaaaaattgctggggcatgtacctgtggtctcagctacttggaaggctgaggtgggaggattgcttgagccgggaaggtagagtttgcagtgcgctgagaccatgctactatgctccagcctgggcaacaaaacgagaccctgtctcaaaaaaaaaaaaaaagaaatcagaacattgtaggtataaaacatccatgagcctttacctcagaaaggtaaagttagatatgaagaaagttaaggaaaacatagtaaatgggaagaatcttagtatctctaagaggagatactttctggtagttagtgactccctgatgactggtatagacccataactgagcacctgataatatatcccataccactgattttttttytgccccttaygctacttttgagaagaaaaagaaagatatgaaagcccagcatggtggctgacacctgtaatcccaacattatgggaggccaaggsgcgatcctcgcttgaggcctgaagtttgaaaccagtctgggcaacactgagatctcatctctacccccaaaamaaaaaaaaaaaaaaaaaaaaaaaaaaaaaaattagctgggcatggtggtgtgtacctgtggtcctagctacttgggagactgaagcaggaagatcacttaggcccaagagtttgaggttacagtgaactatgatcaccactgcactctagcctgggtgacatagtaagaccctgtcttttaaaaagaaagaaaaatatggacagcaaatatttactatgtagatgatattagatgtggtttctttttttcggactgggacataaaatggtcagatatgtccttctgataagaaatggagtacaatatatcttggaagaatgtgttttgtcagtaagccaccaacctgatttttatgctgaagtataaaggatatgcaagcatgcaaaaataattgcagtagaggatgaaatatagaggaaaacaacatagggaaggaggtaatcctcaaaagaatttcttgaggaaatttgtaagaattctcaagaaaacaccagagaagtggatgatagttcaggggttatgctaatgtcctggtgtttataccagtatatatagaatatggggaayataaagcttaattaagagcttgaggccgagcgtggtggctcatgtctgtaatcccagcactttgggaggctgaggcaggtgaatcacctaagcctgaccaacatggagaaaccctgtctgtactaaaaatacaaaattagccggacatggtggtaatcccagctacttgggaggctgaggcaggagaatcgcttgaacccgggaggcggaggttgtggtgagctaagattgcgccgttgcactctagcctgggcaacaagagtgagactttgtctcaaaaaaaaaaaaaaaaatgcttagagtcgggtgtcaaatatattagagtttaacttcccactccaccacttactaacagcgtgaccttgggcaagatacttttcctcctctataaaatgagggtgaaaataatttaatctatcacataaagttgtgataaggattgatataatacatgtaaagtggttaaccagtgtctagcacatagtaagtactcaaaaaatgttgaaagttgttatttttgttgttaatatgatttaatcataattactattagaaatcttaacactagttaataaaatctaagaggttttatatttcccagttgagatctgcatctagaagtgaactggtaaatgctctttaagaggaataaacctagtagaaggaaagaaagatcaccattgtgtgaaatactggtatgcctatatggaaatcagttaacttaaaggaagcattgtggaaaacaactgggagaggataaaagaagttagagaaatgatgtcactgtggaaatatacaactagtccatcggaatgtttcttgctaaataaagacaacaaaactaaaatagatttatgatatatttgtcataagaggtttgaaccatttagaaacatggtagatggatttcttcgtcccggacatagtcttatcacccagaggattgtggaagcagtaagtagaatcgctaaggaagaataagctgtattgtgaggagtgatagaaagttcagaaaggattcataacagtaaagaaaggtaatgctagaaaaacagcctaatttataggaaagttttttgtttttgttttttttttaattcaaaagaaaaacaggtatcatcctgtggtccaaagctctgaagaagaaataaagatgaagtgagtttttcctgcaggcgaagcaatatgactgtgcttccgtgaagcatacttccgtagtagtttgacactagagggagtgtaagttgaaaatagtcaaattctcagcctttctttctctctagcctcatcccctgatgctctctcctccactccattctgcacacaaacatttatttttaaatatccagtaactccttgtagttacttctctaaccttatctcatccgattctacctgtttgcttactctgctccaaccacactgcttaccttcctgttcctcaaacacactcggtaggctttagcctcctgatctttgcactggctctttcctctgcctgggatgcacgtcgctcagggattcacatgaataagtcttccatctccttcagtctttgctcagatgaaacctaccctgaccatcttctttgtcccttttgttcacagatttttttttttttttttttttttttgagacggagtctcgctctgtcgcccaggctggagtgcagtgacgcgatctcggctcackgcaagctccgcctcccgggttcacgccattctcgtgcctcagcctcccgagcagctgggactgcgggcacccgccacggcgccaggcttatgttttgtatttttagtagagacagggtttcaccgtgttagccagggtggtctcgatctcctgacctcgtgatcccccccgccttggcctcccaaagtgctgggattacaggcatgagccaccgcgcctggcctgttcacagatttatcataaatatctagaacagtttgctaacacatagtaagggctcaataagtatttgaatggatgaacgctttccctaatatttgtatctgccttcccctgaccctctatcagtgttccttccttcccttccctgtccacttggccgtttattttgagtagaaccctatgcattacctctgttgtgacttacttgcaacaagattaatcttcccttatacctctttttagtatagcatatatccctttgttttgtaattatttgaatacattttttactctcttgggaagcaagtctaacttatttttactttcctattactgaagatgaacagtggctaacataataaacacccattaattatttttccttgaaccgaatgtcatgagaaaatataataaaaagaggtaggttagttttaagctaccttaataaaattcagtgttcagattsaaggtgacattgagcccagcaacacaccttcattggtcagatcacatcaacagtattatggttatatctgggatatcacactttaaaggatggcattgtaataaagtgtcaacagagtagaaattactgtcatatgaagattgaaaactggaaagtttaactaaagggaacaagtcctaattgttatcttcaaatatttaaagggccacaatattgaagaattggaatattgttttaaactggaaacctctgagaggaggacagccagagtagcagcatattaatattacaggtcacacctrtaatctcagcactttgggaggctgaggcagctagatcacttgagcccaggaattcaagaccagcctgggcagcgtggcaaaaccccatctctacaaaaagtacaaaaaattagctgggtgtggtggcatgcttctgtagtcctagctactcaggagactgaggtggaaggatcgcttgagcccaggagacagaagctgtagtgagctgtggtygcaccactgtattccagtctgggtaatggagtgagaccctgtctcaaaaaaactaaaaactaaaaataaataaaaaacaaaaagtaggaatgtatatgtatatatgtgtatgacatgttttgaaaaaaatgacaaatttttaagtaattttcttaggttcttttttttatttttcatgcagtgcctttattacttaagtcagaatttactattattatgttgttcttttggcttacttatggttttaatcagaattttagttgaatcattcaatctatatagatggattaatttgctgtagaaatcagttaatttttatgtgtgttaaattttgaaataaagtaactgaaaaaatgtttttaaattagaagcctcaactttctttagctccaaatacatttttctttaaaactttacatgtttttggacaaaaatgtagggatatttttcatcactatacctttttttttggtattataaaactggtaaattaaggattagagcttcccattttgcttaattatgtgtggcatttctagcttattttatatgcccttttgctttttcagtataggaaaaataaatataaagcagattaggcttaaagagaattcagaggtatttacttacttgtaatgcgcatataggcaccaccagagaatcctaaaataattttgtatctaaattgtaaaaattagctgagcaaggtggcacacacctgtaatcccagctactcaggaggctgaggtgacacttttttaaaaaaaattgtaaaaattgcatagaaagtgtccaaatatttatctttattgaaagaatttgtcttctgatatgctgtgtgagagttaaggtgatcttaatgtactttgtacctgacatgaatgtgtagttaatgcatgccaatgggtggtttgggtgatttagaataaccaactcatctcaaaaattttttacttattatctttcactcatagatttttttttccttttctgttccatttttagtaactcttctacataaaaattttttactgggctgggtgcggtggctcacgcctataatctcagcactttgggaggctgaggtgggtagatcacctgaggccaggagtttgagaacagcctagccaacatgctgaaacccgtctctactaaaaatacaaaaattagccaggtgtggtggcatatgcctgtaatcccagctactcgggaggctgaggcaggagaatcacttgaacttgggaggtagaggttgcagtgagccaagattgtgccactgcactccagcctgggcaaaagagtgagacgccatctaaataataataataataataatttattggcacagggctgctaattgtagaatttttgcattagtgcttctggagggtcttgacatttacattgcctgctctatgccaggtgctatctttgactcytaacttttacaatctcatttaataygtgaagaggttatataaaggctaatgctaatttaaaaatatgtaagtgttgttttaaaatttaacttgacctagtatgctctagtatcagtacaattaagacagtttatatcaagcatcttttcttgcaataaggaaaatgagttaatttatctcagttatatagatttaaaaaacatagaccaatgtgatagaggcacttcgtacaaactccgaaaaatattatatgtgatttagtcacttgttagtagccctatttgcatacttatttgttagaaataatgaaaaaggaaagactgtttactttgtttaaaccttcatttaaaatattataattttgaattaaaactttttgcaatgttttggaaattttatgctgtaacaatctaaacataatgtgaaaaacaggaagatttcatattaaagtttctccattttcctaaacctaggatggtaagcggatgtttggcacctattttcgtgttggtttttatggaaccaagttcggggatttggatgaacaagaatttgtttacaaggagcctgcaataaccaaacttgcagagatatctcacagattggaggtgaatgctgtggtggttcataaaatgtcatctttagtttgtattctctctgatgattagactttcagatccagatctaatcatttagtaagccagatcttgccaartaaactactccgttagagaataaggacttttaatagttacaataatactctttcaaatcttttatggcagcaataaaatagtaatattgtctattttttgagactattttcacacatattttagaaacccctgtatccttcagaattactgcgacttaacggagaaatatatagtataatcccacattttgttgaaaaagacaaagaattaagtagtagctaataattgaactagaaccagaaccctaagaaatttatgacccaagcatattatctctttggcttaactggttccaggtgaggtatctttagaacgtaaaagcctgaaatcacaccttaaaaacacttcctttaacctttataatttcttaattttcaccataaatgattgcgttttatatttactgggctaactagtattttctgttatagttattctttccaacctttctctatttttgttactcaaagtgtagtggatggaccggaagcattgggttcacctgggagattgtttgaaatgcagaacctcagaccccaccccagcccctgtgaatcaaagtctgcattttaacaagatccccaggtgatttgtattcacaaagagaagtagtgctctgggcttgtttttattctcactgatgttaatttcttgaatgttatattcctattggtgacttctctggccaaactgacataaattggctcaaactgtgactttttatttttcaagaggttaggtgtaagtcttgggaaatattaattgagacttactcaattataaaaattacctttgggatagcagtgggggtttctcctttgaagattcaaattcgatttttccttttgaatagcttcatcctttacccatgctgctgctactcagtgtcatatggagtagtcactatattcttgacctaaggttgccttttcaaaatgtaaacccatagagaactgcaacaggtcaatgcttttatttgaaaattctgggattaaaaaaatagttcataaaaatgaatgtttattcattaacccatggtctctaagaaatcaagccacaataaactcagtaaaactaagatttttatacatcaacaataatgagtttcttttgtctttgctttctgttcccttttgtttctcttgaggacttcttgtggaatcctgtatttttactggagaaaattgttgttttctgatattttgtgttatttaaagtttgtggatgggaataatgtcaaataaatatggaccgagaccatgctaatttataagctagtataatttttgtaagcctaaatcattacttttaattattgatatgattgtacagaactcactaattctcctaattttgctcaggagtcaccctcaggccttctctatttcrcagtctttttaacttcatataaaatgtttctttttctttattgtagggattttacggagaaagatttggagaggatgtggttgaagtaatcaaagactctaatcctgtagacaagtgtaaattagatcctaacaaggtatagttgattcgactataatgacatatagacatctctttgaaatcctctgtgcaattttgtttgagaaagactaaatgatgacttamcagtgaggaaatgaaggacttttttctttcctaggcatatattcagattacctatgtggagccatactttgacacatatgagatgaaggacagaatcacctatttcgacaaaaattacaatcttcgtcgattcatgtactgtacaccctttactttagatggccgtgcccatggggaacttcatgaacaattcaaaaggaagaccattctgactacgtctcatgcctttccttatattaaaacaagggtcaatgtcactcataaagaagaggtaagtccattaatgggcaaacagcattagtgaagcaaatacattcaagccatgtaacaacaactcagatgtaccagaagatatgtaccatcccttataccataacatattagaactttacccatttttgagtcctcaattttttacttcttttctaagaccctaattcacccccagctttttctttaaaaggttgatttttttttttcatttaggaatccaagtttggaattttattgttacatgaaagtttacaattgatcttttttttttctaatttcagttgattatacataaagttcattaaatagttttcagtcagtacactgatttaacagatgctcttttactcagatcatcttaacaccaattgaagttgctattgaggacatgcagaaaaagacacaggagttggcatttgcaacacatcaggatcccgcagaccccaaaatgcttcagatggtactccagggatctgtaggcaccacagtgaatcaggttagtgctttttgctagcactgtgtgatttaagctgtaaatacgatttgggataatttcagatcagaaataattgttaagtcagatgaaaaggatctgccttctctactgcctgtatttttctacctatgcgatcttataaattctattaagaaggaattgattcacttaaaataatatttccttaaaaagcttgtacaaaagaatgtgatctttaaaacaaggactcattttcagagctatgtacatatttgcgaacctctactatgttagattctccctgatgttaccttccccagatctcctttacaataagttgtgaggattamataagtgatatggaatcatttttttaatttgaaaaatatattgacacaagaaattattgttcttttgtcatatgcagattagaagccatccccattagtccttgtggttggttcattaaaattatcttgtttatgattttaggcatggccccagtcttaggaatattccatgataagggaaaatacagaaaggcttcaagtaagatttcctgtaccatgtcttaactacttttcagattaaaagaacaaagccaaaaagtgccccaccaaaactgaaataaataccttaagacctttacaaaagctcttagaaacatgcacgattttaaggttttgtctccaaatgatgtagcttacaaaagattatcttctttaacacaatgtccggaatacctttggaatactgagggaacctgttttagcaaaatcaactctgataatcagcggattggyagatgtagtagcttgacaacttttacatccaggatacattaaagaatgtgaaaaatacaaagcaaaatacattaatgaacatagtagtcagtccttgagttcctattctgtttytttgaagaataaactcataagaagttaattccactagataagaatgtagaatgaaattagaaaatactgaaatagtctgtggagttttaatataggcataggcatatatgcattaagcttaaatgcagccatctcagagctaagaaaaatcatttgagtaaattctgtctctgtgattttagagataacaaaaaaacacacttcttattttcttattttgcaggggcctttggaagttgcccaggtttttctgtctgaaatacctagtgacccaaagctcttcagacatcataataaactgcgactctgctttaaagattttactaaaaggtattcaaggctttctgcrtaaagatcttcaaattgagactgtccaataccacagtatgacataagggccttaaggaaccattgaaaagagaaaataggctaggcacagtggcttacacctgcaatctcagcactttgggaggctgaggcagaagaatcatttgaggccaggagtttgagaccagcstggaaaacaaagcaagaccccatctctacgaaaaaaatttaaaaattagccaagtgtaggttgtgcgcctgtagtgccagctactcgggaggctgagacaggagaattgcttgagctaggagttggaggctgtagtaaactatgattgtacactgcactccagcctgggtgacagagcaggagcctgtgtcagaaagagagagagagagaaaacaaaaaaacagaaaagcggttgacaataataagtaatctgtgtagaatttactactctttaatagcatatacttattcccctctcccacaaccctaccatactctatagtgccatgtatttaattttaaaaattagaaaagccaaggctcaggaaattttattaacttgaaactactattagatcatttaatttaaaagctactatttgttgtgaatcttcagtatttgagtttctgcttccctccccccagaatacttacaagcagtaaacttggaagcaaaaaacttgtgttcagatcctgaccttatcattaattgtgcttttccaggtcacttaatttctatgatcctgcattttctaatctataaagtaaagataatgatatctacctcccgtagggaagctgtgcagattaggtgaaataatttatgggtgtgtccatccccaagactatccccaatttcagtgatttgctaggaggactcacaggactcagcatatagttatactggtgcctgtgatttattgcactgaaagaataccaagtaaagtcagcaaaggaaaaaggtgcgtggagtgaaatctggaggaaaccaggagcaagcttcaamgggtcctctgccagtcaagtcacacaggacttgcttaattcctccagcaatgagttgtgacagcaggtgtgaaatgttgtagggaacctcattggagactyagtgccaaaagtttttatcaggagctggtcatgtaggcactctctctctgagatgtaccaaaattctagactctcagaaggaaagcaagtatttagcaggtgaactgtggtagtaatagaaagaaacctgtttcctgcttttagaattgactgatttctggcattaattttattatttgggaggtgtaagaaaacaacaacaaaatacaccctaccatctttgtaaaccagatgattatggaacagtacatacttctttaggtcatagacatttagtaacaatcaagtgctttgtttcttgcttttgtttttggaatattttgccatgactacaattcttaaatgtccttctttttgtatacatttactgtagggtaatgaattcctgtagtcaacaggtctccttaagtgttactatctgtagagaaggttttctccttttatattgcaaaaaaacaaacaggtggggcgtgagtggctcacgcctgtaattccagcactttgggaggccgaggcgggtggatcaccagagctcaggagttcaagaccagcctggccaacatggtgaaagccctctctactgaaaaatacaaaaattagccgagcatggtggtgggcgcatgtaatcccagctacttgggaggctgaggcagagagaattgcttgaacccaggaggtggaggttacagtgagccgagatcatgccactgcactccagcctgggcaacagagtgagtactccatctaaaaaaacaaaacaaaacaaaaaaaacgaaataacagcaacaaaaataaaactacataatataaaccttacaaaggagttatagccaatactacattttttatttttgtgtgttaccattcagtatggtaactaaatagtatacctttatgcatatgtattttacaatagtcatacgtataatcttaaattatttttcaattaaagtttaaactattctaatggttatattcttcaaattaatatactgtagtcataatatacttataatcttaaattcttatttttcaattagagtttaaactataattttaatggttacattatttcctaaaattaatatactggaatttaagttgaatttgaatgtggtatagtttatactacaatggatctttttcttttgttaaattaaaatttccagcatgagatgactgaggcacagtacatgaacattttttgttttagagacaaggtctcactttgtcgcccagactctgtagtgcagtgacacaatcacaactcactgcagcctcaaactcctgggttcaagggatcctcctgtctcagccttatggtgtgcaccaccatgcctggttatgtttggttggctgggwgtttttggtagagatgaagtctcgctatgttgccctggctggtctcgaactcttggcctcaagctatcctcccacctcagcctcccaaagtactaggattacagggaagaaccaccatgcccagcctacatgaacatttttattggctcacagtatgtagtacattctaaaaagtttctaagtacagttgaccttgaacaacacagaggttggggtgctgtcccttgtacagctgaaaacccatgaaaacttttgaccctccccrccccagaaacttaactaatagcctgctattgactggaagccttactgataatacagtcattaggtacatagtttttatgttatatgtattatatactgtctccttacaataaagtaagctagagaaaagaaaatgttattaagaaaatcataaggaagagaaaatatattttactcttcattaagtggaagtggatcatcataaagggcttcatcctccttgccttcatgttgaggagtctacggaggaggataaagaagtggggttgatcttgctgtctaaagagtggcagaggcagaggaggtgggggaggtagcaggggaggcagaaggggcaagcacactcagtataactttacagacatcataattttttttttgatttccataggtttttggggaacaggtggtatttggttacatgagtaagtttttttgttttgttttgtttgagacggagtctcgctatgttgcccaagctggaaagtgacacaatctcagctcactgcaccctctgcctcctgggttcaagcgattcttctgcctctgcctcctgagtagctgggattacaggtgcccaccaccatgcctggctaatttttgtatttttagtagggatggggtttcatcatgttggtcaggctggtctcgaactcctgacctcatgatctgcctgagtcggcctcccaaagtggagtaagttctttagaagtgatttgtgagattttggtgcacccatcacccaagcagtatacactgaacccagttgatagtcttttatccctcatcccagtcttttatccctcatcccttcccaccctttctcaccgagtcctcaaagtccattgtatcattgttacacctttgcatcctcatagcttagctcccacttaatgagtgagaacataagatgtttggttttttcattcctgagttacttcacttagaataaataatctctaatcccgtacaggttgctgtgaatgctatttactcattcctttttatggctgagtaatattccatcgtatgtatacaccacagcttctttattcattgattaatgggcatttgggccagttccacatttttgctattacaaattgtgctgctataaatatgtgtgtgcaagtatctttttcatgaaatgacttcttttcttccattttactgtcaaatggtagttctacttttagttctttaaggaattagttctttaaggaatctccacactgttttccatagtggttgtactagtttacattcccaccaacagtgcagaagtattccctttttaccgcatccacaccagtatccattttttttttttttgagtttttgattatggccattcttgcaggaataaggtggcaggtattgcattgtggttttgatttgcrtttccctgatcattagtgatgttgagcattttttcatatgttggccatttgtatgtcttcttttgggaattgtctgttcatgtccttagcccactttttgacgaaattatttgtttttttcttgctaatttgtttgagttyattgtagattctggatattagtcctttgtcagaggcatagattgtgaagattttctcccactctgtgggttgtctgtttactctgctgactgttccttttgccatacaaaagctctttagtttaattgagtcctgcctatttatctttgtttttattgcatttgcttttgagttcttggtcatgaaatatttgcccaagccaatgtctagaaggatttttccaatgctatcttctagttatagtttcaggtattagatgtaagtccttgatccatcttgagttgatttgtataaggtgggagatgaggatccagtttcattctcctgtatatggcttgccaattatcccagtatcatttgttgaatagggtgtcctttcctcactttatgtttttgtttgctttgtsgaagatcagttggctgtaagtatttgggtttatttctggcttctctattctgttccattggtctatgtgcctatttttataccagtatcatgctgttttggtgactatggccttayagtatagtttaaaatcaggtaatgtgatgcctccagatttgttctttttgcttagtctcgctttggctatgtgggctctttttggttccatgtgaattttaggattgttttttctaggtctgtgaagaatgatggtggtattttgatgggaattgcattgaatttgtagattgcttttggcagtatggtcattttgacaatattgattctacccatccatgaacatgggatgtgtttccatttgttagtgtcgtctgtgatttagttcagcaatgttttgtagttttccttgtagaggtctttcacctctttggataggtatattcctaagttttttgaggttgttttttttttgcaactattataaaaggggttgagttcttgatttgattctcagcttagttgctgttggtgtatagcagagctactaattaatgtacattaattttgtatcctgaaactttgctgaatgtatttatcagttctagaagctttttggaggagtctttagggttttctaggtatacagtgatatcaycagcaaacagtgacagcttgacttcatctttaccgatttggatttgctttatttctttctcttgtctgattgctctggctaggacttccagtactatgttgaagagaagtggtaagagtggacatccttgttttgttcagttctcagagggaatactttcagcttttccccattcagtattatgttggctgtggatttgtcatagatggcttttattacattgaggtatgtcccttgtatgccaattttgctgatgctttttttttttttttttttgagacagagtctcgctctgttgcccaggccggagtgcaatggcgcgatcttggctcactgcaacctctgcctcccgggttcaagcgattctcctgcctcagtttcctgagttgctgggattacaggcgcctgccaccacgcctggctaatttttgtatttttattagagacagggtttcaccatgctggccaggctggtctcgaactcccgacctcaggcgatctgcccacctcggcctcccaaagtgctggaattacargcgtgagccaccgygcccggccttgatgcttttaatcatcaaggggtgctggattttgtcatttgctttttctgcatctgtggagataatcatgtgatttttgtttttaattctgtttttgtggtgtatcacatttattgactcatgtatgttaaaccatccctgcatccctgacatgaaactcacttgatcatggtggactatctttttgctatgctgttggatttggttagttagaattttgttaaagatttttgcttctatgttcatcagggatattgttctatggttttctttttttgttatgtcctttcctggttttggtagtagggtgatactggcttcatagaatgatttaggaaggattatctctttctctgtcttgtggaataatgtcaataggattggtaccagttcttctttgaatgtctggtagaattcagctgtgaattcatctgtatggatatcataatttctgtctgacatttttgctttttcatttttctaaaaatgtttccatatggtacagtcattcttccaccacttgctttagtttctgtgcccttatcataaacagtccatattgtaaaagaagtcagaagcagtcttaggttattgaaacccttatgccagatggtctcatgtcagtttgttttctggcactgctgcttccattttctgccttattttctggcagtggttcagaagcattcatctccatcaagtcatcttctgttaattcctgtggtatagtttctattagctcttgaatttctccaagatccatatcttgaaacccttcactctccaccttttaagccatatctacaactatttcatggtttctttgattggccctgttgtaaaacctgtgaagtcatgcataacctctggacacagttttctccagcaggaattgattgtcttgggcctgatggctttctctgtaaacagtgrtgacattttcaatggtataatccttccagacttgtgatgttctccttaacagagttctcttccatagtgctgacactcctttctatgaatataaagtacatgtataatgagccttataggtccttacgacccttgatctagaagctgaattaggaatgtattttgttgttcttgttttttgtgttgttcttgttttttgtttttttttgtttttgtttttgtttttttgagacagaatctcgctgtcacccaggcttgaktgcaatggcgcgatctcggcccactgcaatcgcctcccgggttcaagtgattctcgtgcctcagcctcctgagtagctgggattataggtgcccaccaccacacctggctaatttttgtatatggggtcttgccatgttggtcaggcttgtctcaaactcctgacctcagatgatccacctgcctcggattcccaaagtacttggattacaggcgtgagccacagtacctggccgagatgttgtttttacgggggcaagtagaccacttcaagaccttcggtgttaaacttggggttctgggtggccagatgcaatgtccaatatcaaaagaactttaaagggcattcccttaactaataaaatacttcttgacttcatggacaaagcacccatggagccaatccataaattgggttctcatccagacctttttgttgttcaaccagaagcttttaccttttcccttcaaggttcaggcgttagcagctttgtaagtaagggcagtcttgattataaacctgactgcatttgtacaaaacagtagagttagcctatccctttttgccttaaatcctggtgctcacttctcttttttagtaacaaatgtccattgtggcatttttttttctaaatagggcacttttatctgcattaaaaatctgttcagaaaaaacaacaacaacaacaaaaaaaaacctgttcaggcaaatattccccttcttcagtgatttttgtattggcatctgggagcttgtctgctgcctcttggttggcagaagctgcttctttgtcagtagaaactgcctctcctgtttactggcattttaaaaaggcaaacctctttctaaaattatcaaaccatcctttgctggcattaaatcatccagctttagatcctttaccttccctttgccttgtcgtktaatgacttcactttttctcaaatcattaatctacagatacacttttcttacagcaatcctatacccacataaaagctgcatttttgatatgagataaaatggtatttctaggcctggtgcagtggctcacacctgtaatcccagcactttgggaggccaagacaggtggatcatgaggtcaggagttcaagaccagcctggccaagatgctgaaaccccatctctactaaaaatacaaaaattagccaggtatggtggcacacacatgtaatcccaggtactccggagactgaggcaggaaaatcacttgaacctgggtggcagaggttgcagtgagctgagattgtgccactgcactgcagcctgggtaacagagcaagactccatctcaaaaaaacaaacaacaacaacaaaaacagtatttcacaaaaagtgcaaggttttcatgcctacgggcttacaaatttttttttttttacagtgttctttacactggattcatatatcttgagatggtgggcaactgtagctacagatctcaatctataataccaagcaattcacctgtttcctgtaatgtaacttttttctgctgcttgggagcacttccagcatcactagtggcacttcatgtaggccccatggattattcaaagtttatggttgcactaaatacaatgaaaaatacacaagaactatgagaaatcactctttactgtgatatgcaatttactgcagcaacaactgctcacctggagataagtagcatcacatggcattttaagcagatacatttgagctcaccacagtagcaacaagaggtggctacaaaattatggcagtagtacagtatgtactgcagtttttttcagttgtgacttaatgtatctttacatctgtttacatttttctctactacaaatggtgccatgcagggtccgtgtttatgtgggtaagttttgtatatattttatgatagtaaataataaaataggctagtatcttcatatactttatgcattcatgacatctttttctttttaaaatttttctcaactacacaatttgttttcaagtcttttcgcaaatctccaaagagttacattcattggaaaaaatccacatataagcagactttcacagttgcaaattatgttgttaaatggtcagctgtattaacagtgccaacagtgcacatttattagtctcaatacaccttgcatttaaataggatttttttttttggtcagtctgtttgtttttgtttttgtttaggggggatggattctctctctgtcacccaggctggagtgcagtggcgcgatctcggcttactgcaacctctacctcccgggttcaagcgattctccttcctcagcctcccaagtagccgggattgcaggcatgcaccaccacacccagctaatttttgtatttttagtagggacggggtttcgccatgttggcctggctggtctcgaactcctgacctcaggtgatccacctgcctcagcctcccaaagcgctgggattacaggcatgagataattgcactctcgctagaatcccactgcgcccagccaataaaagcaaattgaggcaccatttaaaacagactgatggctaggcatggaaggctcaggcctgtaatcccagcactttgggaggccgaggtgggtggatcacctgaggtcaggagttcgagaccagcctggccaacatggcaaaaccccatctctactaaaaatacaagaaattagccrggcatggtggcatgtgcctgtaatcctagctactcgggaggctgaggcaggagactcccttggacccaggaggcaaacgttgcagcaagccgagatsgcaccactgtgctccagactgggtgacagagcgagactccggctcaaaaaaaaagaaaatggcttttattactaaaaacagtaagcacttttccatgtgtttactttttgttttggggttttgtttttttaaaacgtttttcattaaatcttgaatagattgaaaataatatttataacatttgctgttaaagaataggaagaaaaaagtcatgtgtctaccacccagcctaagaaaccaagcatgaccatgactttgagatcccctccctatgtttatttatctgataccatttccctccattccttcaggggtaaccagtatcctgaatttcatatttatcatttcctttcttgtctttatagttctatcataaatggttccctaaataacatattttgttttgcatttttttaactttaacagtgtatacaatgttttgtgagttgctgttttcagtgtttgtgagatatatctatggtaaatgttgctttatttttacataatccgttttatgaatatgccatgatttattcattcttctgttgatggatattttggttgtttcctgttttgttttgtttttagttacaaagagtgctactcaaatatccgtctaccttatttctggacatacatgtacaagagattttctagggcttaaaattaagaatagtgttgctggttcataggttcatcctcagacgatgccacatttttttcaaaagtgtgtaagccaaatttacattcccatcagtagcatttgagttcctattactatatatcctaaccaatacttgatattatctaacattgtaacttttaccaactagtggatgtgaaatgataggtagtcgtggattaaatttgcatttccctgattaccaaagaggttgaatatctctttaccaaagaggttcatgtgtctgttagccatttctcttccctcctctgtaaagttacatattcaagtcttttatcattttcctattggattcttttccttactgatttctaagggtatttgtgtgttctgaatgctttatcatttsttaatatcacaaatatctcctctgaatttgagacttctcatttttcccctacaaacagaagttcttaaatttaatgtagttaaatgattcagtcttttcctttatcaatataggttaaacaaagggtgggggaggcaaaaaaaaaaaaaaaaaaaagctttttctactttaaaaaaatgtgcctgcaagagcyggtgagtgcctgtaatcccagctacacaggaggccaaagtagaatgatggcttgaggccagaagttcaagtctacgtagtgagaccctatctcttaaaaaaaaaaatccatttgcaattgatttttgtgtatggttcaaggtagggatcagtttgatttttgtccatactgataactgataatgatctcagtgccatttattgaatatggtatgagatatggtttaggttttttttccccttacagatatccagttgactcattaccacttatttaaaaagcattcacaggtttgtggtgaaagtctggtttgctgtgtcatcactattataaatttctttctttctggtttgcagtgtcatcactattataaattaagcacccgtgtttatgtgcctatgtttttgggatctttattctcctacagtactctatttatctctctttcagctaatgtcatgctctcttaactactgccgctttataataagctttgccgtgtggcagagcaattcctctcaccttgttttgttgaaggactgtttttggctgttttcaattttatataaattttaaattttagaatcaatttttcactccatgcacccaaaaaataacctgaatttatagatcagttggaagagaattgacatcagtccatgaatatggtatatttttccatttacttaggtcttttaaatgttttcttaatactatttaaattttttgtgtagaggtcttgtacattttamaatttattctttagtatataatgcttttatgattttattaattttttttttttttgagatgagttttgttcttgttgcccaggctggagtataatggcaagatctcggctcactgcaacctccgcctcctgggttcaagcgattctcctacctcagcctcccaagtagctgggattacagrcatgtgccaccacgcctggcaaattttgtatttttagtagagatgctgtttctccatcttggtcaggctggtctcgaactcctgacctcaggtgatccgcccgcctctgcctcccaaggtgctgggattacaggcatgagccactgtgctcggccttaatgttatctttcaaaattgtgttttctgtttcctgctctaccaaaaatcagttgacttttattttattttattttattttattttattttattttattttattttattttattttatttattttttgagatggggtctcactgtgtcacccaggctggagtgagtgcagtggtgtgatcatggctcactgcagccttgacctgctggattcaagcgatcctcctgcctcagcctcccaagtagctgggaccacaggtgttcaccactatacctaattttatagtgacagagtctcactatgttgcccaggctggtctctcactcctgggctccagcagtcctctggtctcagcctgccaaagtgctgggattgcaggtgtgagcctctgtgcccagctgcagttaactttatatattacttttacatgagaattttaccagacttacttattaattctaataatttatcttattagaattattatcttaatagacttattaattctaataatttatctgtagaatctttttcttgtcttataatgatatttaggacgtccagtactctgttgactaggaatagagaggacatcattttcttgttccttctctaaaagggttttcaccactaagtatgtttgctacaggttttttgtagatttttaattatggttaaaggactacccacctatttgtagttatgcaaagagtttttaatatgacaggttttaaaagtttgttatcaagtgcttttattctgcatctcctttaatcttttaatctaaaaacttagtgattttataacccaacttttcatttattccaggaattaataaacttggccagtgtggtaccttatgcctgtaaatcccagcactttgggaggctgaggcaggcagaccgcttgagctcagaagtttgagaccagcctgggcaacatggcaaaacattatctctgctaaaactacaaaaattagccgggcatgatggtgcacgcctgtagtcccagctaattgggaggctaaggtggaaggatcccttgagcccaggagatcaaagctgcagtgagctgagatcgtgccactgcacttcagcctgggcaaaagagcaagaccctgtctcaaaaaaaaaagaaaaaaagaaaaatacttggagggtgtgtgtgtgtgtgtgtgtgtgtgttcaatacattggcacaagttttctgctaaaattgtccatcagtgtgccttctgtggataccaaaatctgaagacaagtttaatatgttatataaaatggtgtagtatttgtatataacctatgtacatcctcctgtatactttaaatcattttagactacttaaaatacctaatatataatgtaaatagttgttaatattgtattgtttaggaaataawgacaagaaaaaagtctgtacatgttcaacacagtttttttaattattatttcaatccatggttggtctaattcatgcatgcagaacccacagatagggagggccaactgtgttttgtttggaagttttacaattatttttatgggtgagcttggattataatttttttcttatagtctccattaggttttggtatcccagccttgaaatatgagttgggaactcccctcaagaatagttcttttcccctatactctggaatcytttttttttttttttttttttttgagacgagtcttgctctgtcacccaggctggagtgtagtggcgaaatctctgctcactgcaagctccgcctcccaggttcatgccattctcctgcctcagcctcccagtagctgggactacaggcacccaccaccacgcctggctaattttttgtattttttcttagtagagatggggtttcactgttagccagaatggcctcgatctcctgacctcatgatccgcccgccttggcctcccaaagtgctgggattacagacatgagccactgcacccggcctggaagcatttttttatatactctagaataattgcattacattcgggtattggtccctaggatgtttagtagaagttagtgttttctttgtagatagatttgtgacagttgtttcaacctattkgattattttaggattattgccatttttttcttcattgagtctgttttgctaaattatattaatctagattaacagattattaataatttagcaaaaaatctacattaatctattaatatcaatgaatataaattcagagggtttttttgtatkaaattgtacagttttgtaaattgtacaatcccaacactttcgatggctgaggtaggcagatcacttgaggccagaagttcaagaccagcctggccaacatggagaaactccatgtctactaaaaatacaaaaactagccaggtgtggcgatgtgagcctgtagtcccagctactcaggtggctaaatacgagaatcacttgaacccaggaggcggaggttggagtgagcagagatcatgccactgcactccagcatgggtgacagagcaacactgtctcaaaaaaaaaaaaaaaaagtacattatatcctctctgccttttaaaacttctgctgtatttaactttatgttccattttaaatttctggtaggggatatttgacctctttcatttaatcttgccagagcttagtttgtttttttagttttttcaaagaaccaacttttgcaatttttgatactctattttaaaatcttatttcctttctaatactttaagttgcttaactcttcagttttagccttctaatataagcatttgatgctatgtgttttctactaagcatcactttagtggcattccacaaatatgtagagatatatatattatttgtaaatatcctttccttcattgtctgtcagggtccagatacttttctcaaatacttgaattaacttggataaaggactgtcatcaaaatctattcatttagccgggcacggtggctcacgcctgtaatcccagcacttagggaggccaaggcgggtggatcacgaggtcaggagttcgagaccagcctggctaagatggtgaaacccgtctctactaaaaataaggaaaattagctgggcgtggtggcaggcgcctgtaatcccagctacccaggaggttgaggtaggagaatcgcttgaacctgggaggcagaggttgcagtgagccgagatcgcgccactgcactccagcctgcgctacagagtgagactccatctcaaaaaaaaaaaaaaaaaaacctattaagaaatatttgaacacaggcagacactgtgccagatgacattggtgccacataaatgagcatgattacatccctgaaagagcttctagtcaagtggtgatgtgaaaaaaatgccttcagataattttcaatttaatgacactggaagtaaatagtagattttacaggaactcagttgattatctgttccctgccttaaacctaaaacaaaagatgattatttaacattcagctgaaaaactaaatgtcctcatcatggtgaatacacacacatttgtttcagatagtcccactcggttgcccaggctggagtgcagtgatgcaatctcagcgcgcgcgtacacacacacacacacacacacacacccacgtttgagacagtcccactctgttgccctggctggattgcagtggtacaatctcagctcactgcattctccacttcctgggctgaagcatcctcccacttcagcctcatgaatagctggggctacaggagtgcaccaccatgcctggctaatttttgcatttttttgtagagacgaggttttgccatgttgtccagactggtctcagaactcctgggctcaagtggtccacctgccttgacctcccaaagtgctgggattacagccatgagccaccatgcctggcctatatttttgtgtgtatgtgtgtgtgattaggcccacatatatagtctgtgttgtgtgtcattaagcccacatatatatgtatatgtattttgcgtgtgtatggcattaaacccacaaactatgccagaagtaatatcttgataacatcctgtttttcctaggtgtgaagatgccttaagaaaaaataagagcttaattgggccrgatcaaaaggagtatcaaagggaactggagagaaactatcatcgccttaaagaggccctacagccactgatcaacagaaagatccctcagttatacaaggcagtattgcctgtcacctgccacaggtatgcttatttttaagtggttttagatattctttcctctgaaacctaacatgttaaactagtagaagtctttttacagctcgagcatctgtcatccgaaaagcttaggaccagaagtgtttggggtttcagattttggaatattcgtgttacacttactggttgagtatccctaatccaaaaatctgaaatggtccagtgagcatttcctttgagcatcatgtcagcgcttaaaaagtctctgatattggaacatttcagaattttggattagggatgttcaacctgtatcatctataatcattctacaaggtaaataacttgagaatcaaaaagttggtactcattaaccgggacaccacacaaagtcttgtcattaacttggaattttctacaacgaaatcctagttctattatttaagcagataatttttttagatttctcctytgtataatgagatagaacttaaagaggtttttgtggagattaaatgacattacagatgtgaagttcttaggacagtgcctgacatttcactttatagtacyggaattctggaaaggacacaataactgcagaaagtaaactttcttgcattttgaaatcgaatttacatacaagtattgaagatggtttcctctcaaaattcccaatgggaaacatactagtcccctccacttttggtttccccttcaatctttttgaaagtttttccttcttgctgcttccactccccctctcccagtcttatacccaccaggtcagagatcccagagagccagggtgctgggtccctgagataggcctaatcctcatctcagttccttcagatctccatggaaactcctttccatggaaaggctgtattcttcctgaccaaaattttgccttacaacatccgagtttttgccgtcctctatgatctactttttggccaatcctccaagctttagtttttaacatatgtaggcagttttgaaaaactttttcttgatgaacagtatctagttttcaagactgctgtttcccttcaaagcaagctttgagatttgaagccaatgtgatctctttgtacttggccttttcctttcctggagatattaagcctcatggcttaaccttaatggcacgaaggataagtaaaagaaaccaactgataatrgaaaatatgttaagagtattccaggagtatcgttcccttcactcttttttagaatttaagtttaaaattcttctttagcatttgaatttttaattttgctggtttatgaaatcaggaatatttgcagtagggatcctggacccatgagaggggagtccctaagaccctttcaggaatttccctaagtcaaaactaatttcatattaatgccaaatattggccttttctcacttattttcttgtgagggtacagtggagatttctacaggttgagatgtgacattggaaaagattgactatagaagcacatgtgagaacataggcattaagccacactcctacatgagtaccactctcctaaagcttcttgcagatcatttttaataagcaatgctatttatagtaacatgtaatgggttattttatagtaacttaagatgttcttagttttaatttctgrtatgataaacatccatatatagcccacataaaagattcctggggttctcaataatttttaagagtgtaaaagggacctgagacaaagtttgagaactggtttaagacttaaaatttaataaacacctgccttttgccgtgtaaaaaaccccaaatcttttcctraaatctctcccattatcccttaagtccttgtcttgtttattacaatatctgcagcatcagtcagacaaacgaatacaaaagaccagtaagtggtgactgtaatacacttctatagctaaatctataagccaaaatataaggcagagtaggtaggatgagcatccaacttggaagttagtaagaaatggtggcaaaactttaaggtaactggcagaaaaaaccatgtaagacatttaaaggtatatgcaaaaattgttctctttaactaactatgtcctctcatttttttcccagagattccttcagtcgaatgagccttcgcaaaatggatctctaaactgaatgcacttgttttattcatctgcaaagagccatgtattcaacatcgagtgtgaaaagatctattggaaaacaacatkgaatggaattctgkaaattattattcattgaagaatgcagtggccaagaaaatatcaaatgtagattgttaacgcttgagaatcatggctatggtttctaatgttctggtaacaagctgttatcttttaagacattttaatgactcaaaggtacactatacatttaccattatttataccatagctaaggttaaaaatttattcactttaagttcgtattttttaatttatattaccatttatagattcattttggaaccattttaaatgtagtaatgcttattttaaaggtactattaaatatgtgaatgtttacactaattttaccgagtgggacttcaaaatttttattattgacaatggcagagaacaattaaagggttgactcaagaactagttccaaacctagcagaataaaaatcatagatagccccaaattaatgagtttggtaactgtttcaaagttattttccatttacatacccaaaacaggaatttagaattgcagaactttacttagtaaaacctttgtgtaaaataatttaaatacggggataactaataccagtgacaacaccttaacttgattaaatcttattacaccaatgatagtagtaagaacttcatgattcttagcaactaaaatgaatgatttctctgtttcaaattaaaaccagccatcagtttttgacgatgtaaaccagtaaattagaatctacttaaagctatcttgtagcaccatgaaggtaacacagctggagtttgagaaattacctattttctgacacttgtaaagtttagaagcatataaaaagtaaaattaggtgctttaattcatctaaaattatatgcaagtcatacagaaaaaaaatttgagaagtaacattttaattcttggcaagtttttccaaaacgatgcatagtaatgatttccagaacagtttagaacaatggtttttgggtagtagtgcagtttacagaatggcatcatttataatccttttcttctactgaccagttacatgaatcacttaagaactaaccagatctgggtgcggtggctcacatctgtaatcccaacactttgggaggccgaggcgggtggatcacgaagtcaggagttcaagaccagcctggccaagatggtgaaaacccgtctctactaaaaatacagaaattaattagccaggcacagtggcaggagcctgtaatcccagctacttgggagactgaagcaggagaatcgcttgaacccgggcagcagaggttggagtgagcagagatggagccactgcaactctagcctgggcgacagagactccgtctcaaaaaaaaaaaaaaaaaaaaaactatcatctgtacacacacgcacacacacatacatacatacacacacatatatataaaagaactgatcagattggctgggtgcagtggctcaggcctataatcccagcactctgggaggcaggggcaggcggatcatgaggccaggagttcaagaacagcctggtcaatatggtgaaaccccatctctaccaaaaacacaaaaatcagccaggtgtagtagcccgtgcctgtaatccgaactacttgggtggctgaggcatgagaatcactggaacctggaaagtggaggttgcagcgagccaaaatggcgccactgcacttcagcctgggcgacagagcaagactcttaagtcaaaaacaaaaaccagcactttgggaggccgaggcagacagatcacgaggtcaggagattgagaccatcctggctaacagtcaaaccccgtctctactaaaaatacaaaaaattagccaggcgagggggcaggagcctgtagtcccagctactcgggaggctgaggcaggagaatggcgtgaacccgggaggcggagcttgcagtgagctgagatcacgccactgcactccagcctgggtgacagagctagactccgtttcaaaaaaaaaaaacaaaaactggtcagatttaacgtattgccttcattctatagtcaatgtagtaaatattcaaaatatactaaaaaatatctacttctgagagcctaagtgatggttgatatcccacactccatgtactttaatgggcagtatcatctcaaattcctcttatctatatcaattcaaagactgaatcacaaaaacatttttcagatgagtctacattgttagaccaaatctgagtcagaagggcataacctcaaaactctatttgaggagccaaatgaacaataaggaaaggtaaggagtcaagaatggaaatccctcccctccaaaaaaagtgacattttcccttcttctttgggggtcagtggtgggtataaacataagggagagaataaggaaccactgaagggtcacttctcattaggttacatttatataacagtttggacaaaaatctcagaaatctcagtaatatcaaggactttatgatttatataattatgcaaaaccaattattttctgacatccttcagaacagaggcttcctcttaaacattcgtatgatacaaacctcttacaaacttcatttttcttaaaatggaactttctcacatcaggaatttgtgttagttcttagaactggctgtctctcgagtattaagaggcccagtgtctatcttagacccattccattcaaaacttacaggtagcgctcaggactgtttaaggatttccattagtgattctgaaaggtggggagaaccatgactttattaccatctcatcatcctatgaaagaatataagacattatgtaactgtgtttttttttttttgagacggagtctcactctgttgcccaggctggagtgcagtggcgcaatctcggctcactgcaagctccgcctcctgggttcatgccattctcctgcctccgcctcctgagtagctgggactacagatgcctgccaccacgcccggctaattttttgtatttttagtagagacgggatttcatgtgttagccaggatgatctcgatctcctgacctcgtgatccaccagcctcagcctcccaatgtgctgggattacaggcgtgagccaccgcgcccagcctactgcgatttttttttaattgagaaggtactccttgttgaaatggggtattaaagtgttaccccaatagcatttacatatttagaatcatttctaggaaaaacttagtaccaagaatgtccattaacaagtcatgaaatcattcatcacttaccacttcagtatactagtttaaaatgaaattttaaccaagtttttatgtgtgcccaaagcatcatcttaacttttccagttttggattccattaaatcatgtctactttaaaggacaattagatgcaacagatttcattataaacctcttttaagtatgacagcttggctggactaagcacaatttctcctctttgaaaaactcctgcactgtcagaaagtattcagtaataaaggtaattatgcatgcttattctctcatatatatacatatatatatacacacacttattcgctttaagaaaactcagctgtatttataaaaatatacaagtaaaaaattcaaatattcatatacatagttaagcagtttaaattttattgacctcccagtttttaaaaaaagttaaatttaaggtcacacctctaagtttgatgtactatatacagatcgtgcagaatatgagttaaacagatacaaattagtccatgcccaaaaagatatactagggtacagaatcatcttcataaatacatataaaattcttgtgtagaagcgaactgtccaggttttctgagacacttctaagtgaatcaaggcacaaaatgtacatacaccattgtgaatacacacattctagactttgtgcctctgacatagcccaaggatttagcttcatgactcttataaaactaaatgtactgaatgagattctgcttcttgggtgaaaaaccacaggaactataaacatcatgtagataattactccaaaatatggagaatacaaatacgagcactttattttaaaaagcaaacacaaaagactggtgtaaatccaagtgtttaaatgcctccgttttggataatttaattaagaaccgatacaagtttgttcccagaagctaatgcatcactagtctctactgaggaaaatgagttctaaaaattaacatggttttcagtaattcaaatttcactatttatataaaaacctagagagaccaataatatccagtagcttcaaaagataagctaaagattctttgatgtaatcaactttaccaatgtttgtatgggtgtgtttaatatatacacaaggaaaatacactcactctataatttcttataaaatagcaagtaaggagtagaagtaggagatgtagaaggggaaagagaattcagaaagtccttctcttcagtaactttgacttcagaatcatcaaaaagcaaccacttcccctcatactcctttaagctttgcactacgtatgaaattttgttctcaaatccactaatattaatgcctgtttggtcactggattccttgtttctatcagattcatgggtcccagtagtatcactagtctcagaatttctattttcagcaaacgctgtactagcaaccttatcaggattagaggctttgttgtatagctcataatctgctttgctcttttgtcctccaagaagtccaatagcttctacattttttttgttcaaaactttacttggctgtgtatttccaccaactctaattgacacttcttcatcattataattctcaaccacaccccttgcttcctcctcattcaatggttctggcttacctatttcacacatttggtcaaccacaaaatttcctttatctagttctaaactgttaaggtcagtgactttaacagaagcagtgtaatgcccactactaattgtaatgccactatgcatcacaaccgcaaataatccatagctgtcgttagttggctttgtgctccattcttctagtgacaatttaagaggtgtcaataaaggagtgttgatcttggaaagtccaccaccataacaatcaaacctttgggaggaaaaaaagaaaaggtttcctgcagttctattttaaattcaaaatgttataccccaatctgaaaccaagtaaaaatctgaatgaacccttaatatccagtgttcatatatcagaaaagcagaatcaaaacaagaccccaactttgaataatatttataatatatgcagaaacaaaaaaataaataactgctaatattcaggcatttctgtggaagaaataattgtattttttcctttattttcctaattttgtgcagttaagaaaataaatggtattttaaatagactgaaccggaaccaaaaatgttacgttttgggtttttttttttttaaggcagggtctgtcacccaggctgactgcagtggtgcaatcatggctccttctggactcaagtgatcctcccacctcaggctcctcctcctcagcctcctgagtagttgggaccacaagtgcccgccaccacgccaaactagtttgtgtattttttgtagagatagggttttgtcatgttgcccaggctggtcttgaactcctgggtgcaagccatccatctcagcctcccaaagtgctaggattacaggtgtgagccacccacgcccagcccattttagtcatttttagtgtgaagtttttctctaccaaaatttgggaaagtaaataaaatagtattttatactattagcaaagggaaggtccactgaataaggggctatatgttatcttttgacataatcaagtgtgagagagctactgtgaagccctcgtggtaatttcaaacaagcaactaatgtacaaaggagtcacacatacaatgacattacacatgtcagaaaaaaacagactatccaaaacaatcagcattttttttcaaactgttgaaagactagtttgatttcctggcttaccttaaaactaggaagaatttagcctttcccgccccttcaaaaaaatcttgatgtatacaaaatttgttccctgctttagtcagttctactgaattctgctactaacatctaagagggaatgaatatgaaaagatgaataaagaaactggccgggcatggtggctcacgcctgtaatcccagcactttgtgaggctaaggcaggtggattgcttgagtccagaagttcaagatcagactgggcaacatggtgaaatcctgtctctactaaaaatacaaaaaattagctgggcatggtggcatgcacctgtagtcccagct

SEQ ID NO: 97796 - DNA, 50529 bp, Homo sapiens
  misc_feature (1)...(50529): n = A,T,C or G
gagcgagactctgtctcaaataataataataataatattccatattctattgtatggatagaccacattttgtgtatccattcaccagctgacggatatttggattgtttcttctttttagctattatgaataatgttgctaaggagatttgtgtacaagtgtttgtgtggacatatgttttcagttttcttgggtataaacctaggagtggaattactgggtcatgcggtaactctacacttaactttttgtggaactgccaattttccaaagtggctgcaccattttactaaaggctaaatttttttttttttgagatggagtctcactctgtcgcccaggctggagtgcggtggtgcgatctcagctcactgcaaactccgcctcctgggttcacgccattctcgcgcctcagcctcccaagtagctgggactacaggtgcccgccaccatgccaggctaattttttgtatttttagtacagatggggtttcaccgtgttagccaggatggtctcgatctcctgacctcgtgatctgcctgtctcagcctcccaaagtgctgggattacaggcgtgagccaccgtgcccggccccctaaaggctaaattttaataatcattacaatcttcaggatctgactcttgcttcccatctctttccctgtcttttaccacaagcagtagctccaccagtaaataccactcatagctttctcatgcacaccatgctgtttcttgactctaggcctttatttctgcttcaactgcctggaaaacctgctagcctccactcccttaagacaactcagtggtcacctcttctctaaagcccttctcgtccccattcctgcttcctcaggaaaagataggtgtctcttcctctccacacctatacacatagctattaacaaactttaaatgtcatgacatactggatttcataactatgcttcttcatctgcctcttgcactgggtggaattcttttttccttttttttttttttaaaggcaggatcttgctatgttgcccaggctagaatgtagtggcctgatctcagctcactgccacctccacctgctgggctcaagccatcctcccccctcagcctcctgagtagctggaattacaggcatgtgccatcatgcccagctaatttgttttttgtatttttttagtagagatggggtttcaccactttggccaagctggtcttgaactcctgacctcaagtgatctgctcgcctcggcctcccaaagtgctgggattacaagcatgagccactgctcctggcctcaagagctcattctaatgccatcttttcaacaaataccttttctgatcatccccctcagcaaaaaaaaaaaagaaaaaaaaacctctcatgggactcgctttcattatcatatttaaatttacattttgtttacatacacatctcttctttttttcttttttccagtcttacccctgtataaactggatgaagctgctgccaatttaaccaagtgggaatcccagtgctaattgtctgctggatgggatatctttattggagcagattaacatagcctcaaatttgtggtttgtgaccactgatttagcaaatacattgtttttcttttttctttttctttttcttttgagacagggtcttgctttgttgcctaggctgaagtgcagtgtcacaagctcagctcactgcagcctcgacccccaaggctcaagcaatccttccacccagcctccacagcagctgggactacaggcacatgccaccaacgcctggctaatttttttttttttttttttgtggagacagcatttcaccatgttgcccaggctgatctcgaattcctgggctcagctgatcctctcgcctcaacctcccaaagtgttgggattacaggtgtgagccactgcacctggcgaacatccttttcttttttgtttttttcctttgagacagagtttcgctcttggtgcccaggctggagtacaatggcacgatcttggctcactgcaacctccacctcccgagttcaagcgattctcctgcctcagcctcctgagtaggtgggattacaggcatgtgccaccaggcccagctaattttgtatttttagtagtcagggtttctccatgttggtcaggctggtctcgaactcctgacctcaggtgatccgcccaccttggccccccaaagtgctgggattacaggcctgagccagcatgcccaaccaacattcttttctaaagcatgttggtcagaagcagtccaccacggaggggatgaacaacagtatacagtcatggtctttcatcagggctatgttaattctgttctctgtcacgatgtaatctaaaaaatgtggaccatttgcacattctgcagagtatcacattggtccaccatcttgtaactttacatccttcagacgtctttttttttttttttttcttttttttaaagacagagtctccctctgttgcccaggctgaagtgcatggtgcaatctcagctcactgcaacctctctgtctcccggattcaagcgattctcctgcctcagcctcccgagtagctgggattacaggcacacaccactatacctggctaatttttttgtatttttagtacagacgaggtttcaccatgttggccaggatggtcttgatctcctgacctcgtgatccgcccacctaggccttccaaagtgctgggattacaggtgtgagccaccggacatcttttaagtagaatgaagactacttagaggtaggaaccaaccctaccttggtgatttttgttcctccaaatatctttgcacataataattcaatatttattcaaagaaaacgttatatactgtttcataccacaaacaagattgttctgtccttgaaaacaaaaccttttgtatctttgaatcaggaaatattctataaatgcctattgacctactaatttcctcttccctaacaatcagatactctaccaggatatgtagatatcttcttcagggcaccttgcacttagcagagtcccaaatattttattttctccactctagcaccaccaaatcatgtaaagtatacagccactcacatttcacatcaacctctccattcttatgcatagctccttccagccacccctctgaaaactgactctcctaaacatttccgtaagacccaggatcatgttttcatatatacccatcaatccatttatccaaaacccacttgtaatttaacaagtgctttttatttttattgaagatggggtcttgctatgttcctaaggctggcctccaactcctggtttcaaaggatcctcccacctcagcctgcagagtagctgggattataagtgtgctccaaccaccatgccccgcaacaagtatttattaatctaacttcacttttatggagtttttgttttttaaaatatagagatggggtcttgctatgttgcccaggctggtcttgaactcctggcttcaagcaatcctcatgccttggcctcccaaagtgttgggcttacaggtgtgagccactgcacccagccctaacttcactttttttttttttttttttttgagacagtctcaccccagttgctcaggctggaatgcagtggcatgatctcagctcactgcagcctcaaactcctgggctcaggtgatcttcccacctcagcctcttgtgtagctgggactgcaggcacgcagaaccatgagtagctggaactacaggcatgcagaaccatgcccagctaagttgttttttttttttttttttttgagacagagtcttgctctgttgctcaggctggagtgcagtggcacgatctcggctcactgcaagctccacctcccaggttcaagtgattctcctgcctcagacacctgagtagctgggactacaggcgtccgccaccactcctggctaatttttttgtttgtttgtttttgtattttcagtagagacagggctgtgttagccaggatagtctcgatctcctgagctcgtggtccgcccccctccgcctcccaaggtgctgggattacaggcaggagccaccgcacccagccactttatttttagtagagacggagtttcaccatgtcgcccagaccagtctcaaattcctgtctccaagcaatcctcccacctcagcctcccaaaatgctgggattacatgtgggcaccattctgcccagctgtaatttttaaaaattattattaaaaaagaacaaaacacatagatgccctagactcaactcagctctactgatcaatctttaggggttaggactaggcttttgaaatgttaaaacacccagaaaactgatgaccagtcaggcttagtatcccccatctctaccattcatatggtacttaatgtttcatatttaaatggaaaggacacctcacacttttttgtttttcctatagttcctactcagagaatatgcctaataaatattttatgagagtagtacagaagtatgactccatttttctcttatatttcatttcagtgtggaaggctctttagaaacactattaacataacagcattatgtcaaaaagcgccaataacattctcaccaacttttctttttaaaggcattaggtatagctagactgtaaaaggcaagtggtgtgaagcccaaacctaagatcctaagatctaggatgagtcaagacttcatagtctacatgagtagaggcagcatctagaggaaaacaaaagtatgtggctatcaaattccaaagaagccccattttattacagagaaaatacaaagccgtttcctcacagggaaaagtacagtttcccttctccagggtgacagatgagccttttccgaagttctcagctttctcttctatcgaaacttcccatgtcggttaaagtgtttgtagagatagcggatgcgtttattaaggttgtgcaggtcatcagcgaacattctacttccaaccattttcctctttcggatacaacgttgcaattcattccctttccaacctcgaagccatatgggccccctgatcagttctttggggtgcttttcaaagtttcctgtgtaatgtgagagaacacattagatccaagacaagagaactcatcctacaccagctaagctttcaacccacggttgcatcttgctgagcagcacctatagacaaggcacattacagtacagaacaatagcacagactctggagccagactgcttggggttaaaattctgatgctgccatttattaactctggaaaaattgtttatttttacttatgaagtaaaaattatacgaggggactcagaacagtgccaaacacaatgtaaacagctacataagtgtttgctcttactattgagcacagtaccactctctacacaggaggaaaagatagtcgttacagcctaattgccattctgaaattgtgtaccacgtcgaaggtcaagtcttacccaggatcccgatgttgtcatacactccgaacatggcccttttctcgttccaacgatcaaccactttggggggcgggagagtgagccttataccgatcaatctaggcacacctggggatggggaagggagggaattaatctgagccgcctattatactacgaagcagttatcggggtgcctacatcagccacttaccaagagagaagcttctgcacgccagaggcacccagtcccacaggcgcctacctgccccggataagaggttccctgccatttctctagtctccccccttcaacagcacaccaaataagcccaagaagatgacaggaaccgtccccgccaacttcacacgagtactaaggcgaagacagccatcttgggccttacccaggtagctgtgggcacaccgcccacctacgccccatccgcaacagccacaagccccgccccccgggttccggcaggaggggcctctaccacccttcccgcctcagtgcttccggtccgcctgccggaagttttggagcgccggacaagctgaggtccgcgactcgtcgctaagattccccaaaactgagatttcaagaaaattcaccctttccgctttctttggcgcccttcaaccgtgaaggaaatgaaggttgagaacctggaacccgcttccaatgaccaagccctttctctgtgcctcacaacagtcttgcgctgtagctgtttttattacccctattttactactggggaggagatttgaggtcctgaaagtgaagtgacttgctggacgtcacttagcagaggagatggcgaaacctggattagaggcgatgccttctaactcccagcgtggacttgcctcctttcctgggggtgactgaatgcccagccagggacgcgacgtctctggccagcagaaatacggcctcctccccgccgactgggcaaagggggaccttgcggccaaggagggattcgcaggcgggccgggggtgggagcgggggccggagccggagccttggcccgcccccgggcggcgctgtgattggccggccgctccggcgggcgtcgcgattggccgtcctgcagccgttgagatttgaactcggtatttgtggctttgcccgcgcgttgccagactcagaggcggccctttgcctctgcctgccggggattggccggattctccgccgacttgaaaactgccttgctaattggtgcgtgttgtgcacgcgtgttttttccttttcatttcagcctgactgccggaatcagagccgcgggtgagatccccaggtaagatgtggtgttgcaggtcgtaaaagagtaggaaagtcgagtacatggcagtgtgacccagtcttgggcaaaatacaataggcctagtaggtatatccctggggcgcgatgtgtgagaaactgtaagtctgacagatccgcaacggaagwtgttaagcaaatcgcttaacagatccgcaacggaagatgttaagcaaatcgcttaactttcttacttcaatttccgctctgtaaactcatttgtattattatgcacctcatgggattgaggttaggatacttagatcagatatgatacatgcaaacagcctaacagacttggcacaggataaataaatcatcattgttaatgctcttaccattctggtgcaggaagcccactagcccatgctggggcactgttttggcctcagacgagatcagaccattctctctatacttaaggagctttgcacataaaaatggaaataatagtactttgcacattaatatgccactttatagttctttaaacaccttcgtactgcttgatttgtttgatcatcagagcaactttatgaagtaatcagagtttagtaaccctgtttttacagataaagcccagaggtttaagtgtcaagaccaagtgccaaagtcactactagaattagtttctagtccagggtcaatctcagatcccgtaagataatgttactagcttgctataaaactaaaarccattatatatgttgggggtggggaactaacaaaaccagatgatgttactagcttgctataaaactaaaagccattatatatgttggggatgggaaagtaatagaaccrgatacgaagacaggtcttgaatatagaccctgactttttcactgtttggtttctagccctgtgagcctgtaggagtagaatggctccccaaatgtatgagttccatctgccattatccccagaggagttgttgaaaagtggaggggtgaatcagtatgttgtgcaagaggtactgtccatcaaacatcttccaccacagcttagaggtaagagtccatagctgtcactgkacytagctctttcaaaggaccatctcacatggaattgctacattgtcatttctgttccactacaccaggaagcatcataagagcaagaaacatgtttttcctattttgctgttttatcctaaaattgcatgggatgcatgacccaaagagtacattcattaacttccttttctggattagtcaaaaacagtcttggtgtatgtgattactctttggggaaaagttattttccatctttaccccttactgtgtgtcaaaattaagtcctggtggatttaagagttataggagtggatcgctttttcagaatgtctcggacttaactcgacctgtttttggtaatacctttttggagtctttttggatgtgcaattatggggacaaaaacccataatatatatgtaccactgcaacactgagcaatatatgtacagtgcagtcacctactgaaacctgtaaatgatcaaaagcaccttttgcattaccagaaagacttcataatgtccttgtacttgttgggagcggtcttgtagcagttagcttgctttggagaggtatagagattaaagactggagccaggctgcctggatttgaatcctggttctaccactctgaccttagacaagttacttaattgtctcagtgccttggtttcgtcatctgtaaatatagagataataaccaattcatttgttatcacctacaagaagaagggttggttaatgcagcagctcgacaatatggtcctagcttgtctcctcttggcttttctttcatggttgctagatcgcaacttctttttgtttttcttttttttttttttttgagacagggtctcactctgttgcccagactggagtgcagtgatgcgatatcggctcaccacaacctctgcctccccaggctcaagcgattctcctgcttcagcctcccaagtagctaggattacaggtgcacgccactaccgcctggctaatttttgtatttttagtagagacgggatttcaccatgttggccaggctggtcttgaactcctgacctcacatgatccacccaccttggcctcccaaagtgttaggattataggcgtgagccactgcaccagtctagatggcagcttcttgctctaatgtccagaagtggaaaaaggaattttctttttgtactttttattctttattttattttgaaagacaaggtaaagactctcttgcccaggctggagtccagtggcatgaacacggctcactgcagcctcaacttcccagactcaagcaatcctctcacctcagcctcccaagcagctgggatcacagacatgcaccaccatacctggctaatttttaaattttctgtagaaacagtgtctccctatgttgcccaggctggtctcgaacttctgggctcaagcagtcttcccgcctcagcctcccaaagtgctgggattgcaggctggaatgcagtggcctgatcacagctcactgcagcctcaatctaccaggctcaagcagtcctcccacctcagcctcccaagtagctgggaccacagacatgtaccaaagtgctgggattgtaggcatgaggcaccatgctcrgccagacttttttgttaaaaactaaaacacctacacacattagcctaggcctacacagggtcaaggtcaccaagaagtcactagacgatgggaatttttcagctgtattatatttttatgacaccactgtcgcatatgtggtctattgtttaccaaaatgttacagggcacaggactgtacaggtaagagaaatagaattacccagactggtttaactgatcaagcttattacctaggagcctccctaaacttgagcatatcaaccatttggtaagcaaggaagaaggcagagtgtggaggttgcctaatggatggcaaaccaacagtgtccacaggtatactattctgtccatatcatgtggatatatgtgtcaccaattgaacatgctgcatactatgacaaactactcttcacttattataatgatgcatcatttttttaaatggtcaccttttttttttttaagttctggagtacacgtacaggatgtgcaagtttgttacataggtaaacgtgctgtgttggtttgctgcacctatcaacccatcacctgggtattaagcccagcatgtattagctatttttttcttatgctccccctccccccattccaccctctaacaggctccattgtgttgttcccctccctgtgtccatgtgatctcattgttcagctcccacttgtaagtaagaacatgcagtgtttggttttctgttcttgcattagtttgctgagtccctgcaaaggacatgatcttgttcctgtcacttttttgttgttgttgttgttgttgagactgagtctcccttctgtcacccaggctggagtgcagtggcgcaatctcagctcactgcagcctccgcctcccgagttcaagtgattctcctacctcagcctcctaagtagctgggattacaggcaatgccaccacgcccggctaatttttgtatttttagttgagacagggtttcaccatgttggtcaggctggtctccaactcctgacctcatgatccacccgcctcgacctcccaaagtgctgggattacaggcgtgagccaccgcgcccagccacttttttttttttttaaagagtcttttgttttttggagacaaggtctcattttgttgcccaggctggagtgcagtggctccatcccagctcactgcaacctctcgggctcagccgcccgagtagctgggactacaggcatgtgccaacatgcactgctaattttgtgttatttgtagcaacgaggttttgccatgttgcccaggctggtctcaaactcccgagctcaagcgatctgcccacctcagcctcccaaagtgctgagattacaggtgtgagccactgcacccagccaagagtcctttttaaaacaattgcattgctttgatgattttggtgtttagaatcctgaatacaacttctcctataaataagatcaaatcatttaattcatttaacaagtatttactgatcatgtgctgtgtgccagacattgttctaagcattgataatacaacagtaaacaaaacagacaaaatgacaaagttcttcctttcaaggttcttaacaagtaataaacaagtaaatatgtagtacagtaggacccttatcccaggagatatattccaagacccttattagatgcctgaaactggaatagtaccaacccctgtatatactatggttttttccctctacctgcctacctatggtaatgtttaatttacaaattagatacagtaagagattaacaacaattctttttttttttgagacggagtcttgctctgtcaccgggctggagtgcagtgctgtgatctcagctcactgcaacctccgcctcccaggttcaagagattcccctgcctcagcctccygagtagccggaactacaggcgtgagccaccgcacccagctaattttttgtattttagtagagacgggtttcaccatgttggccaggatggtctcgatctcctgaccttggatctgcccacctcggcctcccaaagtgctgggattacaggtgtgagccactgcgcctggcctgtttaacaataatattaataaaatagagcaattgtaactatgccagcatcactacccttgcactttggggccattattaagtaaaataaaggttccttgaacagaagccctgcaacagttgatctgataaccaaggtggctactaatgggtgagtagggttgcatatacagtgtggatatgttggacaaagggatggttcacatcccaggcaggaggcggcagggcagcaccagattttatgctactcagaatgacacacaacctacaatttatgaattgtgtatctctggaatatttctttctttctttctttttatttttttaagataagggtcttgctttgttgaccaggctggagtgcagtggctcaatctcagcccactgcaaccttcacctcctgggctcaagcaattctcctgcctcagtttcccaagcagctgggactacaggtaagtgccaccacgcctggctaattcttggggggtttttttgttgttctggagacggagttttgctctgtcgcccaggttggagtgcagtggcaaggtatcggctcactgcaccctccacctcacaggttcaagcaattctcctgcttcagcctcccaagtggctggaattacaggtgcccaccaccacatccagctaattttttttgtattttttagtagagctggggtttcaccatgttggccaggctggtctcaaactcctgacctcaggtgatctgcccaacttggcctcccaaagttctgggattataggcgtgagctactgtgcccagcctatttctggaatatttcatttaatattttcagacttgagattgaccacgggtaactgaaaccccagaaagtgagaacacagattggtgaggaccactgtgtgtaagatggttgtaagagccaaagagaaaaataaagaagacagtgtggccaggcgcagtggctcacacctgtaatcctagcactttgggaagccaaggtggttggattgctcaagctcaggggtttgagaccagcctggccaacatggtgaaaccccatctctaccaaaattacaaaaaagttagccaggcgtggtggtgcacacctgtagttccagctacttgggaggctggggtgggagaattgcttgagcccaggaggcaggggctgcagtgagccatgatcatgccactgcactgcaacctggccacagagctagaccctgtttcaaaaaagaaaaaaaaagaagtgtactgggaatggtggcttgtccctgtaatcccaaccacttgggaggcagaagcaggattgttaaggccaggagttcaagaccagcttgggcaacatagtctctaaaattaattatacaaagcttaaaaataaataatataaagaagaagatagtaggacctgtcatttcatgttggatcatcagagaaggcttkctgttacgtcacgtttgagcagagaccttaagaaagtaaggaaataaactatgcagattgttagggaagagcattccaagcaaacagaaaagcctatgcaaaggccttgaggtgggcaaatgccaatagagttggagtgcattaagctaggaaaaagagattaggtaggaagtggtacagattattctagaatcttgctcctcaaaatgtggtcctcagatcagcagtgttaatatcaggatctcatgatctgggagcttattagaaatgcaggatgtcaaggcccaggatgtcaaagctgctgaatcaggaaatctgtattttaagaagattcccccaggcaatttggatgcaattataagcttgagaagcactgatctctagagcctcgtagatcatggcaaaaacttgaacttcagtgtgaatgaacttgaaagccattgggttttgagcatgggagtgacatggtctgacattttaaaagattcactggcgactgtgttgagcagagactataagaggcaaggagagaagcagggatactagttaagtggctaatacagtaataccaagtagattggactggagggatagcaggggaagtggtgataaaacgactcaggatatattttcaaagtagagcttttacaggaatgctgatggattggattggattatagggttagtaaaggaatctgagatgagaatgattacaaggctttttttttttttttttgacagtcttgctctgttggctctgtcacccaggttggcgtgcagtggcgtgatcttggctcgctgcaacctctgcctcccaggttcaagcaattctcatgcctcagccacctgagtatctaggattacaggtgtgcaccaccacgcctggctaattttttttttttttttttttttttttgaggcagagtctcgctctctcgcccaggctggagtgcagtggcaccatctcggttcactgcaagctccgcctcccagggtcacgacacctggctaatttttgtatttttagtagagatgcggttttgccgtgttgtccagtctggtcttgaacttctggcctcaagtgatctgcctgcctcggcctcccaaaatgttgggattacaggcgtgggccaccacacccggccttacaaggctttttgacttgagcaactagaagaatgaagttgccatttactgagatggggtagcatatgggagggagaggtttagattgttggttatgtgagtgcagagttcaagggagaggttgtcagctaaagatacacatttaggatttaatactcagcgtgtagacagcacttaaagccatgagattgcagtgagtgtagatggagaagagcagcagtttgaagaccaagacctgagacagtccagcatttagaggctaggaggatgaagaagaaccagtagaagaaattaagaagcagtcattggggcagaaagcgaatgaaggagctaaatggacgctaaataaagagagtgtttcaaaaacaaaagagaggtcaactgcagattaactactggatttattgatgtcatagtcactggyaaccttgacaaagctgtttcaggagatggtgggggcaaaagcctgctaggaataggtttttaagaaaatggaatgacagagattagagatgatgaatttacataatgtatttcttttaagatgggcagcattatgtgtgtctatattgagtaggaatgatcagagagggaaaagctgatgctgcagaaggaagagggaacagttgttggagcagtgcctttagtaggtaagagagtacgtgatctggtacacggggaggagatggctttatcagaacatggacagtttatccacagtagcaaaaaaaaaaggcagagtgtatgtatgggcatagatgcaactagtgcaggtaaatatagagcttggggcagttgaaagttctcttctgtctgcttctgtttcctcaataggaagggaaagcctttaactgagagtgagtttgggaagaaggtcatggtgttatgagcagaggataggtgtgaaataattgcctagaagaaaacgaatagacttgggagtacgaatgcccacttcaggttagtagtcatgagtttaacgtaagactagtcagcttgtttctgtgtttttctcaggccatttttatttgtgtggtcacatgaatggagtaaccagaaagttgrtttaacctagatttgccaggggagtatgtgttgttgttgttgttaattagtggaataagttacaagtatcacagtatctaacaataggggaatagtaaattaagatagatataaggccgagtgtggtggcactgcctgtagtcccagctactcagaaggctggggcaggaggatcgcttgaacccagaagtttgaggctgcagtaagctatgatcctgcactgcacttcggcctgcgcaacacarcaaaccctgtctcaaaaaaaattgtttacaaaggtgtttttgttgttgttgttgttgttgttgctttttttttgagacggagtctcactctgtcacccaggctggaatacagtggcactatctcggctcactgcaacctcctcagttcaagcaattctcctgcctcagcctcctgagcagctgggattacaggcgcatgccaccacacctggcttttttttttttttttttttgkatttttattagagacggggtttcaccatgttggtcaggctggtctcgaactcctgacctgatgatccacctgcctcagcctacaaagtgttgggattacaggcgtgagccaccacgtctggcctacaaaggtttctaatacacttactgtaatgctaaattttaaaaagcatgacagagaagtgaatatgtgatacaagctcaacaatggaaatacgatgtatagaaaatggactgagaaaaattatgctgttataactgaatgcctgagactggatatttataatgaatagaaatttattggctcacatttttttctggagactgggaagtcccaaatcaatgcaccagtaactggcaagggccttcttgctgcattgtcacagggcagaaggcagaagggcacaagtgaacccactccccagagccctttttataatagtatgaatatatcggtgaggggttgggcacggtggctcacacctgtaatcccagcactttgggaggccgaggcgggcagatcacaaggtcaggagttcgagaccagcctggccaatatggtgaaaccccgtctctactaaaaatacaaaaaattagccgggtgtggtgacgcgtgcctgtaatcccagctactcaggaggctgaggcgggagaatcacttgaacctgggagccggaggttgtagtgasccgagatcgtgccactgcacttcagcctgggtgacagagcgagactccatctattttttttttttttwaaaaaagatggtgaaaccccgtctctactaaaaaatagaaaaattagctaggtgtggtggcaggcacctgtaatcccagctactcgggaggctgaggcactgaattgcttgaacccaggaggcrgaggttgcagtgagctaacatcatgccactgcactccagcctgggcgacagagcgagactccgtctcaaaaatatgtatatatatttgtgagggtggagccctcataacctaaacacctcccattagactccaccttccaacactgtcatgttggggattatatttccaacacatgaattatgaggggcacattcaaaccatacagcrtgctaagtgttgttctgactggtttgcatggactatctcattcagttttgacatatatatatacatatatatatatatakatatatatayayayatatatataccattggtccttgaacaacgtgggggttagggatgacaacccctgtgcagtcaaaaatctgcatatgtaagttttgactgccccaaaacttaaacacttatagcctactgttgaccagaagccttacaagtaacataacagtttttttattttgttttgttttgtttttgacagagtcttgctctgtggcccaggatggagtgtggtggcgcgatctcggctcactgcaacctccacctgctgggttcaagtgattttccggccttagcctcccaagtagctgagactacaggcatgcaatattgcacctggctaattttgtatttttagtagagatggggtttcaccatgttggccaggctggtctcaatctcctgacctcaagtgatctgtccacctcggcctcccaaagtgctgggattacaggtgtgagccaccgcgtcgagccttaatacatatgttttttatgttatgtatattatttactatatttttgcagtcaagctagaggaaatgttattaagaaaatcataaggaaaatacatgttcagtattgtgctgtatttatcgacaccataagtttacatgatgaatcatgtaaaatggcaggcaaccacagctgcagacctccgtccatggtaccatatgaagcaatttggcttttcttgtaatgtcatgactcttttctgcttcttgggaacacttccagcatcactagtggcacttcattatgggtcccatggtgtyatgtaaggtttatgatactgctttagacacatgaaaaatacctgaggaaccacaggagatcacttcttgctgccatatgcaatttttgttttgagacagagtttcactcttgttgcccaggctggagtgcagtggcatgatctcgactcactggaacctccgcctccccgggttcaagcgattctcctgcctaagcctcccaagtagctgggattacaggcatgcaccaccatgcctggctaattttgtatctttagtagagacagggtttccccatgttggtcaggctggtctcgagctcctcacctcaagtgattcacccgcctcggtctccaaagcgctgggatttacaggtgtgagccagcgtgcccggtctgccatatgcagtttactggagagacgaactgctcactggaagatgattaacatctcagagtttttaagcagatacttgcaacatttgagctcaccatagtatcgacaagaggcggctatgaaattattacagtactacagtgtgtactgaagtgaattttatgcagttatgatttaatactgcatctttaggccaggtgtggtggctcgcgcctgtaattctagcactttgggaggcctaggcaggtggatcacctgaaatcaggagttcaagatcagcctggccaacacggtaaaaccctgtctctactaaaaattcaaaaattagccaggtgtggtaaatataaaaattagccgggtgtggtggcatgcatctgtagtcccagctcccagggtgactgaggtgggaggatcgctggaacctgggaggcagaagttgcagtgagctgagattgtgtcactacactctagcctgggtgacagagcaagaacctgtctcagaaaaacaaaaacaaataatattgcatctttatatttatttccgtttctcttgggctgtgaatgatgtcatgtactgtctgtgtttgtgtgtgaggttttttggtgttttttttttacatggggtctcactgtcacccagcctggagtgcagtagtgtgatcacagctcactgcagcctcagcttcctaggctcaagcaatcctcccgcctcagcctccagaacagctaggactacaggtgcaccccactgtgctcagctaattttttattttttgtggagatggggtcttgccatgttgcccaagctggtcttgagctcctgacctcaagtgatcctcctgcctcagcctctcaaagtggtggggttacaagtgtgaactatcacatccagcctgcatcaagttttgataagttttaactttataatagacatatatatttggccgggcacggtggctcaacccctgtaatcccagcacttcaggaggccaaagtgggcggatcacgaggtcaggagatcgagaccatcctggctaacaccgtgaaaccccgtctctactaaaaaagtacaaaaaattagccgggcatggtggcgggcgccggtagtcccagctactcgggaggctgaggcaggagagtggcgtgaacccgggaggcagagcttgcagtgagccgagatcgcaccactgcactccagcctgggcgacagagagagattccgtctcaagaaaaaaaaaaaagacatatatattttatggtagtaaatgataaaatagactaggatctacataaattttatgcgttcatgacatatgtagctttaaaaaaaaattagccagatatggtagagcatacctgttgttctagctactcaggaggctgaggcagcccgattgcttgagcccaggaatttaaggctgcagtaagctgtgattgtgccattgcactccagcctgggagacagagtgagactttgtctcaaaagaaagaaagaaaaaattccagtatatttactgaaaaaaattagcatattagtggacctacacaattcaaatcgtattgttcgaagattaattgtagacatacatakgtgccttacttttctccagtgagagggcctaaaggcagtaatactctaatagaaatgagtgcaagtaatgcctagaatttggcttctacataccattattccrtaatagccaggattccaccaagaatggttgattacaggactgggccagggaaaatacaagatgagcccagaacatcttttattttatttatttatttatttttgagatggtgcctcaccatgttgcccaggcggatcttgaactcctgggcccaagcgattctactgcctccacctcccaaagtgctgggattacaggcttgagcccagcccatctcatgatacaagacagtcagggaacaaaaatgaagggaggctgggtgcagtggcccatgcctttaatccgagtactttgggagtgttgggaataacactcaaaatcctaaggaaaatgaacattcaaacaaaggattcttaggaaagcaattttacttctctgcagaggggtgcctctccttggccagtcgccgtgaaagcacacctgaacaaaggggcacgagagcctttattcctgacgcaagtcctgcccctgtacccttttcccatttgccggggtcgggttgcacaattagcccaattggctaaacatctgaactttctttagataaggtgggcacataagggagagaggggaaaaggtgaaggggtgtctgcaatgatctagagagctagtcttctttccaaataagggaaggaatagtaatagtaagaaatagtaagaaagaaaataaagaaatagtaataaaggaaagctagtcttctttccaaataaggaaaggaatgtgagctggtactgataagcctggtactgtggcgtgtccaggcatgtaacaaaggcagaaacgaaaaaaagagaaaaaggaaaaaaggttgtgggggagtgctatgaattaaagaatagaggattgatcaggctatttgaagagaaacctcatcatatcccacaggaggctgaggcagcagatcagttgatcccaggagttcgagaccagcctgggcaccaaagtgagaccctgtcgctacaaaaaattaacagaaaaaaaaattagctgggccgggcgcagtggctcacgcctgtaatcccagaactttgggaggccgaggcaggtggatcatgagatcaagaccatcctggctaacatggtgcaaccccgtctctactaaaaataaaaaaaattagccaggcgtcgtggcacgcacctgtagtcccagctacgtgggaggctgaggcagtagggagtaggcagtaggatcgcctgagcccaggaggtcaaggctacagtgagctatgtttgcaccactgcattctggcctgggcaacaaagcaagaccctatcttgaaaaaaacaaaaaaatggaagcatgttcaaaggacacaggccaagttgaaggagattgcagagaccaagtatgggacaatttgagcaggaaaataaatagtaatagtaatggattaaagcacagaataagacaaatatccctaagtccattctgctataaataagtgaataactaaataaagggaaagggacagctaatcgttacaatagcattcccattagtaaatgtagaaggaataatagagatagaaaatcaccatttagtaaacaccacagcagtaattgtggcaggcaagaatcattcatggatgcttcaattagtgggcaaaaatgtgatgtgaaacaggacatttacgtagtctgaaagtatcttcccacaaaaatactggttgcaaaggggaaaataataatgttacagtggagaaatgtggcagacactacgaagtgatcaaagttaacatcagcagtaataagacattcacttcatgcacctcttgatacgatgcctgaggaccaaccctcccttctgctgtaatcttacgaaaatacataacttcaatataatcgcgagaaaacaggccaacccaaattgagggacattgtacaaaataagtgacaagtactcttcaaagaagtgtcaagatgatgaaagataaagactggaggagaggaaggagacctgacaactaagtgcattgtgggatcctgaagcagaaaaaggacacaaataggataaactttttttttttttttaaaagatcctgagtttgtgttccctcctaactactgtaagttggacaagtcatataactactctaaggtgtaaagtaggcgtggtactgtctgcttttgctcaggtgtggtgaagctcaaacaaggctttaattgtaacacaaatataagatatcatcatcattattttattttatttttttttgagatgagacggagttttgctcttgttgcccaggctggagtgcaatggcacgatcttggctcactgcaacctccacctcttgggttcaagcaattctcctgcctcagcctccctagtagctgggattacaggcgcctgctaccacacccagccaattttttgtatttttagtagagatggggtctcacgatgttggccaggctggtctcaacttctgaccgcaggtaatccacccgtctcagcctcccaaagtgctgggattacaggcgtgagccaccatgcccggctctcatcgtcattataggttacattgaagtgaactgtttgtctcttttttgtgattctaccaataaaagcaataaacctagttttctgccatggatagaatttactgaaaaggtttctcttccctccaaattgatttgttttttccatcttcatagcttttcaggctgcctttcgagctcaggggcccctggctatgctgcagcactttgatactatctacagcattttgcagtaagtgaaacacccaactggtactttaaaaagaactggtgactgtttgtcctaactgtgcatgttagtcctgaaattccaagttataggttcacygataaatgcctctggatattgatatctctgatgagcatgtacccagcttgccaccgtatttattcagttgaacaatttcacgtgtatttttaaacattcgattccaygggttagatctgatctgttagaaggggctctgcaggctccttcctgtctcacccccacactttctttccctcatagtcactttcgaagtatagatcctggcctcaaagaagatactctgsaattcctgataaaaggtgtttatgggtcagggrgtaggggatggaaggtgtttgttatcgtttgtttgtttgtctgtttgtttgtttttcctacattttgtcagccacatgatgataycaaggctgttgtgattcagttggtttggctaagcccagggacctttggcctgttaaaggtctgtaatcttggtgggcgatacagagttatgtgtgttcactgtaagggcagaccaacaagaactttttcctacttttgagctacctctttttaataggggtgattcttccagttgctggagagaaattgtggtaactggagtgagagagtaggaacagggcatgttcagggtatcagggccaagggtcctaaaggacttagcttgtgttatggccactgagagatgaaacacagatctttggtaatctgatggctgcaagtgctgggtgttttgaagttggggtatatgaaagaagtgagtgaaactgactccaagattctgcccctcacagtggtatcccgccactcccaggagcttccagctatcctggatgatacaactttgagtggatcagatagaaacgcccatctaaatgccctcaaaatgaactgttaygctctgatacgtctcctggaatcctttgagaccatggccagccagacaaaccttgtggacctggaccttggtgggaaggtaatttggagttttgggctcacgttatatggggtctggggagatasgggaatagatggaaaagaagggaatccaatgatccacaaatcctttctgtcctcattgagaatttaggagaaagaactcaaaagtgtcacacgttttcttcctggacaagtagcgctgtggaacttgtaatatttcttccgtattaccttctatgttgtcttggtactagattgtttgggcactcagactgacagatcttgacccacttttttcccttattttttcctcaatgtatacatgatcctttttagggtaagaaagctcggaccaaggcagcccatggctttgactgggaagaagagaggcaaccaattcttcagcttttaacacagctacttcagttggacatccgtcacctgtggaaccactcaataattgaagaagaatttgtcaggtgggtagggaggatggctacagataatactgagctgtgagagtgaggctctgttgatagatatgccgtttttttgtttttgttttttttttgtggggggacagagcttcactcttgtcgcccaggctggagcgcagtggttcaatctcggctcactgcagcctctacctcctgggttcaagcrattttcctgcctcagcctccygagtagctgggattacaggtgcccgccaccacaagctgatttttgtatttttaatagagacgggttttgccatgttggccaggctggtcttgaactcctaacctcaggtgatctccctgctttggccccscaaagtgctgggattacaggtgtgarccaccacgcccagccagaagtctatttttaaaataagtaaaataagtttgatggaagaaggttgtgattttaaatcagctactctaggcccggtgcggtggctcacgcctataatcccagcactctgggaggccgaggcgagtggatcacctgaggtcaggagttcaagaccggcctggccaacatggtgaaaccttgtctctactaaaaaaatatgaaaattagctgtgcatggtggtgtgtgcctgtaatgccagctacttgggaggctgaggcaggagcatcacttgaacctgggagagggaggttgcaatgagctgagatcgcaccattgcactccatcctgggcgacaagagcaaaatcccgtctcaaaaaaaatagatagggccaggcgcggtggctcacgcctgtaatcccagcactttgggaggctgaggcaggtggatcacgaggtcaggagatcgagaccatggtgaaaccccgtctctactaaaaatacaaaaaaaaattagccgggcatggtggcgggcgcctctagtcccagctactcaggaggctgaggcaggagaatggcgtgaacccgggaggtggagcttgcagtgacctgagatcgcgccactgcactccagcctgggcaacagagcaagactccatctccaaaaaaaaaaaaaaaaaaagatagatagatagatagacagacagacaaacagacagacaagctactctagtaagacttctttgagatggtgacatttgagcaaagacccagaggaggtgactgagagctatgagaatatgtggaggaatagcaagggcagggaaaaggaatagcatatgcaaagaccttgaggagggagcgtgtccagcacgtacgagcaatagcaaggaggccagagagctgacagctgagagcaggtacgagggttaggccgtgaggccatgggagcagtggggagccagaccgcaggttyttgtgggccatcatggkgactttggcatttcctcagaatgaagtggagccactggggagccacaagcagggaggtgaggtgacctgacttgtacttcaacagggccatcctagctgttgtattgaaatcgactatggagggaaaggggaagcaagagaccagttaagaggctgttccaataactcaagcaagagatgatggtctcttagaccaaggcgtggcagtggagatggggagaagtagttggattctatactttttccttaaggtagagcttacaggatttgctaacagactgggtgtgaggtgggagggagagttcagtcaaggatgactctcccgggttttggtctgagcrtttggaagactggagttaatggtaactgagatagggagaaggctgtgaataggtgttttgggaggaagatcagatgttctgttttggacatacaaagtttgaggtgtttattagccacgtaaagtcagatttggacgttgaatatatagatctggagttcaggagagaggtctgagctagagataacacatttgggaatataatagtattcagagccgtgagactgaatgaaatyaccaaatcagtaagtgtagctaaaagagcaggaatccaaggactggtaccctagggcactccagcattaagagtgaggatgccgggtgcatggctcacgcctataatcctagcactttgggaggctgaggcaggaggatcacttgagcccaggagtttgagatcagcctggacaacatagtgaaactgtgtctctacaaaaaatagaaaaattagctgggcatggtggaggctgaggtgggagcatcacctgagctatgaggaggtcaaggatgcagtgagccgtgattgcaccactgcactccagcctgggcaacagaggcagaccctgtctcaaaaaaaagagtctgaggaggaactagccaaagaaactgagaaaggagtcttgttcttgtgtcctggaagcgagataaagcatatatttcaaggagaaagtgagtgattaactgtatcacatgcagctgtgaaagaccacttgagatgcagattgaatcagtcgttatatttaggaatgagaagtcattggtgactttgtcttttttttttttttttttgtgatggagtctcgcaatgtcgcctggcctggagtgcagtggcatgatatcagctcactgcaacctccacctcccaggttcaagggattctcctgcctcagcctcccaagtagctgggattacaggcgcccaccaccacacccagctaattttttgtatttttagtagagacagggtttcactatgttggccaagctggtcttgaatgcctgacctcgtgatccacctgcctcggcctcccaaagtgctgggattacaggcatgagccaccacacccggccaactctatcatatttttatgatatatttaggttctttgtcagcatcacaactggttgaaagttggtaatcttgaaggaaggagtacctaactggggtcagcaaagcaaagcaacttgttatagaaagtaatggctagaataaagaaaaccctgactttgggagcagtagggatagaatgaatgaggcagggctctgatacarttggatycagacagctgctttcatcatctcaaactcttcctttctcagtttggttactggctgttgctaccgccttctggagaatcccaccattaatcaccagaagaaccgccccactcgggaagccataacacacctgcttggtgtagccttgacccgttataaccatatgctcagtaagttaccagtcgctttgccccgccttttttgtattgcccataatttctcatgtttaatgcttccacaggtgctacagtgaagatcatccagatgctgcagcactttgaacacctggcacctgtactggttgcagccgtgagtctatgggcaactgactatggaatgaagagcatagtgggagagattgtaaggtgactcttccttctcgaagtttctcatgcttattttccttggggagggaataaagaaagattggaaatacattatctgtgcaacagtagattccttcagatattagatacctgtcttaccttcccttactgggaactgaataattgatctatgttgctatggctgtgttttcttccctgtgtagagagattggacaaaagtgtccccaagagctgagtcgagacccttcagggacaaagggctttgcagcattcctgacagaactagcagaacgtgtcccagctatcctgatgtccagcatgtgcattttgctagatcacctggatggagaagtaggtggtccactaggggtcactgagctttttctggggattttaagtccagcgttgaaaggctgtttcttaacagaacaagaaagtagctttgacaagttgtctagatttatcattgtgacatttcctttctgtagagaagcaggtcaagtttgttgaataaggagctctttattaatctgttaatctttcaattcacattgcttttatccagttctggtaagggagatgacatttctgcagcttaagtctagtaagagcaactcagctttgattttttttttttcttggaggtaggatctggctctgtcacccatgctggagcatgatcatagctcattgcagcctygatctcctgggctcaagcaatcctcccacctcagcctcccaagtagctgggacttcaggcacatactaccatgcctggctaatttttttagtttttgtagaggtggggtcttgccatattgcccaggctagtctcaaactcctggtctcaagcaaccctcctgcctcagcctcccaaagtgctgggattgcaggcgctaccatgcttagccttcagctttgattctgagtcccatctgttcctcaggataaagcgtcttcccaccagctggcttgccttgcttcctcaaacaatgaactttctcaaatcaacccatgtcatctctctcaattctcttttatgcctgaatgctaacctggctgattcccatactgatgttgggcactcctaggtgaatgtcaaggacaaagacagtccacttgttcatctcatttactttaactttttgtgcaagaccctattctctggttcttagcctggcaaaaccttaaccctgctctccactagattatgtattggacttgctggcactcttaaggctgatttccatgtttctgtctcattttctgtcagtaaagcatctgaaggagagtgggagggaaaggaggggatatttattagtaaggattaaagactttgaggccaggtgtggtggctcacgcctgtaatcccagcactttgggaggctgaggtgggtggatcacttgaggtcaagagtttaagactagcctggccaacatggtgaaatcccatctctactaaaaatacaaaaaaaaattagctgggtgtggtggcgcgcacctgtaatcctagctactcgggaggctgaagtgggagggttgcttgaacctgggaaatggaggttacagtgagccaagatcgcaccactgcactccagcctgggtgacaaaacgagactctgtctcaaaaaaaaaaccaaaaaaaaccacacagacgggcgcggtggctcacgcctataatctcagcactttgggaggccgaggagggtggatcacgaggtcaggagtttgagaccagcctggccaatatggtgaaatcctgtctctactaaaaatacaaaaattagctgggtgtggtggcgggcacctgtaatcccagctgcttgggaggctgaggcaggagaatcacttgaacccgggagtcagaggttgcagtgagccgagatggcgccacagcactccagcctgggcaacagagcaagactccgtctcaaaaacaaacaaacaaccacaataacaaaggctttgagacctcagctgaagggtagttaataaatgcttttcaaatgtgtgttggtgagtggatgtgatttttttattcagctactaccatgctttcctgtgtgagccctatgaggaaaaattggttttggcccttgttctagcattctctgagcaacaagtcctctttgggattcagctttctcctgtgaccttgggagtgaatacctaggcagttaatggaaaaagttatggccaagcacaagcaagcttcgccttgactaaaggtttgacccctctatgcttctctctcttagaattacatgatgcgtaatgctgtgctggcagccatggcggagatggtgctgcaggttctcagtggcgatcaactggaagcagcagcccgagacaccagagaccagttcttggatactttacaagcccatggccatgatgtcaactcctttgtgcggagccgtgttttgcagctcttcacccgaattgtccagcagaaggtaaccaacttctatgtggcaaaaacatatggtacctctccatataccagtgtaaagaggaatccagtgttgaagataaatatctgccccaaagaggtctagaattcacatttttattatcagtagtaaaagtcttcctctaccaaggacgaggatatctggctccctttaaggactstaatgtgtcttaccactacaaggagtactcctaatctatattctgtagaaagggtttttagagtgagtgggtagctcagtttagagtatacttaaagatcatcttgaacaaaatggatgatgtgggacttgagcagattcttctcttcctaccctacacaggctctccccctgacacgtttccaggcagtggtggctttagctgtgggacgtctggcagacaagtcagtgctagtatgtaaaaatgccatccagctgctggccagttttctagccaataatcctttctcctgcaaggtaagtagacttggtccaccaaaagagaaggaattaaatggaaacagggatgaaattatgtcatttactgaccctgctattcattttacctgatagcttastgatgctgaccttgccggaccactgcagaaggagacccagaaattacaagagatgagggcccagaggcgaactgcagcagcttgtaagtagttactgccttggagtcctaatgccagacaggcttctccttgcagtcagaaactctagtgaaagagactaagtgacactctcatttagctgcagtgctggacccagaggaggagtgggaagccatgctgccagagttgaagtctaccctgcagcagcttctacagcttccccagggagaggaggagattcctgagcaaattgccaatacagagacaactgaagatgtgaaaggacgcatctatcaactgcttgccaaagctagttacaagtaggcaaaagaatgggatattcttcgtgatctgtttatgtttagagttaacctttgagaaacttacataatgtgtcttttaaattaactgcacacagatatgctgccaccaggtgatggtagatgttttcatgtagtaatggtctgaccataggcctagtccacaattaagcatgtgtttctactttataaatgtttaaaaaaactactgaaacaattaaatgttaacaatattataatcaaacatgagtcctccttcaattgaagaagagcacctataaataagttctagttgtatgatcttgaataagttgcttaactttctgtgcctcggtttcattatctataaaataagaaattgattagatcttatgatctctaaggactttctaattctaaatttcatgaactaataatatcaaacatgcttaatactaccttaatcttcaaacctagtatgaatcctgatcttagagaaaagatttctcctagtgtttttgtgactctagaacttaacaacaaaagcccttacagccgtcaacaagttttttttttttttttttttttttttttttgagatggagtctcactcactctgttgcccaggctgcagtacagtgacacgatcttggctcactgcaacctctgcctcccaggttcaagcaattctcgtgcctcagcctcccaagtagctgggaccacaggcgcgcaccaccacaccgcactaatttttttatttttagtagagacagggtttcaccatrttggccaggctggtcttgaactcctgacctcaggtgatccacccatctcagcctcccaaagtgccatgattacaggcgtgagccaycgcactcggctgccaacaagtattcttaaacctcagccacaagttatttgttatttatttacttcttacctaattgggctgaattttttttttggagacggagtcttgctctgttgcccaggctggagtgcagtggtgcgatcttggctcactgcaacctccacctcctgggttcacgccattctcctgcctcagcctcccgagtagctgggactacaggcgcccgccaccacgcccggctaatttttttttttatatttttagtagagacggggtttcaccgtgttagccaggatggtctcaatctcctgacctcgtgatccgcctgcctcggcctcccaaagtgctgggattacaggcttgagccaccgtgcccggcttgggctgtttttagaaggctagagagtggcttgtttgccctatgactcccttatgttactttagtgtctctctttttattttgctaaagcaaaaatagagactatagttttataagtgcatgttccaccaagcattctagtattttctcctgtcaattagaaaaggattgtttgtttttgagacagaatctcactgttgcccaggctggagtacagtagcgcaatcacagctcactgcagcctctcactgtagcctcaaccctgctgggctcaagcgatctcccacattagcctcctgagtagcctggttaatttatttataatttgtagctgggattacaggtacacaccaccaggcctggcctttgccagcctgggcaacgtggcaagaagataacatgtagacaagcagtcaaacatgtattctttttttcccccttttatatgactgatagaattctctgcccactgatctaccatcttgtttttttcacttaactatgtgtctcagtggtttttaaaaatatttatggctgggtgcaatggctcatgcctgtaatcccagctacttgggaggctgaggcaggagaattgcttgaacccaggaagcagaggttgcagtgagctgagattgctccgctacactctaccctgggtgacagaggaagagtccatctcaaaaaaaaaaaaaaatttatagatggccaggtgcagtggctcacacctgtaatcccagcaccttgggagcccaaagctggtggatctcttgaggccaggagtttgaggccagcctggccaacgtggcgaaatggcgaaacccatctctgctaaaattacaaaaattggccaggtatggtggcacgtacctgtaatcctagctatttggggagctgaggcatgagaatcactcgaacctaggaagcagaggttatagtgagccaagatcatgccactacacttcagcctgggtgacagaacaagactctgtctctaaaaaaaaaaaaaatatatatatatatacacatatatatttatacataaatagtttcccactctcctctttttttgagagagagagtgtctcactcttttgcccatgctggagtacagtggtatgatcacaactcactgcagctttgatctcccaggctcaagtgatcctcccacctcagctccctcgagtagctgagaccacaggcacacaccattacacccacaggcacacaccatcacacccacaggcacacaccatcacacccacaggcatacaccatcacacccacaggcacacaccatcacacccggctaactttttttactttttgtatagttgggtctccctgtgttgcccagactgatctcaaattcctgggctcacgtgtccccattattttttatgactacatagaatcttattgtctggatgtgcctgaattaactaattattgaaagtttattgtttctaaacttaggaaagtttttaaacaggtgtttggagtaggtttatgattttaaaactttaaaaagccttattggagtttttttgaagactgtagtaatgccttgtaggttcagaaataggaaaagtgtttgcagatgagcagtcaggggaaaaaaataggcaaagtgttttgagccctaccccttagtaggtgctgtaacaactttttaagcatgttaagtgctccttttctctgggcagtaggtccagggacttgatagaatcatgaggtaagctcccttacaaacggctgcagtgacattcttctgggtactgacaggctggtgttctttcagaaaggccatcattctcactcgagaagccacaggccacttccaggagtccgaacccttcagtcatatagacccagaggagtcagaggagaccaggctcttgaatatcttaggacttatcttcaaaggtaatcattttccttcttcagtcaataaataacacatgtcaactggtatttactgagcattaactttatgccatcattggcctggttaacagaacctggtgctgaagagcccagagatgaattggcattacttttgctctggaatggaagcagcccacgggcctaagattgatagtcacagggtgactgtccagaccatagcggtctttaggtatggtttttgagaaatttagatattttagagtaagttttaatttcatatcttcacattgtgaaaagagatatccagggccagatgtcgtggcttatgcctgtaatcctaacactttgggaggccaaggcaggaggattgcttgagcccaggagttgaaaatcagcctgagcaacatgacgaaacccccatctctacaagggataccaaaaaaaaattagccaggtgcggtggcacgcacctgtagtcccaactgctcaggaggctgaagtgagagaatcaccttagcccggggaagttgaggctgcagtgagcggtgatcattgccactgcacagcctaggcaacagagtgagaccccatctcaaaagaaaagaagaaggaaaataaataagtaaatatccaggaatgttgacagctgttggattcccctgtatccccttgaacgaaaccatcctgtacttctctaactccttaggcccagcagcttccacayaagaaaagaatccccgggagtctacaggaaacatggtcacaggacagactgtctgtaaaaataaacccaatatgtcggatcctgaggaatccaggggaaatgatgaactagtgaagcaggagatgctggtacagtatctgcaggatgcctacagcttctcccggaagattacagaggccattggcatmatcagcaagatgatgtatgaaaacacaactacaggtatgccagagtccctttctataaggacagccttggggttcttttggattttttaattttttaaatttttattaacaatagagatggggccttcctttgttgctcaggctggtctccaactcctgggctcaggcaattcttctgcgtcagcctcccaaagtgctggtattacaggtgtgagccactgcacccggccatggatcttggagttcttttccatattttattgatatatctatctgctcctttaaaaggcaggggttctcggctgggcgcgatggctcatgcctgtaatccctacaaaactgggaggccaaagcaggaagacaggttgaggccaggagttcgagagcagcctgggcaacatagcaagaccccatctctacaaagaaacaaaaactaactgggcgtgatggcacacacctgtagttccagctactcggaaggctgggcaggaggattgcttgagcccgggagtttgaggctacagtgagctgtggtcatgccactgcactctagccagagcaacagaataagaacctgtgtcttaagaaaagaaaaaaaaaaggcaggggttctttttttctgtttgcttcctctagccacttacagcttatacattttaatgcatatagtatttcatgataaggcatcataggaggagtcgacattctcagggaaaatrcggaaggcctccatttgcatcttgctacattcagaaaggttctgtcgttaggtattgggggagttttgtgaagtagataggtgacatttgtacatgttctctcagtggtgcaggaggtgattgaattctttgtgatggtcttccaatttggggtaccccaggccctgtttggggtgcgccgtatgctgcctctcatctggtctaaggagcctggtgtccgggaagccgtgcttaatgcctaccgccaactctacctcaaccccaaaggggactctgccaggtatatggggtgcttttgcctttgctgacttttccaaggtcagcttctcacaggacttcccttgtctcctaaaggaagaggtgcatttctccaggggagttccagatccataggcagtccatcatagtggggcttagggtggggctcggtttccagggagagcagttttgtagcactgtggtgggatagccctaatcactgtttgccaagttcagcttcccaatcttatagtgaccgctgatctctgctgttcccacagagccaaggcccaggctttgattcagaatctctctctgctgctagtggatgcctcggttgggaccattcagtgtcttgaggaaattgtaaggcttcctgctttctctttctttattcattcaacaagtattttggttgttttttttttttttttttgagacggagtcatgccccattgcccaggctggagtgcaatggcacaatcttggctcactgcaacctccgcctcccaggttcaagcaattctcctgcctcagcctcccgagtaactggaattacatgcatgtgccaccatgcccgactagttttttgtatctttagtagagacggggtttcaccatgttggccgagctggtctcgaacccttgacctcgtgatccacccgcctcaacctcccagagtgctgggattacaggcgtgagccaaagcgcccggcaacaagtattattgagttattactatgtatttagcaatttacttagctccagaaagaagtataagactatttgctttcatgttcccaactttaaaggaaccaacagtctagttggtagtgaaaaaccacagaacatttttagaacaatgcagcaggtagataataaagtgccagaatgagttgtacgggtaatggttgtcatagcaataataacaacctcacttatatggtattgaatatatgacaggcactcacacgttactcacagtaacttgtttaatcctcacgacagccctgtgaggtagcattatctgcattttacaatgagaaatctgaggcacagagaagttactgaacttggctggttacagctagttagtggcaaagtttgagattcaaactcaggcaataagagctctagaaaacatactcttaacttctgtgttctactgagggatacagagtaggaaagagagcggtttggggtagaatggtcaaggaagcttcctgaaggtggtaggacttaagctgggtcttgaaagatgagtaggatttagagaatcagagcaaggagggagggcatttcaaacagaacccaagaaagagcacagttcacattgtagaacaaagaagactgtgttctggttcaaattatctggaaaagaccaggcgcgatggctcacgtctgtaatcccagcactttgggaggccaaggcagcagattacctgaggtctgaggtcaggagttcgagaccagcctggtcaacatggcgaaaccccacctttactaaaaatacaaaaaaattagccaggtgtggtggtgggcacctgtagtcccagctacttgggaggctgaggcaggacagttgcttgaacccaggaggtggaggtagcagtgagccgagattgcgccactgcactccagcctgggcgacagagggagactctgtctcaaaaaaaaaaaaaaaaaaaaaaatctggaaaagataataaagttgtgaatgtaggttggaactaaactgtggaagtccctgaatgacttcaggagtctaggactttaactgtgttagccaggcacccagcattttagtgagacattctgctttgtagcatttgcattgcgggcacagagagtggaggtggcgctgggaagcgtgctcctgccagccacatttttctcctcactggggaaaagaaaagagcctggtggtggtgattggccatgatgtcataggtcagttaccggcaaaagccctacaagaggcaggggagagcacctgcaaactggggtgcaacagaagggacgtggggaagcagaggctgaggagaccaacccatgggaaggaaggcccgtggaggctgctgcagtgggcagtaacgaggggctggacttgaggattggagaaatcactgcagaatgggcttaatggaagacaaatttttaaaggaaaaatagtgactgatttgtaaaaaaattagatgaccgaaattttaagcacatattactgatagagtgttgataccactggcaaaatgaaaaggcaaggaaggatgatggcttccatgttggacatgttgagtttgtggtaacggcaagaaaacctgttagaaatctccagacttagaactatggacccacgtggaactcaaaaggtcagtttcgatatgtcacttgaataaaatagttttgaaggcatgagagtagaaaagtagagaatggaaagcctctcaagaccctgctgtacattttgaacctcctcttttctttttctcttcctaagtattacttttgtctacttcaggttcgcaatatcatcttcagaaaagcagaccaaagatcaaggaattgttcatttttggcttgagccctttttcttttctctttagctctgtgagtttgtgcagaaggatgagttgaaaccagcagtgacccagctgctgtgggagcgggccaccgagaaggtcgcctgctgtcctctggagcgctgttcctctgtcatgcttcttggcatgatggcacggtgaggctcaaatctagcaggcaatggggtgggagagcaaaggaaggttctgagagggctccttttccttcagtgacattgtcacagtgaggcccaactgagctctgctgtgagttataacgccacctaaatggaaaagcaaatagtgagaggaccagccctcctgcctagtagtagtgggattcagtaaagcaacaggacccaagaggctggccctgcggcagagccacgctatagtgctccacggctctagacaccacatgaggtgctggtacctacccctattggccctttctcccccgatgagtccaatccatgactgcctttaactctgtggcttccttcccctagaggaaagccagaaattgtgggaagcaatttagacacactgntgagcatagggctggatgagaagtttccacaggactacaggctggcccagcaggtgtgccatgccattgccaacatctcggacaggagaaaggtatgtgrgggtggttccaaactaaggagagtggagattctcgtgtccaccctgtacacacacccacgttgtcttgctctccacagccttctctgggcaaacgtcacccccccttccggctgcctcaggaacacaggttgtttgagcgactgcgggagacagtcacaaaaggtgagctctcagggaaggccttgggcagawttgggccctttgttgcagtaaacaacttctccctcctcctctgcaggctttgtccacccagacccactctggatcccattcaaagaggtggcagtgaccctcatttaccaactggcagagggccccgaagtgatctgtgcccagatattgcagggctgtgcaaaacaggccctggagaagctagaagagaagagaaccagtcaggaggacccgagtaagtgggcaggggttgacccactgcggcagccagcttctgttctccctgcagggccaggagccactgccaccaccactatctgcaacaacccttagtgtacactgtgtcgtttttgtctaagttgaagttgggccagttcccacccccaactcttactacttcactagtttgaatagcacgtgagcaaggggaagatcagtaaaaatcggattcaggtttgatgggacttaaaaatgtctctttgccccaccttccctctccctctcctccagaggagtcccccgcaatgctccccactttcctgttgatgaacctgctgtccctggctggggatgtggctctgcagcagctggtccacttggagcaggcagtgagtggagagctctgccggcgccgagttctccgggaagaacaggagcacaagaccaaagatcccaaggagaaggtgtgtgaatgtcctcagcacttcccagatttatttcatacctcagctcagaactgagctgatccccttccggcaatctctgctcctctgctattacatgaagcgaagagtttctgcctctctgtggctactaccgtaggaaaggttcgtgtgaacaatgacraaactgtcagtgatcacccaggaaggaaagatttaggtaaatgcagagtgtggagttagagacctcagcataaaacagaggctttgtgtctgaggcagggtttgttagaacacgcacgtacccgccggccttttccatcagcttccattgctggcctggccccggatggggccctgtgttccctccactagaggcaatgatgtcttgcagacaaataagacacagagccttgcagcgctggagaaaagtctgacctctgtgactttgaaccattgtctggcgtgatccatctgtttaccatatataggaaacgatgtcttccatgaggaagaggtgcagaaacacgctttggcaacttaaaacaaatggggacctcattgttcccctgcttaattcaggaatcctttctctttacagacacatttgacaattctctaaatgtttttgtagaatttgcccttcctcactttgttcatgcaaaacaaagtatgggctggaatcaaaaatgttgtctctgcttatccatgatccccaatttcattccctttagaatacgagctctgagaccaccatggaggaggagctggggctggttggggcaacagcagatgacacagaggcagaactaatccgtggcatctgcgagatggaactgttggatggtaagaaaaatggctgcactcagcagtttcttcccaattaagataacctgtcccaaacctgcagttactcttccaacaggcaaacagacactggctgcctttgttccactcttgcttaaagtctgtaacaacccaggcctctatagcaacccagacctctctgcagctgcttcacttgcccttggcaagttctgcatgatcaggtaggccgtggggttggtacccccttctcaaggaagatggggatgaaatggcttccctaatgatcctcttcttgctcttagtgccactttctgcgactcccagcttcgtcttctgttcaccatgctggaaaagtctccacttcccattgtccggtctaacctcatggttgccactggggatctggccatccgctttcccaatctggtggacccctggactcctcatctgtatgctcggtaagagacccctcacaacgtggtggcagttcccaggagccccggagtctgttgagagtcagtgtgagaatcaccagggctcttcccctaggctttggcatcaccgcgaacatctgcttgatacttgacctgtacaggcccctggctaagagtcaccccagtgggactgacacttctggttagaagcttcacctctttcccccactccagctttcaactctagacagctttctgactgcttctggagtggcagagcatgggataattgattcctgctgagggccttttctaccagtgttagggtgtagcccggaggtctcggtccccatgacccgcaattccattcctagyctccgggaccctgctcagcaagtgcggaaaacagcggggctggtgatgacccacctgatcctcaaggacatggtgaaggtgaaggggcaggtcagygagatggcggtgctgctcatcgaccccgagcctcagattgctgccctggccaagaacttcttcaatgagctctcccacaaggtgagaggcagagaggcactgagggctggctgcagagggaatctgtaggtcacctcatctccttaacatggctctctctgtcttacagggcaaygcaatctatratctccttccagatatcatcagccgcctgtcagaccccgagctgggggtggaggaagagcctttccacaccatcatgaagtattgctccccgggccctggggcacattttccacatagcaygggcttaggaatcagacacacctgtatttgaattccacctcggctactctttagctgtacagccttcggcaataacttagcctctctttgtgcctatttcctyttcttttgaggctgatgatacttaacccttagttcttgaaaatattaaatacgataaagttcctaacatggtggcagacatacagtagcactcactccctagcagctgctcctgttaatttccattcacagtgaaaattcctgagccgggggcggggtggggtccctctctgctgaatgggacagggcaaggggagtggtgaggcagacaggggccgtggcagagaacatcagagaagacgagtgctgggggagggtccagggttggtcttagtggatggcagagctggccctgggccatcgaacatcctcatctycccttcctgcagacagctcctctcctacatcaccaaggacaagcagacagagagcctggtggaaaagctgtgtcagcggttccgcacatccckgtatgctgccctccctgagggttctttgtgctgagcggggccctgcaggggagaaaggcccatccctcaccccttcaatgcccccactgtggcatccctgggactggggaggctgatggggaaggttgagcctytactagctggatctcccagttcctcacaaagcccttcctatctgcagaactgagcggcagcagcgagacctggcctactgtgtgtcacagctgcccctcacagagcgaggcctccgtaagatgcttgacaattttgactgttttggagacaaactgtcagatgagtccatcttcagtgcttttttgtcagttgtrggcaagctgcgacgtggggccaagcckgagggcaaggtgagcagcacaggacacttcaatgcctgttgggttctgggctggctaagacatctgccggccctgggcagcatacggctcttgcagtcaccttcccgtcctccttatccccagctgggttgcaaccaaattgccagagtgacctaagaccagatctttgtctccagttctttttttattactccaaaaacacaaccaaagcagcatctcatccaattcttgtttgtttgtttttaatagtttttatttttcagagcagttttaggttcaaagcaaaattgagcagaaagtacagggagttcccttctaccccttgcccctacacatcacagccttccccaccttcaacatcctgcaccagggtggcacatttgttacagctgaacctacacttacacatcatctcctaaagtcatggtttaccttggagttcactgcacgtaatgacatgtacccaccattgcagtatcatacagaagagtttcactgccttacaaatcccctgcactccacctatttatccctctctccccacaacccctgatctttttactgttgccatcactttgtcttttccagaatgtatcattggaatgatccggtatggagccttctcaccttggcttcttagtaatgtgcgtttaaggcctccatgtcttccatggccttgtttctttttaatcagaagtaactgttttcaggcctgctctgaatctccttttctccctccaggctataatagatgaatttgagcagaagcttcgggcctgtcataccagaggtttggatggaatcaaggagcttgagattggccaagcaggtagccagagagcgccatcagccaagaaaccatccastggtacgtaaggcagcctgtgcgggcgagaccagactgggccctcccctcctgcagtgatttgtttcttcttcttttttaaatcacgttttcctgccttttctaggttctaggtaccagcctctggcttctacagcctcagacaatgactttgtcacaccagagccccgccgtactacccgtcggcatccaaacacccagcagcgagcttccaaaaagaaacccaaagttgtcttctcaagtgatgagtccagtgaggaaggtatgatgctcccgcctgttcccgrccgagaaggcacacagctagggtgcagagggctggtttccataggacctgctgcgggggcctgagtgtagatgctctgccccactgccgcagaagggcctctcctgtacagcttggattttatttcttctgtgcggtgtgggattgtctcacttgttctctgatatctattttttcaccatctttgtgactcagctttttcttattcctttaattctttgcatagatctttcagcagagatgacagaagacgagacacccaagaaaacaactcccattctcagagcatcggctcgcaggcacagatcctaggaagtctgttcctgtcctccctgtgcagggtatcctgtagggtgacctggaattcgaattctgtttcccttgtaaaatatttgtctgtctcttttttwwaaaaaaaaaaaaggccgggcactgtggctcacgcctgtaatcccagcactttgcgataccaaggcgggtggataacctgaggtagggagttcgagaccagcctgaccaacatggagaaaccccatctctactaaaaataaaaaattagccgggcgtattggcgtgcgcctgtaatcccagctactcaagaggctgaggcaggagaatcgcctgaacccagaggcggaggttgtagtgagccgaaatcacaccattgcactccagcttgggcaacaatagcgaacctccatctcaaattwaaaaaaaaatgcctacacgctctttaaaatgcaaggctttctcttaaattagcctaactgaactgcgttgagctgcttcaactttggaatatatgtttgccaatctccttgttttctaatgaataaatgtttttatatacttttagacattttttcctaagcttgtctttgtttcatctttcacattagcccagtttcatgcagcagagagagggttatcagtgcagagagagatgagtgagcccagagtcctagggcctgtcccgggatggcagatgagcttcctgccccgtcactgccacctttcccctctcaacctctggaccctgcacagtgaccagacagcctctctggggagaattatgcagtgcctaggctccagatcagtgcttctgaaccgggggcaattttgtctgccagaggacatctgacaacacctggggcctgttttgttgtcatagcctataggggaagaatgctaccagcatttgtgggaagaggccagggatgtggctcaacatcctgcagtgcacaggatggcccctcaacaaagaatcacacggcccacaatgtcaatagcgtcacagttgagaaaacctgctctagaccaagggttgctttctgccgtgtgcctcaccccacccccactcgtgttccctaatcccatctccaaaggttggcagcagaccggcccaggctcgtggaagttcagatcatgatcccctccagctctgcaggagacaagacctgtctcccagcattcctcattgttcccgggtctgcagagggcgtgagctatgctgcaggcgggctgccccctgaagcctgcgcacccctctccagctcctcaagtcttctctgctgagtcaccttcgaaccggaggctgtgagctggctgtcgtgaccacactggtgcctctgctgtcatgacaacagcacactacgtcagtagtgctccctgggcactgagctccctctttgcggggagaagacagtaatgaaaaatgacaagcatgaggcagaggggaagatcacgcttgggtggtgcaggagcatggaggtgctcttaatgctctcaatgagaaagggttaacggtcctggttgcaggaatagctgagtcagaggtggggcttcctccactcccccaccccacccctttcaccattagggaccttcttgccttgctcttgctactctgctctgggtggtcattgtgaaaagcccgcaccaaccatgccagtggcagccagacgaggacacagcctggctctgggtcccagcaggaaaggcaatcccagaaaggcagggtcagggactggagtcctgtgggtgctttttaagcaaagattatcaccaggcaggctaaacttagcaaccggcttttagctagaagggcagggggctggtgtcaggttatgctgggccagcaaagaggcccgggatccccctcccatgcacctgctgatgggccaaggccaccccaccccacccccttccttacaagtgttcagcaccctcccatcccacactcacaaacctggccctctgccctcctaccagaagaatggatcccctgtgggagggggcaggggacctgttcccaccgtgtgcccaagacctcttttcccactttttccctcttcttgactcaccctgccctcaatatcccccggcgcagccagtgaaagggagtccctggctcctggctcgcctgcacgtcccagggcggggagggacttccgccctcacgtcccgctcttcgccccaggctggatggaatgaaaggcacactgtctctctccctaggcagcacagcccacaggtttccaggagtgcctttgtgggaggcctctgggcccccaccagccatcctgtcctccgcctggggccccagcccggagagagccgctggtgcacacagggccgggattgtctgccctaattatcaggtccaggctacagggctgcaggacatcgtgaccttccgtgcagaaacctccccctccccctcaagccgcctcccgagcctccttcctctccaggcccccagtgcccagtgcccagtgcccagcccaggcctcggtcccagagatgccaggagccaggagatggggagggggaagtgggggctgggaaggaaccacgggcccccgcccgaggcccatgggcccctcctaggcctttgcctgagcagtccggtgtcactaccgcagagcctcgaggagaagttccccaactttcccgcctctcagcctttgaaagaaagaaaggggagggggcaggccgcgtgcagccgcgagcggtgctgggctccggctccaattccccatctcagtcgttcccaaagtcctcctgtttcatccaagcgtgtaagggtccccgtccttgactccctagtgtcctgctgcccacagtccagtcctgggaaccagcaccgatcacctcccatcgggccaatctcagtcccttcccccctacgtcggggcccacacgctcggtgcgtgcccagttgaaccaggcggctgcggaaaaaaaaaagcggggagaaagtagggcccggctactagcggttttacgggcgcacgtagctcaggcctcaagaccttgggctgggactggctgagcctggcgggaggcggggtccgagtcaccgcctgccgccgcgcccccggtttctataaattgagcccgcagcctcccgcttcgctctctgctcctcctgttcgacagtcagccgcatcttcttttgcgtcgccaggtgaagacgggcggagagaaacccgggaggctagggacggcctgaaggcggcaggggcgggcgcaggccggatgtgttcgcgccgctgcggggtgggcccgggcggcctccgcattgcaggggcgggcggaggacgtgatgcggcgcgggctgggcatggaggcctggtgggggaggggaggggaggcgtgtgtgtcggccggggccactaggcgctcactgttctctccctccgcgcagccgagccacatcgctcagacaccatggggaaggtgaaggtcggagtcaacgggtgagttcgcgggtggctggggggccctgggctgcgaccgcccccgaaccgcgtctacgagccttgcgggctccgggtctttgcagtcgtatgggggcagggtagctgttccccgcaaggagagctcaaggtcagcgctcggacctggcggagccccgcacccaggctgtggcgccctgtgcagctccgcccttgcggcgccatctgcccggagcctccttcccctagtccccagaaacaggaggtccctactcccgcccgagatcccgacccggacccctaggtgggggacgctttctttcctttcgcgctctgcggggtcacgtgtcgcagaggagcccctcccccacggcctccggcaccgcaggccccgggatgctagtgcgcagcgggtgcatccctgtccggatgctgcgcctgcggtagagcggccgccatgttgcaaccgggaaggaaatgaatgggcagccgttaggaaagcctgccggtgactaaccctgcgctcctgcctcgatgggtggagtcgcgtgtggcggggaagtcaggtggagcgaggctagctggcccgatttctcctccgggtgatgcttttcctagattattctctggtaaatcaaagaagtgggtttatggaggtcctcttgtgtcccctccccgcagaggtgtggtggctgtggcatggtgccaagccgggagaagctgagtcatgggtagttggaaaaggacatttccaccgcaaaatggcccctctggtggtggccccttcctgcagcgccggctcacctcacggccccgcccttcccctgccagcctagcgttgacccgaccccaaaggccaggctgtaaatgtcaccgggaggattgggtgtctgggcgcctcggggaacctgcccttctccccattccgtcttccggaaaccagatctcccaccgcaccctggtctgaggttaaatatagctgctgacctttctgtagctgggggcctgggctggggctctctcccatcccttctccccacacacatgcacttacctgtgctcccactcctgatttctggaaaagagctaggaaggacaggcaacttggcaaatcaaagccctgggactagggggttaaaatacagcttcccctcttcccacccgccccagtctctgtcccttttgtaggagggacttagagaaggggtgggcttgccctgtccagttaatttctgacctttactcctgccctttgagtttgatgatgctgagtgtacaagcgttttctccctaaagggtgcagctgagctaggcagcagcaagcattcctggggtggcatagtggggtggtgaataccatgtacaaagcttgtgcccagactgtgggtggcagtgccccacatggccgcttctcctggaagggcttcgtatgactgggggtgttgggcagccctggagccttcagttgcagccatgccttaagccaggccagcctggcagggaagctcaagggagataaaattcaacctcttgggccctcctgggggtaaggagatgctgcattcgccctcttaatggggaggtggcctagggctgctcacatattctggaggagcctcccctcctcatgccttcttgcctcttgtctcttagatttggtcgtattgggcgcctggtcaccagggctgcttttaactctggtaaagtggatattgttgccatcaatgaccccttcattgacctcaactacatggtgagtgctacatggtgagccccaaagctggtgtgggaggagccacctggctgatgggcagccccttcataccctcacgtattcccccaggtttacatgttccaatatgattccacccatggcaaattccatggcaccgtcaaggctgagaacgggaagcttgtcatcaatggaaatcccatcaccatcttccaggagtgagtggaagacagaatggaagaaatgtgctttggggaggcaactaggatggtgtggctcccttgggtatatggtaaccttgtgtccctcaatatggtcctgtccccatctcccccccacccccataggcgagatccctccaaaatcaagtggggcgatgctggcgctgagtacgtcgtggagtccactggcgtcttcaccaccatggagaaggctggggtgagtgcaggagggcccgcgggaggggaagctgactcagccctgcaaaggcaggacccgggttcataactgtctgcttctctgctgtaggctcatttgcaggggggagccaaaagggtcatcatctctgccccctctgctgatgcccccatgttcgtcatgggtgtgaaccatgagaagtatgacaacagcctcaagatcatcaggtgaggaaggcagggcccgtggagaagcggccagcctggcaccctatggacacgctcccctgacttgcgccccgctccctctttctttgcagcaatgcctcctgcaccaccaactgcttagcacccctggccaaggtcatccatgacaactttggtatcgtggaaggactcatggtatgagagctggggaatgggactgaggctcccacctttctcatccaagactggctcctccctgccggggctgcgtgcaaccctggggttgggggttctggggactggctttcccataatttcctttcaaggtggggagggaggtagaggggtgatgtggggagtacgctgcagggcctcactccttttgcagaccacagtccatgccatcactgccacccagaagactgtggatggcccctccgggaaactgtggcgtgatggccgcggggctctccagaacatcatccctgcctctactggcgctgccaaggctgtgggcaaggtcatccctgagctgaacgggaagctcactggcatggccttccgtgtccccactgccaacgtgtcagtggtggacctgacctgccgtctagaaaaacctgccaaatatgatgacatcaagaaggtggtgaagcaggcgtcggagggccccctcaagggcatcctgggctacactgagcaccaggtggtctcctctgacttcaacagcgacacccactcctccacctttgacgctggggc

SEQ ID NO: 97797 - DNA, 19977 bp, Homo sapiens
ggaccctgagcccgtgccctggagtggcacagggaggtgtgccagcaatggggaccgaggtcactggggactgctggggttcgggctagtggcctgtctggctgctgtctgcttccctcgttcacatcctgctggagccttaaataggagcccaaaagcttttctttcttacttttttttgagacaaaatctcactctgttgcccaggccggagtgcagtggcacaacctctgccgcctgggttcaagcgattctcctgcctcagcctcccgagtagctgggattacaggtgcctgccaccatgcctggctaattttcgtagttagagtagagacggggtttcaccatcttggccaggctggtcttgaactcctcacctcatgatccacctgcctcggcctcccaaagtgctgggattccaggtatgagccaccacgcccggcctaaagcttttctattaataatttcctgcctcaccctccatccccttcctcctcagacacctggatttcattagcatcatgacctacgattttcatggagcctggcgtgggaccacaggccatcacagtcccctgttccgaggtcaggaggatgcaagtcctgacagattcagcaacactgtgagttcccagaaggagggagggccaggagggggccgcaagacctgccatctgccagtgctcacacaccaatctctctagccctcagtacagtcctgcaagaggggggtcatgaggcccattccacagataaggaaactgaggcccaaagtctgggcatgctgcgttgctctgggaaggtgatctgcagggtaaatggagtgagggcagggggccgaatggggagaggctgggagccgaggaggtaggagtcattgtgccctcagagccaaccacctgatttctgcatctgtcaaatagtaatagccccttcctatgcctcaaaggatttttttcaagaatgaaactgtaaaattcactttaaagtgacatgatccgttcccggagggacaggggaatccccagtgcaccatacaccaataacccctgctaaggcagcagtattaattgctcaaccttccgcacctgtgcactaactgctcacgttgttcccaccctaccccacccaggactatgctgtggggtacatgttgaggctgggggctcctgccagtaagctggtgatgggcatccccaccttcgggaggagcttcactctggcttcttctgagactggtgttggagccccaatctcaggaccgggaattccaggccggttcaccaaggaggcagggacccttgcctactatgaggtaatggagttggggagaaggtaggattcccccacaccaccagcagccctggggaaggtgattccccaccacgttcttgctttttctcctttgggaataaagaaaatgtccggttgccccagcatgcctgaggaagtggaagggagaggttaggacatttgttgctgaaaatctccagcaggtacaggcacatgggcctgcaccactaggcacctgggatagccctctggctatggggctgaggtcttccttccagcccaggaaagagcagaggtcaagaggcagattttttgtttcactctagcctctgctactctgtgtggccttgggcctgtcctcagtgtcaaccagcaggcctcacatctctgtttaaatggaagaagctaagcagggccaaggcagccaccatctctgggtcatttgcctctggtttgtataaacttgtgtgatgcatgcagcctgcagaccctgcagagagtgaggctgcaggatggagcaggagctaaaagagatttggagagtggcgtctcctggtgacctgcaaggtctcggcacgactccccacactgccttttccctgttatctgctcagatctgtgacttcctccgcggagccacagtccatagaatcctcggccagcaggtcccctatgccaccaagggcaaccagtgggtaggatacgacgaccaggaaagcgtcaaaagcaaggtaggtttccccaaggccacacctcaggacaaagagaaagaaggaggccccgctcccagcagccagattcctgtcccttgcactgaggtctgggctgggctcacagagcacatgtgccctgtacacactctgggtcagggaacccagccctgctcctctgggcctcccctgccaggtgcagtacctgaaggacaggcagctggcgggcgccatggtatgggccctggacctggatgacttccagggctccttctgcggccaggatctgcgcttccctctcaccaatgccatcaaggatgcactcgctgcaacgtagccctctgttctgcacacagcacgggggccaaggatgccccgtccccctctggctccagctggccgggagcctgatcacctgccctgctgagtcccaggctgagcctcagtctccctcccttggggcctatgcagaggtccacaacacacagatttgagctcagccctggtgggcagagaggtagggatggggctgtggggatagtgaggcatcgcaatgtaagactcgggattagtacacacttgttgattaatggaaatgtttacagatccccaagcctggcaagggaatttcttcaactccctgccccccagccctccttatcaaaggacaccattttggcaagctctatcaccaaggagccaaacatcctacaagacacagtgaccatactaattataccccctgcaaagcccagcttgaaaccttcacttaggaacgtaatcgtgtcccctatcctacttccccttcctaattccacagctgctcaataaagtacaagagcttaacagtgtgttggcgctttgctttggtctatctttgagcgcccactagacccactggactcacctcccccatctcttctgggttccttcctctgagccttgggacccctgagcttgcagagatgaggccgccatgtcctctgcctagccgcagagagccccagtgggaggccagcgtcctcagattcacctgccttggacttaacccaagcatggctgatggccttccaaatattaaagtcattgccatccagatttctaaattaaattccctgttgaaagaaacgttttctgtttcctgaaggctagcaggccctgggaaagaaggcttttcatcccaacactccctctcttctgatccacaggaaggtggtgggagctcatcacaggaccaggttagaaagccctgaaccctggaccctcagggccagcaggaaatgcagatgtcatctcatgcacccttcctgcctctcgggactggagtccctgcagagtgcttgagagatggccctccagcctcccagtgaggggcagccgattaccttggaagcaacccattccgtggctgggctgaaatctgtcaatagtcctagtgctgggcttagccctttgttctgttcacccctcccctaacactcatccctccacccattcagagatcaaagtacctctgctcaagctggcctgagataggaggtcgggaggatgtgatggggtgactcagaagaatagacagattttcagcctttatgaggtggagacgctctcatcaggcttctgttgaattcccagggccccaggaatgcctttatccaaaaaggctccagatactcaccccagaactaaagagaattgatttgtggattctctgatgtttggattatctgtgacttaggataatcacaaattggcctgatggtttgtgacgccggtttgaagtggagggaaggaggaaatatctgaaatctgaaccagctggagctgggcagatgctactgatcccaaggtcacagccctgctgaaggcgaagaaaacaaggactcggcaaggcgtggagtggggtgtggggagggggtacccggcatttcacctctggctggtggggccaagtattccctaatccctgccactgcccaccccaccacacaggcatctttgaaaccccagggctgcaagcccttgtgggcagccaactgccctcccctggggccacccttcccccagccggggacaggctctccagggctgactcagtgtcctgtggggttagtcacattcacttatagctgcagagtcagaggccaaggatggagatcccgtctccaggacccactccctgcctggcaagacgtggagtcacctagcagagggcgagggcatccagggagggccagatccagaggctcccaggccctgcactgccactccccagcagagacagcagggttgagaggcagccacaccctggtgtccccagtcctcaggaaagggaagagcatgcatgctgctgagggccctgaataaatcacttttacttatttttaaattgtgagcacatcttacgtgctaaagagtgcataaatgtatttgtttaatttgaagaataactatgtagtaagaacctgtgtaaccaccacccaggtcaggaaaggaaacctcattagcacccctgcagccctcacgatcacagatatccctgttcctccacctagaggcaatcgccatcctaacttttgtactggcctcatcttcctttctggccttaccgcctacggatgtaccttgaagaagggagcctggtgttgactgcatttggatttaatgtagatgagacagatgagacgcaacatttctgtgtgccttgctcttctgctcatcactgggtctgtgagtagctgaagttgctcatttgaccccatattttgctttacagttgcataaacactccacagttatttatccatcccactgttgagggacagctgttttcccccacatttcaacaattacaaataacattgccatgaaccttcttctccatgtctcctggggcatgtgtgggtgttatatgagcggcacggctgggtcacggagtaggcacctcatccattttactaggcactagtaaaactctcacattttccagagtgactgctccaataccagcaataaaagttcttaatgttctccctccttcctgacacatggcattttctggctttccagtgattcccagtcttaacattttatcgaacaaatgaatcaatgactagaaatctggccatatctgcctcctttggcacactgagaaagcccatgcccacagcctgcttggaagagtctagaagcttcagagtgctctcctccactagggcatcttccagatctgcctacaactgcaccccatcccgaagggcgaggggttctctgtaacaggtggaaaactgaggcccacagcaggcatcaggggagacgagctccttaccagccgcccaactgagacaggagccaggagacttagtgccccttcctggggttccaatgctggaggaccatcctctgagcagctccaccctcagcatctcaattccctccctctctagggccctcagcctcatacagcacaggcgagagtccctgggaactgtgggagcccagggaatgtggaccccagaggcaaagctgggagtgctcacaaggacgattgtcccaaactgtcagggccccagcacccagtctgagaagctctgggaacaagtggccccatagacgccagacacacagagcctgagctgggctcattctccagatagaagttcttcctcctattgccctgacacctggcacgcggcctgctcgatgtcccatctcacccatctgcgccctcccccagctgggcaccagcaccctggctgttgaaggccagtcggggagatggatgaggaagtgactcctcaaggggcccttgtggttcctcccccagagctattcctggcctgggcgcctctccaccctccagtcctcctgcttgacctgaccccacagctgggaatcgtttgctgggggtggggcagcccctgactatataagcctggacctaggtgtcccaggcaccctagaggcccaggccccccaacggctgacccctgcacactccaccctggccccccagccagtccagcaatgatggaaaaaaacacctccgagggccctgcctgcagtccagaggagacygcatctgaatctgccaaggtgcccacagcagagcctcccggagaagtggcagtatcagagtccaccagagaagagcaggtgcccaagccgcasgsccctgccccacaggcccctacagcctccacagccactaagcctgcacccccaagtgaaggtgactgaaggtggggcagggggaggagggaggcaggcatgtcaggggtggaggggagctcttggccatgaacctcttcatctccccagatgtccccagtgccccactgctgctgaccctggatgatgtgagcagcagctctgtgactgtgagctgggagcccccagagaggctggggaggctgggcctccagggctatgtgctggagctctgcagagagggaggtgagtgctgggctaagtcttgcatacayccaggggaggttgtcatggagggctgcagggacaagtgcacaggccctgtggttggtcagtctgggagagatacagaaggaggggatgcgagcagtaggctcctcaacccacccacctgccctttcttgctccaccagcaggagagcaagaaagggtaggtgggtgggttgaggggctcccttgtcctcagctccaaggagcttctgagtaagggaagggtaaggggrcactgggttctcctttggtgagaagggaaggaagtgctaagtctcagaggaccccgaactgtaggaagtggaaagggaggagctggagaggggaatgttagcgtaagagacagtgaggagaaagcgggaatggggtgggggtgtgggggccacatccctgctgccactgtccccctccatggcccaagtccagcctggcctctgcctctgcccctaccttgctgtgtgactttgcaaatgtgtccaaccctctctgggcttcaacaacctcatctctagccacaatttcagggctctaacatcaggtgtctttgatgccatttgacaagaagtcagggaaggcaaacaaggggaaaatgaggcccagagagggargctgatttccccagatcacmagcaggaaaagaagccccatggagaggggcgcctgtggccacattgcaaagacctcacactctctccatcccctcagsctcggagtgggtgcctgtgagtgcccggcccatgatggtgacccagcagactgtgcggaacctggctctgggagacaagttcctcctgcgcgtgtctgcagtgagttctgcaggggctggcccgccggccatgctggaccagcccatccacatccgagagaacattggtaaagcccatcctggccttcagctacccagcccttcccaaacaccttatctaatggagaaactgaggccagcaggtagagggaaccagscagtcayttcccccgtcccacgctcacatgcacaagccacacgctatcaccatcttgccttaagaaagttccrggttcctcagcagtarggggcctctggaggtctaagaagccatttccctgagtggtccagcccccacgccttgagaaaggggctcagaaacaaaaggtcaagttccctgggtcacctgctcaatgctaagagtccatctgttctatctcccatctaatctcaatctctccagtggccataaatgctcattttctrcccatttcctgtggcctgggttccagattctctcaaaggtcttgaaacagagagaaggcgctgcttgccccttgttccaccatggccctagtggaaagaaaaagaaggtctgcaaaaggcccatgaagacttctccayygcagagggcatacctcactggggccccgcaggccagctgccatccccattgctaatatttctatttgcaaggtgcattagcctcaatcctcccctcgctcccctcccggagctgatcgggtttcagtctgttaatgacagtgagtcatttggtctgatctgaggtctctggggacagcacagtcccccagggtgaggagagacacaggcaggcaggtggcctgaagccttctccaccttccttcttgctcctccactaggggatggatgatttctggtagctctagacaaggcctccagaaggagaggggatccacaggaggggtcaagtctggattcgaaaggaaatgctcagctctgaggcctgagagacatgggaaccatggggttagggagcttagattcatagattatcaaggcccaaggagatcccaaggagcccagggcatcccttgaggtcacccagccttttattggcagtcccagagtctgatgcctacacaggaccactcatgtcccactgcactgcagagcatcttctctggtggcacccaaaacccaagcctcccaaccctaattcccagcctttggctctaggtgagatgtggccccaccaggcagctgcattatggctgtgtcgaccctagtcctggaggygccaggaaggcttcttggttgggacggtgctgggccttccccagggaaccagggagctcagactctgagaggcccctgaggcccagcattgatggacccagccagactcagcacccacttctccattcaaattcctctggcaggagagaaggggatttcctggagagaagagggagaggaggctgtgaacaagtggggaacagccaggcttatcacagggcagagtgggggccctgtccasgatccttggctgctcagctgtctctccttggccacctggagctgccaagcattcttgaccccctgcagctgtccctagagcattccatgcctgagctcccagagccaagtgcccactcagctaatcctcagagacaccgtgttccttctcactgtcttgtcctcctccgccctgcrtgccaccaaccaactgctgccacctgtttgctgctgaggagcctcagtcatggacccagcacccaccccaggggacagggatggtggccactgcagcttcccttagaatgcccaggggcttcagtggttgcccctgaccagatgagrgtcagaatgtcattccttagcatagcaggcagctgaaataggacttcaagaaggacttcccggctctgagactaacagattttgggagggtgacagaggaagaaggggggatacccgccctggcttcacttgggaagagaaagatcctaaamctttcaatagggcctggagacagaggaatggacaaacagggtttcacaaaggcttctctgaaagtcctgggcttgtggagagctggggatattagarcaggaagacggcagtggcctccccttcctagaagtgcagcctgacaggtgcagcacctgctccccagcagggggagacagagagtcagctggggcccatctggtgcttgggaatgcctgggctgcaggacaaatcccatcctggcagagtcgaggcgccaagggagtkcccaggatgcttaccagttcacaccatggaggcgctgacctcctgaaacctcctgctcccttaagggattkgggcccctagacctcaggagtgagagcttcacccttcctgcaaggagggaccccatggcagccaggcacacccaggaccctcctcccagccagcatccctcaccagctgtccmctgccccayctcagaaaccccaatcagccaccccactgcactgctaagcccagactcttgctttgatccagaggcccccaagatccgtgtcccccgccacctccgtcagacctacatccgccaggtgggagagacggtcaacctgcaaatccccttccaggtgggtattacccccaccaagggtaacagcctgggtgggaaccagggcccccrtttaaggggagcctgggagatggcagggtctccaagggtccagctgagacccagcgagacggcttcatccttccgcaatcatgcacatgactcattggtgattctcagcctgtggatgggcaggtgggcccccagagcgggatggacacctggaagatgtggctgtgggcagcacctgtggctccagcctctgctgcccctcctgagaagggccagtgggacaggcttccccgagaacagctccagagactcctggagttaaggaggtgtgggractctggcacctccctacactcaccctgggggctcctccctgccaggggaagcctaagcctcaggccacatggacccacaayggccatgccctggacagccagcgggtgagcatgcgcaccggggaccaggactccatcctcttcattcgctcggcccagcgctccgactctggccgctacgagctcactgtgcgcgtggaagacctggaggccaaggcagtcattgacatcctggtgattggtatggagccaggggaacagtgctgtctcatgggggacctggagcccccaacctcctatcccagagctgatggctgatgggagcaggccaagggagtgtggcaagagccaaattttgggtgtgggggctctgtggccagcctggccctcacactcacttcctctcacactctgggcctacagagaaacctggaccccccwgcwgcatcaggctcctggacgtctggggctgcaatgctgctcttcagtggacgccaccccaggacacaggcaacacagagctcctgggctacatggtgcagaaggcagacaaaaagacaggggtgaggctggctgaggcaaagtggggtcggggtacgaagtggtcaaggtggtggggaaggcccatcccactgagtctagggaccgagtctagggatcgagttctggtctgcccactgctaacctgactccctaggaggcccttagcaagactcttcctctctggacctcagatgcctcctgaagactgtgaagagggctggcccgggctgtctgaagcctttcaagttctggagccatgcttctcaaatcttaatgtccacatgagtcacctggggagcttgctaagaggcagagtctgactcagtaggtccagggtgggggctgagggcctgcatttctaagacgtttccaggtgatgctgaagttgcacatccatgggccacactttgcacacaaaggctctaggattctctgaggaccctacagaggtcacctgagtgacccaggggccccttcttccaattcaatgtccctgaggcccaaagctggatggttcagcatcctaaggttgggggcatggaatgagttcctgtgaggaaaggtctccagggtaagcagggagggtgaggacaggggtgagaaatgagggtgacacccggggccctgcagcaatggttcacagtgctggagcrctaccacccaaccacctgcaccatctctgacctcatcatcggcaactcgtactccttccgggtcttctcagaaaacctgtgtggactcagcacctcggccaccgtcaccaaggagctcgcccacatccagaaggcaggtgggtttgggcccggagctggctgtgctaactctctccctgtctctgcttcttcctccgcgtctctgcacccctctctctgggtttctcctgggcgtctgcccctggaacacttgcygtctcctcactccacggctatgcatacacacacatggagtggctgcaaagtagtgaatgtggttggctgattttaacaaacacatcagagcaaatccacacaaatgaaagatgcccctttggaggctgtgtgcttattccaaagaggtgtgtggctgccagcatcacagcagccgccgagtctcaggcagtgagtgtccgaagggaacctaaagggtgacctgcgcatggctgggtagtgtgctaaaacaagcctcccaaccctaatacataccacatagatggacaagagagataggagtatttactgtctccacacaggcacctgaccytcttgcgtcaaatgttaaaccccgggcccttttccctgtcccttgtgtgccccaaggccctctccgacccacagtctgtgtgggttccagaaggcaaactttttttaacactagcctgaactgcacagaattaggaagaaacttttgtttaaaaaaagaaagccagtcaagtctccaacgacaaacccaaaggaaacgtggcacctctgagttgctagcatccatcttctgccaagatgctcttatctctggtttttccaccttctcatctctactcatcaccctgacccacccagctacagtctcagctttctctgcctctttgagattgtccaagttcctgcaaataagccacgacttgctatccatagatcttgaatcatagtcagtcctgacaggtctccctcactcctgtaagctcagatgcacccgactttctcccctgaacccagatattgctgccaaacctaaagggtttattgagcgagacttctcagaagccccctcattcacccagcccctggctgaccacacctccacccctggctacagcacccagttgttctgcagtgtccgagcttcacccaaggtgaggggccaggccctgttgtgccctgggctggtgggggcaggtggggacagcagggctraggaatcctccgggcrtccacacctaagcctggggatagctgttgagagccccgccccagtccatacctccccagctctcttctgaccatgtctcccagcccaagatcatctggatgaaaaacaagatggagatccagggcaaccccaaataccgcgccctctctgagcaaggygtctgcaccctagagatccggaaacccagcccctttgattctggggtctacacctgcaaggccataaatgtgctgggggaggcatctgtggactgccggctggaggtcaaaggtgagagtttgaggacgggagaacaggagtaagcacctctctggaactggactagaggcagcagacagcttaaaatcaaggccgaagagaaggggtggtaagactggggtcaggctgtgctgattactttccaagcrgcagggtggacaggtgtagaagagggtgtataaccgtgaactttccagttccccgccacttcccccaagctctaactgcagcatctcttccagcctcagccgcacactgaagtcacgggaggaggctgtgatgaggagccaggtaaatggcctgacccacccactctgttacctctgtgggcagcacagaagcagagaggaggccaggagcagggggttggggtgagaagggaaggtggtggtcagctctgtggacacaaacttgtggacacaggcaactagcacgcatgtccagagactcacagtgatgttgcagggccaggcgaygccggtgtctcctggaaggggggtgattccgtggaccgccacacaaccagagtctactcccagctctgagtgatcttcagcaagggtgttctctttggacacattctctcatccgaaaactggggataacaacctttccctgccttccttcccctggtggttctgaggctctgcataagtackgaagtatctagaactgcagtgggcagagctcagacctgggcattgcacctgagggagggaggcctggtgaggaagaggatgctgctccccctccccactctgcacctctctggcctgcagccgagctctgctcacaccaggggctcaggaagcatgtcctcctccaggtgctgcaggcctgaggggccaggtccaccaggcctacagtcaaactccagagatgcccaagacccccgcttccatagcgacggctgatggaaccgcccctggtacctgctggcctcccttccccagaggctggtgtccagaactcaggaatgggcctggtaggccccaggccagactaactgggctcaaggggtgctggaaggcgcagagattggagtgccctgcggagttgcacwctgggtgggaagcactcaaataaagatgcgtggtgttaacagtgcggggcctctgtgccagtgagcgacatcatctgggggaggcgctgtgtcacgaggagggggggtgtctgaatgtttcaccatgagggggtctccagatatgtcaccaagaggaagatgccaatgggagaggtctcaggatgtcatggctggggcagggaggtggggggatggggggtgttctggacctgtgagttttcaggatctccctttctgatcagggtttgctaccgccagtgcgtaactatggaaacagacacaccctctctggaaccctccttgctccaacgcctccacgtgccccctctcgcagctcctcccagcccccgtcattgcttcctgtctgctgaagctgtcttattgccctcaacagtggtggggatgggcgcccagcaatgtgctctccacagggttcacagttttttattagtcacatgggcctcccttgggagccagggcacacccaatttccaacagagggaagggcttggaagcaagtcctggagttgacactcatgttcagaaggtcaactcgacggccacctcccctccctcgccccccgacacaggggctccaggatcccccgcctcgccctcccacacaggggctccaggctcccccgcctcgccctcccacacaggggctccaggctcccccaccttgccccccaacacaggggctccaggcttggcagggcatgggttggtccttccccagatccctaaagtcctagacccccggacacctgcaacagagcttccaaagcccctgaaaacccagccagatactaggggtattgagggattcacatgacagcaaggccttcccccacatgctctcaggggggtactctcctctgcctgctgcagcctgctaaacccaccccaggggcgcctacagtcaacactgagtccttacagacactccctcgtccaccccgttcccaggcaggcagaatgctcccgagttggcatgtctagtgttctcctctccatcaggcccagaagcagcagagatggggtcacctaggacagtccaggcccggcaacgggcaggccagtggagctggtggcccagatgacaggtaattacactccaaggctcctccccggaaagctcagggcaagaaggagggctcagagctaccacctcgtggctgtttgaggccagcacctaccgcaccaagctcactccccagggcgtggagccagcactccagcaaatatcagaaatgattactgaacctaccctttctgcctctcccacgtacaatcctgggctggcccagggcaaggagagcaggcaccctagcacctggtatggcctggggtccagagtcctcagaggtgggaacggaggctccttgattcctgccccttagctgcctctggccagtctctcctacagaacaggccagtgcatcctcaacctctctccttccatccgtctcagagcagatgctctcctctccttaagcttggtcctggggctgcaccaccaacatctaagacaagcagactcccctgcctcaccgcagaagcccaagcaccttctcccagcccaggtggctcctctgcagtctcagcctccccaggacctgcccagccctgaagcgctggactgctcatgggatggtcaggcaggtgggggctcagaacactgttgcctctagacacctggtccctccgtaggacccttgccctcccaggcctcctgcagggcccagaggtgtagggtagttaactcctagtggagggaccacactctgtgggtatctcttcagagcctcccccatgcccccagccaacagcccagctggggcaggctcagggagacccctgggacagcgggcatgtgaggactggactgagaccccactggatgtgggctggtgggagcggaaggcggggtctagtcatcaggcctctcttctgggagatcctcgtcaatgggaggtgcaggctggcagcggaaatggtcattccaaatcttaaggaaggtgacgcggaacttctggatgcggaaggcatagacaatggggttcatggccgagttgccgtgcgtgaggaagatggcaatgtaggtaaggatgctgggcttgtggcaggacgggcagaagagggtgatgcagttgaggatgtgcaaaggcagccagctgagggcaaagaggaagaggatgagggccagcgacttggcgatcttcagctccttcccatagtacttctgcgggtcgccggaggaggccgacaccttcttgttgagctgcttgcggattaggtagaagacctccaggtagatgaggaccatgaggagaagcgggggcagcacccacacaaagaagttgaagtagaccatgtactccatgctgatgaccttctcgaactcgcacttgatcacgggctcccccatgctgccgttggctgcccaggcccgctccaccgcactcagattgttccagccaaacataggggtcagtcccaccacgaaggagaggatccagcagccggctatggccaccgccgccctccggggggtcaccaccatcttgtacctgggggagaggagggcagagtgtgaggatctgcctcccagctgcctcgaaaggcccctctgaggcacgcctggcctccaggggcctctaagaggagcaccctcctcttccagggcccggtgagtggggaggtgcatgtcttttgctcgagggctgagtcttcaggatctaagatttagtgcttgccatgcattggcttattctcctacagagagaggaaatcctgattaatgacaaaaataataatagaaaatcacagaggagctcctttatgaatttcaaggaaatgaccacagtaaaaattgctcccatgtgctcagcatgcccccactggttatctcatcattgcttcatgacagcctttgtcgcgtaggaagtcaccggcagaatgaggactgcccaattggcagatgaggaaactgaggttcaaagtaatcacaggatctgcccaaggccacatggaaggtggcagtgctgttccgtgcttcctaaaacacgtctacactgaccgaaacacccaggtgattaacaaaccatcccttctcttgggccagcagacacaactgtcattttaaaaaatctttcacacaaccccccttcccttggccttgtcccatactcccctgccatgccccatctcccacctccatatgaacctcctgtttccccttccaatcactgtgcagcacttacctcctaagggcttgatctcaagaaccagctctgcactcccaagctaactgggaatgatgctcaggaaagaaaactgatattcactgagcatctactacatgctagatactttcagtcattcattcatgcatttacgcatgcatacgtggatgcattcattcagcaagcatttgtcgagtgctttctgtgctaggcattgctccctgtgctgagaataagataaaagatccctgcttctacatatctcacattttgggtgaagagacagataacacaaaagcaagaaaataaacaagacaactatagatcatgatatgtcctttaaaggaaataggttgagtcaagggccagagctttctaacttttttcaggtcatgacccacaaagaagatagaaacatctggatgacgaggctgctcgtgagccacaagggttgggcgttttcatatctcaggggttcctacttccctttaaaccaatctagccagcagccatcatggcttctgcccacatactggccttggagacagtgccaagggctgggtctcacccagctctgtgctgagaagccagctgagcagcagcagcttgcccagttgttattttccaatgcggcttctgaaatggatggagtgccctcctgagcatgtaaatagctcctgagacccaggagtgtgaagggagaggctgccgactgtttccttccgccccagggatgcagaatctgcggctttctcctgcatggtgatgatgcttaaagtctgtctcgccccggacaacgcttctcctagatccttcaccatccatcaaagcccacctgctctgtgaaggctataggggtaggaagggagacaatttgcccagtgggaggaaccagatgcccctctccaccccatctagaagataaggactagaagagacctttggaatctcattttctatcccttcattgtcccagtgaagaaattgaggactagatgactccaacacctttggagcagttcccctctcctactctgtgatcataggattcttgtgccccaaaccaccaccaccaaggggccttgagaggtgaccagtgcacttgtgcctctgaagttttcttagatacaatcctcactctcttgctgaaattgaagcccattccctcctctgtaccctcagcagaatggccaggcctggtgcagacactgggagtgagaagacccaaactcgggctgccagtctgcaacttgctagatcaatgtctcctctgtaaaagagacctacttcagagggggaggatcaaatgagatactacgtgtgcaagtactctgtaaacatccgaccagtattcctttgcctgagctcttcttacccctccaagctcccagacaaatggccacctggaaaactccagtatctctggatgctcagcaaacacagcctaagggctatttaaacatcttgctcacatcttgttcctgaccatctcaatgtgttccccacagatatggtgtcctctcagatatggtggaaaaagttctgggcatgagtctacgggcaaagaccaaaggaacataggtcattctgaaggctgagggatgctgtctcagcagccacacagcggagagtggggccagatccccaggtgaacctcagcagggaaagcgagctgccactgcagagaggacggggccaggtgtcctgcctacccccaccacccatcacatctgccatttataccacatttatcatttacaaatccctttctcagtcctgtctcaggtaatcctcataactgctgctgtggtgagcacagcagataagggaatccccatttcataaattagaagctccactggcctgggtctcctgactccaagcccagctcttcttcagggtgccaggctgactgtgggttgttgagatgcagatgattggcaggttgaaaatatcccttgcctaagagatttaaaaggggaacttcaagactctgcccaaggaaggcaccacccagagtcagtggggtggggtaggtgacctctggtgctgccgtccagcctatggattgggggatctagcctgggactgacatcagggcagtgatgacctatggagagaggagaggtagacagtgatagccctagacaggagagagggaggagacttctagctacagaagtgggtccctcccctcttctctcctcacccctcacccttctgaccacccagagcccccggggttaaagctttcctggggctcctccaggacccagtcccagcagaccctgcagcttagggtatcagctctcatctgtttttcttgctattttctccctggtgggaaagggctggacccaagaccttggctgaggtggggcaggctctcacaggaagggctgcctcccaaggccaggagagaagctcacctatccttacacgtgggaaaggaaacagaggctgcaagtcctggggcacgcatggggtaagggtgtgtggaaggtgcctctgactcttgggaatgcccctcccaagtccacagcatccccgagggctgtgctgggagctaagcagggagatgctgctctcaggagtgtgcagctcaggcaggcacaaatgggagagcaacagaacagagacgggagaacaccaagaggggccccgtccacaggccagcagggcagacagtaccttaaagatagccctgagggggccgggcgcggtggcttacgcctgtaatcctggcactttggcaggccgaggcgggtggatcacctg

SEQ ID NO: 97798 - DNA, 252784 bp, Homo sapiens
tctcttagatgagtgaagctacttaaatcttaacattttttagatttatgatggaaaagaggtctttgaaaagttcatggaaaatgcatttatgagaaaactatagatggatttcaaaaactttttgcaccaaaataaactcttactaacttattataatgtgtataaatacaatctagtttgaagcactaagaaagataaggcatccatttgaaaagaccccctgtgaaagcaacatgaattctgctaaaattaaggcaagaacaaacatcacatttatggtgaagcttcagtggaagaacggtgaaatcactgatgctttataaaaagtttatggggacaatgccacaaagaaatcagtttacaaatggatgactcattttaagaaggaatgagacaatgtttaagatgcagcccattgtggcagaccatctacatcaatttgtgtagaaaaatttaaccttgttaatgcccttttttaaaaaaaaatttagtgccctatttgaggaggaccaacagttaacagcacaaacaatagccaacaccatagacatcttagtttgttcagcttacacagctctgactgaaaaaaattgaacaaactttccacttgatggatgccaaaaccagtgagcccagatcagctgcagacaagagcatagcttttatggaaacgagtgggatgaagaccctgaagcattcctttgaagaattgtaaccggagatgaaacatggctttactagtatgatcctgaaaacaaagcagaatcaaagtaatggctaccaagaggtggaaatggtacaatcaaagcaaaagtggactagtcaaaggcaatggtcatggcaacaattttttggaatgctcagagcatgttgcttgttgacataccagatagccaaagaacaatagcatctgcctattatgagtgttttgagagttaaccaaagcctttgaggaaaaatgcccaggaaagcttcatcatgacaatgcttctccaccacaacaatgcttctgctcatgcctctcatcaaacaagggcaatattgtgagaatatcagtgggaattcgttagacatccaacttatcgtcctgatttggctcattctgacttctttttgtttctgaatgttaaaaaaatctgtaaagggtatccattgttcctcacttaataatgtaaaaaaaaaaactgcatcaacatggttaaattcttaggagcctcagttctttagggacagactaaatggctggtatcataatttataataagtgtcttgaacttgatgatatgttgaaaaacaagttcatctttttaatttttatctttaattccatttgtccttgaactttttgaagtcctcttacgtgtgtgtggtgggtagggtggggtagatgagtgggtaggtgggtgtatgtgttttcatgtgtggtaagggggacttctatgtctaatggatattgtaacctgcacataaatgggagttataaggtgaatgtctggaaaatcagttattacatgtgaggaaacactcactggtaatgatgcaagaaatcagtccctgctgaaggcaatttcttcaacaattaaattaaattcctcaggcagtagataacttattcctaagacatattttccggatgattaatgggaatctactgcatgatatattgacatataagacatgtattttctgggtaattgatgggaatgtactgtacaataaactgttaaggttttgcatagattcattgctatgccaaatagatgtaactaaaggctgtttatgtaagctattcttccaattcgtgtgtatcaaggctgaatcacattctcctaattttaggatggcccacacatcctaaattgtgaaatccaaatttcacaatggcagaagacccatttccctagaactttcccatttctttctttctttcttttttttttttttttttgagacagagtcttgctctgtcgcccaggctggagtgcagtggtgcgatcccggctcactgcaagctcgcctcccgagttcacaccattctcctgcctcagcctcctgagtagctgggactacaggcgcctgccaccacacccggctaattctttgtattttttagtagagatggggtttcaccgtgttagccaagatggtctagatctcctgacctcgtgatccgcccaccttggcctcccaaagtactggggttacaggcttgagccaccacgcctggctgaaaaccttcccatttctttaagtctcttcctttacactttcattcttggtattcacttatttgaaaatagtgccttcctggctaccaattatgaacagttcctgactttctctaaaaatgtcaatcaaataatttgggcagaaccgatgtaatgatggctggtcaagtgtaatgcaccttgtaacacagtctgcctgtcactggatccattaccagagctacatgctgggcgcagactccatcagggcaccacactgggcaacagccaagagtcaagataatgaggtgcttcctcaaagtgcatccacaaagagggtcctccactggcttcctctttcccaacagagcagagacatggagacattatgtgtttgcattgtctagtataatcttcctgcctatcttcttggtgtgaagagcatccacagttattgcaaatcacatgtttttcctgaggttatttatttaggaaagtttcagtatatacaaagatggtgaaatctgagtgtttgcacgcaataaaaaaatacattttggcagagaaaatctctagagtgaatgaaggagcaatgtttttttgttaaatccctataggttaccagttattagagattcaactccaaccagtttaagaataaagggattaattttttgttcatagtgggaaaattcagtaaggcatggctagatccagggatttaaatattataaaaatgttttctcctctaccttctttactttcctccctgttggcttcattacctgcagtttttctctaagtggtacaaaactggcccccaaagctaaaagactttgtatcctttaatctcctgacctcggaaggagagtctgtttccctgttccatataatctttgaaatatcatatgctggttgtctctccttggttaataggccttttgttttcaagaggactggatacactgattgcctagcctgacatgtacacttacagggaggcaggagtcttgctgacagccccactaaaatcacttaaactagagaaagagcaattcctataagaagaataaaagtacatattaatgacaggtttcaaatattctctggaatatgtcatctgtaaattaaatattggacttaataattttacgtgtgtaaaagttgtttcatggcatcttttgcttttatttcaaggacgactgtgaagccaagctgttagtcggcatcctgggaacggcagcacacttacagaaaactattttgtcaagtttttgaatccaaaaacttgtatggtctctgtttctccaagtccgccatacagttgattctatgcaagaaaaacccattgctgccagtagtttctcaagtttccattttgtttttcaaggccaagataaagaggggagggaaaaaaaagaaaataaatcaagaactcttcttctaaaagcacatgtgctaagagatccagttctgaagttgtcatagtgagcaaaagaatgccaagccttgcagctcagtgggccaaattctgttctcagccacatgtccgcagcttccactgatatcaatgggagttgtgtgtatatgtgaactgaggacagaagttggctgtgtataaatagctctgcaatggtgaaaatctcttcttgtgcatctggtacaacagaggtagtcttttgcagttagtggctgcttccctttctagtaaagtaaccaggcagtttcaagaattcctgtatcagaatatttgatagcaattattttgtctagaagatttcagtcaggggtacagggagcagtatttgccctaaacttctctcattttccaatagcaaattcaagacagatttaacaatcagttgcaacaccagccttcactgttccttggctgagctgtctatctgctaattgactgattgatatgcagctaattggggggtagggtgggaagtcagtatgctcattaagcagttaaaaacagtgtctaaagcaaagtatttactttcagactggctgttaatgcagcagagctgtatgacatagtaggtcttccacgggaacaaggttctgacctcatcaagcaggacacagacaaagcccttggcactgtcagtttgccattttgccagcacccccagtctggtagtcagcgttggtgttaggctgagccatcttttcagggagtctcagatgaaagtttctttcagagcacagataaggatagattctttcactattcattagaaacaggagatttctccaacatttatatatgaagggttccagaccatgaaagttacctacaggtagatgattttcaaatccttctcttcagtccatgtcccaattctaaattccagactggcttctgggcatctctacctggctatccaatacacaccttaaattcatccgaagcttaacttttattcctgactcagaaagtgtcttctactttggtccctatcttagctggaactcctttcccctagaactcaaatccaaaaactatcagtaagctacaattcctctctttcccttgtcctacgtgtaatcaataataagcttagttaattttacctattaaatctctctctttctgtcttcttatattgattccctgttcctgccatggtagagtgaattaaagcacaggctttaatgtgattaacaactgggtttgaatcctacttttgttagctttttgtggggtatttcttttttaagggcacatttgtgtaaactttggtttctttgtgagatggaatggcatctgctttgcagagctaactaacagagactaaatggaattatatatgtaaagtgttgttatagttgctgacacatagccaagttccaataaatgggggctattataaaacagagacctcatcctttcttactcagcctatggtagtagtctctgcatacagtgttgcccctcttccattccccatttgcagctggagcaaactttctagatgcaaattattccatattatacatccaaatacattttgtgggacaaacaagtcctcatgtcactcattcttctatcactcatccatctccaattgcactccttcttagcttaacatggtactaaatcgtacccccatctagccaattggaaaactagtatttattacttaaggacccatcttaaaatggtttgttctctgaaattttccctgatcccactccaaatagatttaacaccttccttaattccatcactatttcttgaagtataaaacttatatacatctactataagttttattatactgtatcggtattacttgttccataaatctgttttgcaggtcagactattctatggtctttaaaaatgccataaaaaagagacattaattaagaatagctctttattgttctctcccaagcatttagcccagtgctgcattagttttctactgctgctccaacaaatttatacaaatataatgacttgaaacagatgtattatcctacaattctataggtcagaagtctggcatgggtctcactgggctaaaatcaaggtgtcagaagaagagttgtgttcctttctaggggctctataatttttttttttttttgagacggagtctcgctgtcgcccagggtggaatgcagtggcgcgagctcggctcacggcaggctccgccccccggggttcacgtcattctcctgcgtcagcctcccgagtatctgggactacgggcgcccgccaccacgcccggttaatttttttgtatttttagtagagacggggtttcactgtgtttttagtagagacggggtttcactgtgttagccaggatggtctcgatctcctgacctcgtgatccgcccgcctcggcctcccaaagtgctgggattacaggcgtcagccaccgcgcccggcctataatttttttttttaactccttcactgttgttggcagaatttagtttcttcctgttacaaggattgaggtcgccatttccttgctggtagtcacctgaggactgttcccagattctagagactgcctgcataccttggcttatcaccttccactgcctgcataccttggcttatgccctttctcctgcatcttccaagccagcaatggtagggtgagtctctctgtggccgtttccctgacctagtcttttaccttcctcttctagttttaaggaactaggtgattggagagcccagctagaaattccagaataatcttgctgttgtaaggtccttaatcttaatccgatcagcaaagtctcttttgtcatataagaaaacacatttacagcttccacagttacggttagggttagggtatggtcatcttttgggatgcattatttttcctatcagcagagcctagcatattttagatgatctataaataatgcttgttgaaaaaaaatgtatgcagatgatattaagtatgtctgtcttttaagtatattagactatgtttagggccataggtaaattgtataatctggtattctcatctgatttatttgtcataacttttcataagtgttattttttctagatctctgccctgcatggggccatgcaaatgaattgtaactaaatagaccagatgaattttctatgacctccaatttatcatatattatcaacattagtaaaggctacagaaaactactaagagtctctggttcagtccttttttgttaatacttgcagaaaaatttatcttttgtatacaaatacaagctcatacattcattctaaaactatctgagtgtctgtatgtgccaaggtttgtgaaacgtggtaggtaaagagtggtgaattaaacatggtccctcccttagaaggcttacagagtaacagataggtaactaaaaattaattacatctgtaagataagcaggtgaggaaagagtatatttgggggtaaaatgataatagtgaatataagacagtctctttctttaaggagatcatatttattgcctggttgggaatataaatatacagggaaatcttgtcatagcagtgtaatttaattaataatagacatatcttcaagttatagtgatgtattaagaaggaaaagaatcaactacacttgagtgaggctgggatggtttcaaagaatagaaaactgttttaagttgtgtcttgataaataaacaggacttttccagatagccaattaaggatggagtatggaaggtttctgaggaggaggaaaaaactgagtactcctcccatttttaaaggagaggaggtcaggaatgcatttgtgaatggagtatcatcttagctgagacctggaggatgaggagccacttgttgggttaaggggagagtgtagagttaggaattttccaggcagagagaatggtatatgcaaaggattagaggaaggtgagaatgagtatcaagtgtgaggaacagagaaaaattcagaaagattacagcataaaaaggtgaggaattgacaagagatgacactaacaaagtgataataaatcagatcatgaaagactttaaacccctgaagaagtgtgggcattatctgaagaaccatgaaaatctatttgtatgttttaagcagggaagtaagatgacagattttcatgttactctattccattatcctttaactaactgagttagctgttggtctccctatcctcatgacagaactaatcttattctttccgtatcaaaaattcctctttcattaatcatcacaatttctctttttatctacaccaaatagaccattcggtattcttgagaaacactggctaatcttctagtcgacaaagtcacacccaaggaaagcaccaaacttctctgaggtcaatattatgttggattgtgcagagcctgttccataaagatctttatgtgcccaacaagctgcagacaacttcttgcagctctgcatgtgggagaataggaaatggaaactgatatccacatataaagatgatgcaggtatactgtcatctgacccaacctggggatgcaatgggagaaataaaataacatataaagtagcattttgaaaacttaagtaaaaagatttgaaataaagttcctggaggcaaacttctctatgacatggtttgttcttacagtgatagtatatttatggtagtcagttactgctaaatgaaaagaaaaatttagcagatagttggatttgatatgcaaaacatgagggtgaagatataagcagtttatatgtttgtcagagaatacagacacagtaaagtctaaaagtcaagaaagagaagaaaaaataacttggaagctaaaattcactctatttaaagaaagatgatcaaggcaccagagaaatgagacctatcatattaagcaaagtttctgatttggactctcttcttgaacactaaatgactggaagaatttataaaacttatgagagaggctcagaggggaaaagtaggggagggagtgggggaagatattgaggtcagatttgatctgtaagctaggggaaaaaagatattttttcaggtctttttccttcacagtttgttctttagtgcctctctgacatttgtaaaggcaaaaggaagaatgagtggtcttaagaatctcttcccagacagtatcttttattattattattatactttaagttctgggatacatgtgcagaacatgcaggtttgttacataggtataaacgtgccatggtggtttgctgcatccatcaaccaatcatcaacattaggtatttctcctaatgctaaccccccaccccccgacaggccccggtgtgtgatgtttccctccttgtgtccatatgttctcattgttccactcccacttatgaacgcaaacatgtggtgtttggttttctgttcttgtgtcagtttgttgagaatgatggtttccagcttcatccatgtccctgcaaaggacatgaattcatccttttttatggctgcatagtataccatggtgcatatgtgccacattttcttcatccagtctatcattgatgggcatttaggttggttccaagtctttgctgttgtgagcagtgccacaataaacacacgtgtgcatgtgtctttatagtatcttttaaatatgtagtgatactataaaataattgacacagacaattcagttttgtattgtatagtatcaactatctgcatgctaggttcaggaagacatgaaccacagctcaaaactgtcattgctttctgacactttaaagtatacattccagtgatttatgtatatggaaaaggagaggaaaaaagaatggaatctctctgtaaagtgtaagttataaaagaataggccagggagtagtaagggaaacagagaataagaaaagagattgtagaaagataggatgataggagcttggtggtgtattcagctgggatcacttaattcctctgagccatagaataatttagcacccagtggaaatcatatcccatttcaaccttgggaaatgaagtgggtgacgatgaactggttcgtaaggcatgagctgtggagttcttcccgagcaggaacattgtattaaagcatttcaggatttatcatggagggatggtgccatggaagtgtgaggttggtatggtaggccatctggtgagatgcaacttgtcaatctcccagatggtttgtgaaaagagagagacgacattgaattcagatcagcatatgaaaacagccatgaaatcacaaacttaccctttttcccatacactattttgaaaacttcattaagtaaattttatatgagttttatataatctgagagaacatatataaaagttttaactttcaatgtggagcaatatcaataatgtataccacatytgctttcatctctttaatagaggcaatattagtcttaagtggctgagttaggaggaagatagagagctattcttttcattgacttatttgcatttatctgagttttatgagatttctgtatagggaggtctagtagaatttggctatccagaattatttatttgcaaaagagtgctctgaaaagtcatggccatatttgtgaaagacatttcacacttaaaaaatgtattttagaaccatttggatgatacctactattaattctaaaaatgaatgtgatcacagtgtggcatatttccagtgtttccataatcctggggcttcaacattaacaatgttcaagtgtgagaattgtgaaatggtgcatagttctcattattatttcttgtgttcttcaagtgacaaagccggtttttatatttgccttctttttagttagaacctgacaatgattatgtagactcacattaaaactctcgttcaacgtaggatatgtttctataaagaatgaaacttttcttaaaaagattgtttatttatggccgggcgcggtggctcacgcctgtaatcccagcactttgggaggccgaggcgggcggatcacgaggtcaggagatcgagaccatcctggctcacacagtgaaaccccgtctctactaaaaaatacaaaaaattagctgggcgtggtggcaggcgcctctggtctgaggcaggagaatggcgcgaacccgggaggcggagcttccagtaagcggagatggcgccactgcactccagcctgggcgacagagcgagactccagactctgtctcaaaaaatatatatatatttatttttgagacagggtcttgctgtttcatcttgtctggagtgcactggcacaatcatgttcactgcaaccccgacttcctgtgctcaagcgattctcccatctcagcctctgaagtagctggaactacaggtgcgagccaccatgcccaggtaattttgaaattttttgtagagataggggtctcgccatactgcccaaactattctggaattcctggacttaagtgatcctcccgccttggcctcccaaaatgctgagattatagacatggaccaccgcgtccagcctttaaattttaattttaaattcatattaaatggttgcttatttaggacatttaacgtaaaatgcaaatgtttgagataattaggactttcaataatttctaatattccatccactgtggaaattagaaataaatacatggagcacagtatcaaacaaaaataaactttttaccttgtatctattttcatattcaattaagatttcaaaacgtttacaagcagaagaaatttaacacaggctttaaaaaattagattatatttatgtttttcatcttcctgtatgctatcctgcatttgattatttcactgtccactagtttattcaactcaactagaagatggacaaggcaaatgagaggaagataaaattagataagtaatttttgctatttttaatgtgatggggtcgggagtggagatcccagcttgtgcctaaatggacttcacacaccttcacacacaattattctggtacacatacctgaataggtacacatacctgaataattggtgacactgaaattccagaaacctatcggcccacagctgacaaactgcaatgggaaaaccaaactaacaaagaaaaccccaaagcaacagcttgacatactaagaaaggcttagttttcaaggcatgggaagattttgggtacatcaaggaaggtgctgggattggcagtggtagcacctggtcgagcagggcagatgtctaacaggaaaacttcgaggctggaagggcagagaactagggttccacagcaaagccccactgggcactgagcaacacctgtgagggctcttcataggaaaaaggctgatattgggtgtgtactggttgagccaactgcactgtaattggagttattaytataaatatgtaatcacttttacctacagataagtgaaatccaaggagacactgaatgattagcacagtatttggcacacaattgatgctctataaatgttcatagaaagaaagaataaattatgctcaaatataacatatgaaagatgattggtgatcatagacataaaacactgtacaaatagaatgctgggtggtatgggtatgaaattagataaacaacaatttttaatgagaatgatctggtcagtatataaaagacagggctaacataaaaatagttgccattagacagaaatttttatgacttttatatattaagtcattccagacacataattaagctgtgacttcaggtgacagaaagtgcacttgggtatggcaaactttagtttataaaaagaaaaagaaagtactaccgtgttaattaaaggcttccacgaaacacactacacacatgcacaaatacacataaatgtggaaaagaaaacatctctgtcccagagtcaatgaaacaggtgatgcagacatttttaataagataatatgtatttaaattgtgctttacagtttacaaagtgctttcacagattagctcatttagacctcacagtaatcctgcgaggtagaggtgattatgattgtcatttttacagagaggtgaagtgactaagtgattgcaggcaggtaatctttgctttatgctgctttgctctattgacaatgctacgacctttttgttttgttttgtttttaatcaggtacttggttttctcttacctgaggcacatactatattttatttaatagctgttaaaaaacctcagaagatatgcacattcaagaattcttcccagccagcactttgtttcaagtgatggaactctataaaggcagtatgcctttaataatagtacagcacattttgtcataagcagtctgttccttcaaaaattatcatgaaacagattgagagctaaatatgaaatgctgagctctccagttgaagcagagacctcatttcattcagatcaactctagacagataagacaagaaatggctggaaaattattctatttttttcagtcatggcagtacacttcccagctcaaggttgagacaatttacagaggagggggtatgacatagcctgcttaactaataactttctctgtgggatatatactaaagagacaataggcatattctggggtcttccttttgtagaagcatcattagcttataactttcaaatgcaaagtttaatatctcatggacaaactaaaaaataaaaaaggaaaaataacatatccttgggcaaatgaattaatctctttaattgtgtattaagagttaatgttgttcttccacaattttttgcagatactctaataaattaaataaaaagaaaagaaaaacaaacaaaacccttaccttaaggtatgctttttctttgcaaaactaatttcactgaacagtcagatatgtaataataggcctcctggggatgtaattttttatgcaacttgacatgcaagtaatgagtaattaattatgtcttctatttacactttgtcagataagagtattaaacagaagagctgagaggaacacagaacactactattaatctgtttaatttgcaaatctaatgtaatcaaaaggaagacattagtgttaaaattgttgttgtctggtggtatctttcttggagggaaaggccaatctgaggtgtaaaagtctcataaagccagcaagtcacaaaatctcatacaggcttctaaagccagrgcataagtctgccatggtgcttctaacgttgaccataaaagctccagatttaaaagaatttaaaacaccagttctccccatcagcacgtaacattacattcagctctgtgtaattatcttacagagtacagaagcatcaaatctattacactgaagaagataaaaaacaaaagaataagcctgacgtttacgaatatataggaatccactgatatacagacttttttctgggaacatgtgcctgacagattgacggacagaaaaaagaaaccgcaagaatgattttggatgggcaggaatcagctgtctccaggagtgatccctaccccatttctgtccaaaaggcagtcccaaccaaggactgattcagtcacctgtgtctcgagatatttccgtagtaagaggaagaggaagaagtggtagaccaataaaggggaaatacaagccgtgtcatagttttcacacaaagtagtatggtatgttacagtgtgtgtagagttctgtggtcaaatggaccaaggtttcactcctaactcctttagtttctccctgaaactcagtttgcccattactgaaatgattataatatataggagtgtataaggattcgatgagataatgtacataaagttcctaggaatgtccccaataaacagcagtcactcagtcaatggtagggatcatcagtatcatctccatcattatcaataaggcagtgaggcttggaagaactaaatcatttaatttctgcttcagttacctacattgattagttcctttgggacatatcttatatacaaatgcagatagaacctacattgttgagttggtggcatggttatgtacataatggtgaggtttagattctctacttagctttggctagcaacatgtagttttaaataaaatacaaacatgtagaagaaattctacaagtatgggagcatatatatatgaattgtaattactacagtaaacgatggcaaatttttagtcacatgcagaggatataaatttgaaagtatgctgacagttacaacttgtctctgaaaaaatccatttatttttcatttatctctaagagtgcataccgattaatgcataaacaacatgatccaggggagtttaagtctagggactaatttactgaactacccaagcaacagaggattattttatctaattaagacagagcacacgtatttagaattaagcatttgcatttaacagcaaatttggaattataaaatcaattaaagctaaaatgaggtatgataatttttttcctgcacaccactgctgaactaaagctcattttaatgtttccctttgcagcattattgaatagattattatgaatagaagttcatggctgggcaaaaccaccttttcaacctcatttccaactactcatcctcctcaggacctgaatctgtccccactgttttattcaagcctcctaaacataacttacattttctcgtgtttctacttctgttcttctctttctccaatgtgaaatgttttccttaacctgctcttaactgtttaaactctattggacttatattaaatttttgtcttccttcatgaaatcagtgctccctccagcccaagagctttttcctttatctgaatgcaaggacatttatttcaatacagttctctttctcattcatttataaactaatacgttaatacttcaaagcttctattatagtattaactcatatattgccctttagcttcttacatgtttgttattttcacttgtattacagacttcttagcaaaataactttgttttgtactcttaaaatgaggaacacagtgccttccttacatgtttaccttmatacatgtttgatgattgactggtggaaatatctgaacatgtattcatcttcacattaatacttcatccattcttttcctctactccgctcctgttttactcaaaccttgtaagcttatcttatactttctattttgttcagacttatttataccatttccagatatgctacttaataattactaaaagaatggaagaatattactttatcaattaatattttgcccttacctcttacagtggtaatttccttttttatctgattctctgaagagtcattaaaatgttgcctttaacaatgttgtgggaattatgaaggggaatgccttaatgattggtcctttcaagaactttctagataaacctggtaagaatatagtccaatatacaacgtgcttcataataaatttgagtttgcagctaatggtgttttattgaggtctttgtgtattttgtgtatgttcctaggtgcttcaaatttgcttcgataacttactttccctgcaattgtagttattgtttttctgaaacagtccctgtaggacaaagactatatctatccactgttaaaatacatagcagagtgccacacacacatacaaaaaacaaaacaaagcaagctttgaaaaacctaataaagtttttaaaaacatttttcytggagataactacagatttatacgaagttgcaaggaaatatacaggaaagttccaggtacttttgatcctgcctcccccaatgttgatatcttacatattaaaacaagaaaaatccaaaaggtgaaattgatattagtacatctcatagagcatatacagatttcaccagttacatatgtgctcatttgtgagtgtatgtccagatcttacaaatttatcacatgtataactttatgtaattaccaccacaatcaagatatataactgtttcattatttcaaggcttcctcatgttagccccttttagccacatgcagctattccccattcccctaatccctagtctttggcaaccatgaaactttccttcatcataatgttatataatggaatcatacagaatgagaccttttgagatggactttttccactcagcattattttcctgaagttcatttaagtggctatgtgtatcaatggttcattccttttcattgctgaataatattatatggtatggatgcaccacagtttttaaactttttacttgttgaaggacattttggttattctcagttctgggctagtaggaagtttctaggaatatgtgtgtacaggttttagtttttgatttaagataattgcaattccttttctatggttagttcatcttagagcagagattttcatggatgagtgagatgggcgaggaactagtgactgcatactgcacaaaacgtgtttgtttgtgttttcaggaagaggtaaccatccatcacggttttcccagaacaggctgatttgcgtcttctgtcctggcataaggatcccttcactctcggaagtgttccggttggtatgataaattacataatcactctgattcagtttacataaggatcccaagtatcactattatgcctgcttggttatgatggagttgaattttagtaaatttgtaatttttctaagtgcctgtggagtgactcactggagtctgaggaatgagatcatcttcctgcaatgaatgatagtcttgctgaagtctctactattcctgctggcttcttttctgctataaaatatttcttcctacaaaacgtttcttcttgagtcagttttatggttgaggacactgtccaagctcatgccttagctccacaactggaaaggaaaatattctttcacctcccctgccattgccagtttgaaaacaattgtaggactaggttctgattgttctggcttagatcacatgccaattccaaagacagtggtcagcgaggtgcagtccccacatgggcttaggtcaggtgttcacctcttggctgttcattctgcccagagcagtgaggtcaagtaggagaatggtatcccaacttcagactatgtggatcaaagaggaaaagaaattttcctccaagattagcaagatattagcaaggctgggcgtaggctgacctggtgggatggcagactgggctgctggaggaatagtgatctgtgcagccactgtgatttgtcttctatgaagagatcagtacactgccaaatgccatagctagtaaagaatacagccagaattcaatcctatatctttttttttaaccagcatgcctttattcttaagttccttatgcacagtgtttagttgtgaaaaaatggaaaataaatgcctgccaatatagcctctgaagttttgctatgtgtgtaattcttcagtagttacactaatggtgggcacatacatagacaacaatctctttgctcaacaaattccttttccccacttcatggttacaatctgtatctatgatcatctacgtctttaacaatgcaaatacacttgggaattgcatgcaattgaccttgacatatgggttaatgtcctaaattgcagaagagtgaaaatgttcaggtcttgaaaaaaattatcacaatacctttaagtgaaaaaagcatgtatagtagggaagttttataccttttttttttttaacatacacactcaaatgcacagatacaggaaaagatttggaaagatatgtctccagatggtagctattttggaatgcagtgtttaggaatgatgatattctttttctgcctgttgtattttatacattttccgctgtgaacatctgtcagttttccagttctttgtatgttattacagaattctcgtgcatgatgatgcacacctgattcaggcttaaagatatcaaattaagaataccttacttcaaaaccataagcagccatatagtaaagaggctaattgaaggcctcagtgtagcagcaagaatttcaatggaaagattctcattagtttctcaactatccttcagaaaagaaagatgttacatcaatctagcagtagaaatgaaccaaggtaatagcatagagatggaaaaagggtttaaagatgcaactgtattttatttgttgcaaataaataaaatgtaaatccaaggaagcaatctgagacacattataagggtggctcagttttagcaaatttcgctaattaaaaaaaaataacaaaacctcataaactaagtttttagaatgaattccaaagtatttagttctaagtccttgtgattattttagcaaagctttgtcaataccacaatttccatattacaaatctcaagtatctaaccactttgaataaggcctatagtcagttctaaaagactaattaaaaagtataatttagttagggaaaattgcagaggaaattcccccatggcaatgcagaataaacttgggcacatctcctcactatgtttatatgtaaataaggctattacaccaatgcatttcataaaaaccttttttttctataatcctttaagagatgaccacatgactcaatgtttaataatacatggagacaatataccattccctcggtcttttactatttatcttattaatcaacttaacattcacgaactttagaagccaattttttttcctagataaaaatctaagaattttaagtacattcaaatgagaagatatttcttaaggtgatggtgtcaatatgtattattataagtgtgatgcttatactttgtggtatttggcagtaacaacacttcaatttttataattacactttagttatcagcacaatatcaaagtaagtagaaagctcatagtaattttactaggatatctattttatggatcaccaacttgactaaaattggaaattcctggcttatctcagagacaggatgatgtgtgacaattagcttaattctagtgtagccactccagagacagaaagagacttgtgtaaatgtgttttcaaatgtttccagaaattttgatttgatattgagtaaagaagattattaattttaaggaaaacaattcattaaagaattattaatgctatttttatactccagaagtgagtctcctgatcataaatttataaaggcaggagcaaaaactcctttcagtcatgtatgtgagagtgtaaataatttgatcacaattttccttctatttttggctttggatgatatattgatttgccaacaaacagaaacaaaattaaagttgtagaataaaaattacagctaacccaaacttcagtactttttcagtacagttaatagactatggatatagatcagtgcattacaagattatgtaatacctttcaacttaccagagaaatactgaattatttaagtaatagcagttgtcttaagcatatattttgtatgttagtcacttgaaaatctggacaattcaggtttttggtctatatgtactaacactttatgtagcactcatgaatcagcatgtttaactcactgtctgtgttgcataataaaatatttatcacctagtatttcaactgagtataaaaattaccagttgtttctataagaagttacgtaatggaattttatccaggaaaagacaatcattttcaaaaagtcatttttaaaatttccgtgaggtatctatgtgcatttaaaaaaataaacaataaaatttccaaaagtaaaggaaatcataaaagttttaagttttgaagaaaaacaataatttatcatcagagcttcagttagttgtgtgagtttccagaaatgccttttgaggtctagagacaatctggttatatgacgtgcatggtgagagaaaaaaagatttacacattaagtttctatttgacattttcaaaccgtagagccaagataaaaacaaagttttacattttaaaaacttactttttataagtaagtaaattataggcacagtcaatgaatacgatggagaataaatgatcagaaaagctatgcttttgcttcattacacaagggaacctatttatgacttgggcacccatcatttggtcctcagtggtttactctaacctgataaaataaagagaaaaaaaagggtcaggaacattatcttgatgtctaaatgagctcattttcacctgtggtaataaaacctctattccctccaccagagcaaaatggcatctccaggtcatcctccaccctggtgccactgcctccccagcccgactcagtggcgcctgcctgatagaccctccctcctagctcatctcactgtgcagcttctctactccctgtgcttgcacacctgcatcctgctattcctctgtctcgagtctgtcccataccttccatttgacctccctcactccatttatttattcaacactcattcattcactcgttcaacaaatgttcactggacattaccataggccaggcactcttccaggagctgaggatacaacagtgaacacaatggacaaagtccttgctgtcatgaaacctataaatattcccatagaggagctaagttatcataaaatatgcaatgtaatgtcatttagtgaatgatacattctctgaagaaaaagaagcttargtaagagtggtaaaatattagagtgatagggatgattttagataggctgttcagaaagaagtgctgaataaaaatgtttcttgagcagagattggaataatataaaatctgcatgtatagaatgcttactatgtgccatgcatttttctcacactagcattcccaactccttaccatggttcatcgtggaacaccctcgggaagaataaaaactgttttctactcaatttgttattggggctataaaaaagaaaaaaatggcaataggcagaaaactcaggctggtgtaaatagcttaaagttgtgtgatggaggatgaggacagaacagtgagatgacaagcttctcacattttatctttataagccatcaggtctgttggcaaagcagttattcataacatgcatgagagcaagagcagttactatatagtgctctactaaagtcaaacagagatggaagtaacatgtgaatgctacaaccagaagtagttaatctcaagaccaaaccaaatcaacaaaacaacaaaactgttgtctgaaggtggaatggctactttacagctgttggtartgtcaccatttatgattaattagcagtgatattagagacaatatctaagcatcagcttaaattttgaactagatggtctttgaaaaaatatggctttatgattcaatgatatatactgaacaaagttgattggtctgttaagctatatattaagataattacattggaaaatgatgttaaaatgtatggttcattttttgattcaaaactcaaagaaacattttacatgtacaattactgaagccagaattagtacagtccataaagtaaggaagatatctacgtattttcctccaaaagcattttcctgaacatcagtgttttataagaaagttgggatgattgctttccaagcaaattctcctgattctgagatttaaattacagttgatcttgctgctatgttttctttatccttaaggttacatttataattttttaaacaaaggaaagataaacaaagcatctatcatataagcataaatattgtttcttagagcatattcattattctcctgaggtcagaagttcaagaccaacctggccaacatggtgaaattctgtctctactaaaaatacaaaaaattagctgagcaggctggtgcatgcctgtaatcgcagccacttgggaggctgaggcaggagaattgcttgaacctggaaggcagaggttgcagtgagcctagatcatgtcactgcattccagccttggtggcagagcaacaagactctgtcaaaaaaaaaaaaaaaaaaaagaaagaaagagaaacaaaaaggatactataatcaaacaagtttgaaaatgttatacatcatatttctcctgtggaagatacaatacgtgttaacatattaaaagttctaagaaattctggcacacaaaaacaagttaatactagtttaaacaaagttaaactaataatttcccaaattcatgtcaccacaaaggtattcatttttaataacattcaatacaagagtattgccagcctctccagtgtactgtggagcacattttgggaaatgctgctctgtacacatttttattgccctacctctttgacttcactttgcctatttttactatttttctctttagtttattgttatacataacattaattgagtgctcactgtattctaggcactgttcccagtactttgtggtcattttcttatttattcctgacaataattctaagacatatgtataagagatgaacaaaagggaatccagagaggtgaaataactttcccagcatcctactgccagtaaatagcatagtggagaattgatattgacttcaggtctctctgatctcacctggcacctatgctcttatcagataaggggctgcttttttattcttcaattcccggaagcatttatacctcccagtctccagagagtccaatagcctacctatttcctaatataaagatattttccagaccttagcttatagggcctctctgttgcattagatgctgtttgccaagtcctccacttgaaatttcctagatcttgggtttccttgattttgctttccttctgtacctctctggctgtgccttcaacttcttaaattccttatttgcctgaaattaacaatcggtgcctctcaagacccccttccggcccactgcccttcactccctttctctctgctagkggatcccattcacatctccaggccttccatctcctctacccttcagactcatatcaagtacctgtttttgtttatttatttgttttcaactgcttcaaactcaaaggtctaccaccaaacctaccatgtcttatatcagtcatggtcccagcaggacactcaaaaagaaaatcccagagaatgaaatgaagggatggactagccaaagsgatcaaggtttggagcagaaataatgtattaagcatggagaaaacatacttagggtctagaagcagggagaagctattgctctcaagggataaagacagagaactgtttcaggaatttggccagaacatcagccttgtaagaggggctgactatagaactggaagagagaatgaagccactgcctaatgggggctggccagggtggaggctaggagaataaatgatttgatttctccctccttctagcagtaatctttggctagtgccttctattggccaaactcactaggaaccaaagggcaagggaacaggaagaaatggtccatagagggacacttcctggcactgggcacagtggagaggtgagttgatctcaagagcagactatccagcacagttgatctcgagagtagactgtccagcacacatgttatcttgagaccgctactcttccaggcaagagggttggttaccaagaaattaccctacatcttgctctctccaatttcccacatctaatcagtcttgccaatgtagctatttttcaacattgccactctttgactgtctgtcaccctaatgccagtgtttgtcgtctcttaattggataatttcaacaacctgctactagtttaattcttccaggctggctctacctttgggatagcctttcttgcaggcaaagcgctctatctgaaatgcaactcttatctcactaatgccttgattaaacccttcgataaggcctcttcccctagagaatacagagatccttctttctggctcagcatgtagaagtctccctgatctggctcctgtggcttcattgcctttgatatatatctgcattttcctaaactctgccatgcttttcacaacactgggcctttgctcgtgcagttttctctgcctttgtgtgtatatatttaaacctaactcgtacctatgcttcaggactcagctcaggaatcatcttaaaataaataatttcccaaaccactaaatagttaagtgtctctcctctagcagcccacattttcatccgtaaaacaaaacaccatattctaatgaccatcatctgtgtccatgttcccaatatgccactgccagggactcaactgagtattatccacttctgtacctataatatctagtaaaattcctggcacatattagatgcttaatggatgtttgattaactaaatggaattgggcagtgagtctttattctggaatacaaaagacagtattgaagaagaaagggagcttctcaatctttccattttggcattggggaaagattggccagccaaaaaatgtttataggatgctctttcaaggaaactaaaagacaaggagtggttaattataattaatgccaggatccaaaagcaggaatactagagtttatcaaaatacaatattgattcagaaagtaagtatagggaggtgggaatcaggcttcagataggaccgaagatacaaagggcactgaaaattcttttgaattctctgacatctggtttgtacatgccaatcacaaattcctatgcgtggaaccaagagagaatcacaagacacatatcagcacagcaggctcataattggtctctgatacgggttaaaggtagagagaaccagggtcagaaattcctctgcacttaatttggtcaatggcgggtaataatgaaggaacagtattgagagcatggtagagtcatatgacgcctttcctcacccgttatataaatcactgatattaaaaacttagtaggcagaaagaggaaaataaaacaaagtctcagttatctgaaaacagtaaaatgaaatagcacaaaaaagggaaacattcatcatttaaatctcatatagattactattaatataattctgatcttgcaccactacttgtagataaattgcattcctattcttttaatttgctagtaaatataccaaaaatcacatttaaaaataggtttatttagtttaaattttcattaagatagaaatagttttgttagaaaaatgaactgtgcagcattcctatttataaagagtgaaaaaccaaatagataaagagtatttgataagaaaatacatttatttgcatataaatagaattgcagtgtatttgttttcatcaaatgttcttcatttcattctctaatttcccctatattcattttcttacagaaattaccattcatactcataatttgcaataccgctctcaagcttgaagtcctatttccatttctgattctctgtttctgaaatatttttccaagcatatatcacttttctccctttcatctcaatttcctgaaaaaaaggaaagaaaaaaaccttttatcaggaaatccccgcaaccttgtttcaaacatcttctgtttgtttggtggttttaaaatattcagaagaaaaaggagctggcctttaagtaactagaatgtctaaggaaagaagaaatctttcattcgggaattagatgctgaaagacttgcgaacgcttttctggcacaaggctaagatatgatcttactcatagaaataaattcaaaggtacaatgtgcagaggaaaaaaaatctaaggattggtgttctgaagacctagaacaagcttggaaaagggaaacattaggagtaattggtgatagcagattacatgagaggtatttaattaaggaggttattcacatatactttttttttttttttgagacaagtttcactcttgtcgcccaggctggagtgcaatggtgtgatctttgctcactgcaacctccgccttctgggttcaagcgattctcctgcctcagcctcccgagtaactgggattacaggtgcctgccaccacacctggctgttttttgtatttttagtagagacggggtttcaccatgtttgccaggctggtatcgaattcctgacctcaggtgatccacctgcttcaggctcccaaagtgctgggattacaggcgtgagccacctcttattggctgatagaaaccctatgggacctgctggagtcaacagcaccaggagagaaggaacccattcacactcatcccaatccattcacactcttgctcactttacttgagccacattaaccttgtttgggttcctcaaatcaatgacaccagcgcacaaaaaaaacttacatatttatttgagcaaaaagagctgatataatgggtatttaagatgactatagaagagttctgtaagaaattgggttatacgaccttggattaaacactaccatagggataaccaagaccagggtgtagaaaatacttcatctcttaagggtgatgtctgacaaaacattaggaggatttctactaggaacacagaaatcttggtcagttctggttggttgtggtcatagcggagtggtgatgtggaagaggaggcaaaaatattacctgtatatctgggtactagctgaaattgtaggtcacccatacaggttaaaaaaatcaatttcccctagtatgtcatttgctactttttaattaataacattaaacagaggtgaggtaacattaatgaataaatgagcaactgagaatattacatttctgggaaaaataactgatattttaatttatggttttaataagattctaatataagtgattggtaaaatttttactatttgaatgtaatgagtgcattgtagttatgattatttaactcccataatgataattttcctatattttccttaaagatgtgttcacaagtcaatattacaatatttcataattctcagtcagagcttttatataatgcagaaaatttaaatctgtttattaaccttctattaaattcctaacaccacatactagcaccatgaaagatagaaatattacagtagacattcctttatttcaaaaatatttacaacatatttggagtaattaaatgaaaacattaagtgctttacagtaaagctcatcactgcactgggatatgtttctgaaaatgcaacatcactgaaactgtgtacggagaggcattaaattaggggaaaatgaaaacttgtggtcattgttgttaagccttctattgtgccacactgctaccaattacaatgttttacttaagtgcatcaactgtatctgacatcaaacattcttttacaacccctcaagttagaattatatttataaggttcaggagtaaatctgcttatacgtttaaatacctttaagttggatatttagatagtagaaatagtgttacattttaaaataaagtacaactcatattgtttttaatcagttatccacataaatgtgcattttcttttgggccaaaatgaggcagaggtgtaatgtgaatttttcattccttcacacaacgatagtctctcacaaaacaaagaacaaaaggaaacatatgttcacagtgggaaggattattactcgatcatctgtagaagcatggcccagggagcctttgccaacctactggggatgtcacatgtaaaaaggtttctccaaaaggttggcaatatgatttattaaaggagtcagatgacatgggagttaagggcagcaaacttcattgtgatggaaaggatctaagctgctccagcaaaatgaaaggattatggttcacctgccaacactgtgcaatttatggatgaaacctcaaccacgaaaagtgaaacttctttgtgtgtgtgtatggggttgcgaggggagacataggaaaggaaaggcagacagaccgtggaaaacagatatttcccctggataagagtagaatggccagtatcataacactcatgtattatagaattaaatataaacctgtttcagaaagtacaatattaagaccctttttaaatttgatattctttgatgatatctctggtaaaagcagaaatagaaagaaatagagagaaggggttaaaaaagaaggacacacgccaagcacttgagtttaggaatatattccagctgactactaaaaagcaacatttcagggaaggccaacttcaaattcctatgatgtcatattccacgatttgcaccttagtagacaaagtacttatactgagtaaactgatacaggaagacattttctaggagggctttagtaaagataggacaagtgtaggaagttacatttctttcactgggaattatgggaagacacacaacagcgaggctcgccagataaatacctcacttgcattcatccatagaagactttgaaattagtagccttcaatataataacagagttccattttttcttctattttatatacaccatcaatattgatataaaaataaaaattttcataaccaacattgtgtttaggcaagataaattatgcagatattagcttcataatgtgcagtgaatgatttagacagtctgagatgcccgattatatgtgctcatcactgctccatggataaggaacgatggcacaaagaccttcttggccagtcacatttagtctccctcaatggaactgattatagccattcatacacattcaaactttcctacttttccaccactgatatccagctgcttatttttgagttgtggaaaatgtaaagctgtaaattaagcctcatacttgaatttctctgtcttattttccttcagaattttcactcttatataaaggatacacatatggagtagtgaaaaatgtattaactatagtgaaaactatggaaattattttggcaagggagagttgagagaatgtttcatttctgactcggcacacgtggaacattttggattttattattgagatacagttagcagtttggtatttaataatgaattttttctcatcctccagtcacaacctgcttgagtagatctgttttactggcacttaatcaggacctttaattcaaaaatatctccaaattataaagagattataccatgtgcccaacgcaccatgtaatatactatcctctaaatgtaagatattacactgtgtgcccaatttaccattttttttgaacaactcttgtcaactgcagcaaaataggattaaatgaaataacgtatgtaaaatgcctaaaaaaccrgcacatagaaggtatttaatatatacagttttttcttctttcctctgatatagtttatattcaggtgacaaaaatattacattcacataaaataaaggaaaatgatttttcttacaaaattatgtgtcccactacaataattattatttaaatggcaaactttgccaatgtatttactatggaagcagtttgccataatttacatttacctgcaatgttcaggaatatacctattatgtgaagcaggctggacctctatgacaatcactaacattttcattacaccatcactaactgcattttctcattccaatatcgagttttaagtcaaacaatggccacatttattttattttaattgcaaaaccttacccccactcccaaccaagtcattctcttatttctggaattatctcattatgaagaactcacgcaaaaacctgcagttgtgctaaacgttaggtttggatcagatgtcatacatataactcttagctgttgctcgtaaaatgcatagtgacttggtttctaatttttggttcatgacaattattgcataggtaaaatagttgtgacagtttgataaatagttagaaaacgactaatagacaacctaataagtctaatgcatttatgatgtgtatgaaagaacaacctcctacagtaaaaacatataactgagcttattatttaccatactttaaaattaatgattattgataatttaagaaaaaatgttaaaacatattaaatatattttaaggtcttacttaggcattctgttgctgtttctccctgaattttttttatatttttcattaagataaatgaaaatatggagtatttaaaagtaatgctgttcttaatccattggtcctgttccattatattctttttaggcattcataattaatggtgcatataagcaagaagtgactctataataagaaaacctttggatccattaacctggcatccatttctagggaaggtatcactgtggtcctgaaaggatagctccaagtcacctgtcgacattcttgagtttgctttgcggagagaggaaaagactaacaacagaactaaagtagatccactgaagacatgagtgatagacaatcacttcagaacttcacatcgccgtccaagaaaacatctagctgacatttcttcaaaaaaatttatgtacagtatagttgtcaaactgatttttcaaaagcaactcctttgcttttcatttttctcaaagtaaaacctcagggtagcacattccaaagaagatacgaaaaagtttattattatatatttttccaccattaaatctaggggtaatatcatctgtaaatatagtggagaaagtctggagactttttaaaaggaattgtaaagatgttgataggagttggggagaggaatccttaccaagctctctacctgacactccttattcaaagaaaattctgccctaacgtagccctggcagtccatttgtgtccagggagctcagtccccctccactctccagtgtataattccagcagtaaggaaaattaagacaaagcattctgtgcgagggagggcggaaaggttaagcagcgttggggtgcagtggaaaccagaaaagaaagtgacctcattttgcctgagaaagcacgatccaacaagcccacctttgatgtggatttcagcagcgataaaagagcacaaagggcgaaagccggagggagcaaacttcccttattcttccccccgccccctacctctcaagaccaccaggaacacgcacacgcgaggacaacaaagcgtgcgcccaggctgcacggcaggcgcttcccgcggctgggccatcgtgccctggggcgcgccgctcccaacggcagagcgagggcgccggagcgcggctgccgcccggaccgctgggaaaaaggggtggaggagctcccctaccttgaacagcacaaagagccagagcagaggcaggaggcggcgggcgccgtgtatccccgtgggcaggtgccccatcgctgcgcggacggggactcgggggcacggctgcgctagcggactcccccggcggcggctcacaatggcgaactggggctgcagcctcagaccctgggcgccgaggttgctcctggcgagcgcatgctgcctttccagtccccctgcgcctgctccctttcctcctctgcgcccggggtcctccragaacgtgccaggcgctgctgttctttaatgactaaggatggagagggtggggattggagtgggcgaggctctgccgccgccaccaccgcggctgccagaggaggcgcggggtctgtgtggtgagcgagaggcggggaccccgcgcccagcccgccgtagtcctctggcagcagggacactctcactctggctgccgacccataaaatgacagcagcctcccaaccctccaccaggatcggcccgctgcttgctactgctggacagcccccattgcagactccgcctcaacccctccctcaatctctgggtctcaggagttctgaggggtttccctgacctctcttgagcaatccaggcgccagatcccagttccctctcaatcttcctacatctgtactcaattgcagttataaaggatcaataacagttgggtagttgtgactgtagaaatagtgtgtagtgtgagtgtgtgagtgtgtgtgataggaagggtattttctctccttccccactgcttccattatctccatcccatttcaacactctcaccgtctccgtcccacactcacccaggaacaaatagcacaattatgcaccttttccatttgaaatccgcagttcttgtacatttcagattctcttttgataccaaagtgtgtcgggtcacctgaagctgaatatagaagggggaaaaatcacagtattttacatgtatgacccttgaacaacacgggtttgaactgttgggtccagttatatgcagattttcttccacctttgccagccttgagacagcaagaccaaaccctcttcctcctcctctgcctgctcagcctgaaaaggatgacgttaaagacttttatgataattcacttccactcaatgaatataaatgtattttctcctctttatggttttcttaataatattttctgttctctagcgtactttattgtaagaatacagtatacaatacatacaacacaaaatgtgtgttaatcaactgtttattatgttatcagtaaggtttccggtcaagagtaggctattagtagttaaggttttgatgagttcaaagttatatgtggattttcaactacgtgattctctgtgttgtccaagtgtcaacggtatgtacagttatatttttaaacaattatctgtgaataattttactgggatgttttagaatcacaagcaacgactttcaagctgtgggtccccaatctactacttgtctccttttttgttatgtgtatttttttaaagataagtctgtcgaaatcaactctggtatgcactgttcagatagaaatcatttcttattgtcatgtaaattacccttgctgtgccctgtcagtattggaacttatttatacctgagacatgcttgggcaacaggagacaggaaaggccaccctggtcatgaatgtaggtgttcaggcatagactttgtcagtcacacagctagggagtggtggcctgagaaaaggatccagagctgtgtttactcagcttttgctgcatgagcaatggccaaacactaatcatttggttgttgtttgtatgtgtcttaaggaagctttagattgaatatgtttacataagtgtgaatatgtatatatacacatgtgtacatrtacacatatgtgtacatgtacatatgtgtacacacatgtgtgtgcatgtacatatgtgtacacatatgtgtgtgcatgtacatrtgtgtgtacacatatgtgtatgtgtgtacatagatacatatgtgtatgcatacrtatatgtatatgtacgcatatgtatatgcatggtacatatatgtatatatgtaccaaatttcatatgcatgaaatatgtaccaaaattcatatgcatgaaaatatagaatgatggtctgaatttttgtgagaatattatccttggtgtcttcttttagaagcttcttttgttttcacattcccatcacatgctctcttcaggtccctcatgtccactcatcattggtttggacattttctttcttttgagaaaatgttaactgctcctccctccctctgggttagacttacgggctatctgaacatttaatccttgggattgcacttataggaactttggtttaatatgttttctttttattttgacgctcctgaagcagcattttattcccactcgccctcagaagtggctgtaaagtgatctaatctctagaacataagatatatataggccaagggcaacaatcacactcacaggatgccaacaatttctctttggagtagcatttaattttaaaatgtgtctgtgaattatgggtctgtatgatgatattcatttgtgtgtatgcatatgtctgtgtgtatacatggatatagccttgcctgatgtgcgtagggcgtttaaagcagttctgatcataaattaatcttgtaaatgctaaaagaactttcacaatgaggctcccttttaaataatcatattctgctgcgtctttctgtttttctcttagtcatacatcacaatttgttcagctctttctgtctttgtgcatatatatatatatgtatakatatatatatatatakatattatgtggaccactttggaggaacaataacagtaaacagtaagtagtaaagcattagtaattggcattgttgttattttattagtaacattgtggttagatgggctgaagactgaaagtattattttataatcacagaaaatttcctctctagagaaaagtattttacattgctattgctggataaaatactttcatttgtttttattgcacttaaaccataacagtgtcctagaagagattctcataaagaatgtgaatgctgtgtcatccacagtgtggggttttcaattcatagagcatgttttgtgtttctttgagctattgactggtttttcaatacaatacttccaaagtatgataaatcttattatgctattttcaagactccaaatcaacaaaacagccaggggcaacatacagtgcatatagtaatttatgtttcaccaattgcttctacatattggtccagatttcattatgacaaccacattgttaggtaaagaaggctgagatcattatcaccaactrttttcccctaatgctacttttcctggagaaaaaataaacacagaaaaataataatatctctgacatgccataaaacaagcattgaaaaataagttytcacaaattgaaataaagctctctacttcctttgaaaattataaaaaggtggttaatgatcatgaaactggaaggtctttttaaaatctataggaggcttagtttttaccaagaaaagcgatcttttcctaaatatgtagaaatgtatctttgcctacgtggttcacatctatctcttctatagaaaagcaagcgcagacacagagaagcagctagaatccctgtgagaggtttaatgaggagtcaaatggaactcttacggtgcccttgccaatgaagctcaattctgtcctccagggacaacctctaatgtagttgagtgtgtttagtcctggcttccactactgaaatagcctacaaggctgtcagcagtttcagtatkagataattgtatttatgggggatgctcaatgacaaataatttactttatatggaatagaaagaaaaattcaagcaattgttctctagactctattccattggaaaagtaatagccattyagtttgttgtccatatctcacatgttacaatttttatagcatatgaactgtagattatctgtattaagctcttggaagaaaatgaccaggaagcattttgattttctatttatttgagcatttgttttaattttttctcttgatgagcactgrtttctcacctaaatgatgtgttgacaattcataagttttgtgtctttcaaaatgagaacgattgacagccctcaggtgaatggcatgttccaactgccaagacttattactcttgctgcacttgaaaaacagtggaaatacgctaaagaaggtcatttttgcttttacttggagagtcttttcccattatattcccctctcccgccgcaaaagattcctattaagagacctatcttacttgtacttgactcttacatgtcttaaagaaaatcaaataagaatattgcattacaagatatgtcttacaacacaaaattatatacttaaagaaataaggaaacatacatagaaagtgtgagcagatatgcagatatatatcactggacacaaattacaggctataggataaacagccctacattagaaatgcagattgtcgtgtttttagatattataccttcattcagtcatatactaggattctgtttgttgctagcatttcatttaattgctctaaaactttaataaaaggcattagccttaagttatatgattttatctcatattttatttatatgaaatgccttgactaatgaacttctaaaatattttttctgaatgttccagacattgctatcatttactaatttagcttttcttcataactaggttttttggctaactataatttaaagtattagcatcactgcactgagtgattcactttagcttggcatgaaaagcaagaatagaacctgagtgtaatttatagctaaagcaagacatagtgtttgctaagtggaaatggtatctgctgatgcttccttcccttccttctttacttcccctcaaattaaaggtgcaatgcaacatttacagtcaactcagtgtcacacatagtgcctacatatgtgccacttaaaaacagctaccaatatctaattatgaaaaatttggtgatggtgatttcaggtgctatgtaaaaactatgaaaacattaatcgcatattttgaaaatccactgccttaactgctaagggttttacctcagcagttatagtactatagcaggtataacaacattgcattgacaatcatacttcaaatcaatcacaccaaatcaattttatgctgaaattacaaagctaatgatatattcaaatttaactgtgagagaaggggtaaagaagaccatactctgaagagatgaggggatgccactgatagattgatgttattacctgtcttagcagagggacatagaagaaaaaatttaaagaaggcacagtaattctagagaaaatgaagtgcccaagggaaaactaaaacatcctcctcatcaaaacacaaaaagagaaggcaaaacaggaaagtcacacatttctagatacacttgcttagtgtgaatatctgtaagagaagcagtttgggagtgggggttatatgtagagatttcacctgttttggttaataatttgataatgtggaaaaattataagagtaagcatttaatgtatctcaagaggatgatttgagtgaaatctgatcagggatcaacatatgtgaagcctatggccattctctgttaactcactatctcactctacagtgaccactttctgccttttctactcatctcaaagcttcaaccctctgccctggaaaacttttcagtgttttggcttcaccttctaccttagagaggaaacagaggtgacaacttttttatcttccttgacagtaaacataattccaacccatattcaattcatttctgtcttgttgagtacaaggaatggtctctctctccctctcaacgaccatataaagaaaattttaccacctattttcgggagctcattacttccagccttttctgtgctattttgatggattccatcctttgggtttttaaccatgttcataactttacaactgaaggaaagaaagtcttcactgggccctgcttgtccttggccgcaaccttttctttctctctctctttcaccactgccaccgtccgttcacagcgatgatttttgaatggtcgtgtatactctgtctccatatttttcagcttctacttgcttttcaaaccactctgtagggcttctgttcccatcatctcctgagcactgctctcaccaaagtccactaggaacctcttgggagagtatgctatgttggctgttccctccttcctcaagcattctcttctccaactttctgtaaccttacacaaccctgttttttggctatatttctgactgtcctttttgtatctcccttgcttgttcattttccccttcctgtccatttaatgttgcaattctcaattcttaatcctagactttccctgttttcctctgaattcttgcctttgccaatctaatcattggccacgtcttcaatccctacctatgcggatgaaccacagggttctgtcagcagccttactaaaacactcttttgtatttcacacccacaaagctaactgcatgcttgaatctccttgtgtttcaaacttctcaaacttaacaggtctgaaactgaactcaataatttccatcagaaactcctatctctataaattataccaagaccaaaccatccacaaaagccagaaacccaggtgtcattctttatgcctctttctccacccacccacctccaatagcaccaaatccaacgtgattcaatgtcctgttctcttgcttctgaaatagttgttgtgtcaattcatttctctctatcccaccctacctgtactttagttcaaattacctttatcttgctggaactattgcagtaccttcatgaatacctatttgcatgagtctagtctacttctatcctctctggcttcctccacttcagcttggagtacaacaaaaaagtatttccaactgcatcaaggtagaaccagtttttgtaacttcaatctgattaaccagactcttttacataaaactaatcaatggtttccaaatgcttctaggatagtagtaggattccttagcttgggccaggtgtgatggctgatggctataatcccagcactttgggaggctggggcgggtggatcacctgaagtcaggagtttgagaccaggctggccaacatagtgaaaccccgtctctattaaaatacaaaaattagctgggcatggcgtcaggcacctgtaatcccagctactcaggaggctgagacaggagaatcgctcaaacctgggaggtagaggttgcagagagccaagatctcgccattgcacaccagcctgggtgacaagagtgaaaatctgtcaaaaaaaaaaaaaaaaaaaaagaattcctctggtccacaggccctaaacaatctatcccttacttgaatctcaaatctcttgtgatatctccatcacctttgctctctgaacttctaaaactcattcatacaatgctccctcttgatactgtgatgtgtgctattctctctgcctggaattttcctctcccaaatgtagtcctatttctactcaaactttatttcctcagcctacttctagagtttaaactttcataacccacctagtctatttagtatttatattttgttttcttcttcatcactgtgaattctaaaagttcaggtacttcgtgagcaatttctccttaccacttaagttagttccagaaaataagtagccacacagagagtataggttgaatgaataaagtagaataattgccaatggtaattgtgccatcaaatattgaaatataaaatgtttattttaatgttttggtttaattgtctaaggtgagatattaaactttaccctaggttcacgtccactttttgtagggaacaacaaataagagacaacaaggtaacaatatctgcatatgatagatcctagagaactgtgtgcagaacaaaaggttggtgaatgatcaaggagaggaacacataagggaaagtcattttcatgagggtgataattttactcaaaatccaggcaatcttttaattgtaattgggtagacaaaccatagtccacacatccagcagaatgttactcagaaataaaagtaactgagctacagataacatgcaacaatgtaaatgactctcaaaatgttttatgctaagtgaagtcagaaacaaaaagtcacaatctgtatgtacccatttatgagtcactttagaaatggtaaaactatggagaacaaaaccagaccaatggttgccaaggactaggggtgatgaaaggggctgacttaaaaggcacacaggacttttggggtgacgaaaatattctaaatctttatttcattggcagctatataactttatcgtttgtcaaaactcatcaaacgatgctaaaaagcatgaattttaatgcatttttttaaaattaagataataaaaaatcagaaaaacaaaatgaaaactccaagcaagaattcagtataggagagaggtggagcaagatggtggaatggtaagctccacctgtcgccccccaccacaagtacaccaagttaacaactaacaactatctacacagaaaaaacacctacataagaaccaaaaatcaggtgaactctcagagtacctggttttcacttcatatcactgaaagagacactgaagagatagaaaacacagtcttgaatctcccatcatgaccctgagcagcagcagcctcatgcggagagcatctctgggttctgacagaaggagaagacagcaatttatgactcattgaactcagtgctatcctgttagagcaggaaggaaagccaaaccaaactcagctgatgtccacacacagagggaacatttaaaccagcgctagccagaggggaatcaccgatatcagcagtccaaacctggaccaccaagggccaaagtgctctcaatctctacataaactggaaaggcagtctagaccataaggatggcaactcttaggtgagctctagggctgaagtaggaccagagacagtggactgggggagacatgacatactgagacaccagttggggcaggaaaagaagtgctggcatcacccctcccctaacccatggtggcacagctcatggctccaaaagagaccccttccttctgcttgaggagagaagagggaagagtggggaggacttgtcttgcatcttggatatcagctcaaccacagtaggatagggcaccaaacacagtcatgaggtcgccattccacgccctagctcccagatatttctagacacaccctgggtcagaggggacttgctgccttgaagaaaaggatcaagtcctggcagcattcattgtctgctaactgaagagcccttgggctatgaataaccagcagcaatactcaggtactacatcaagggccttagtgagtctctgagacttgctagcttcaggtgagactcggcacattaccagctgtggtggctgtgaagcaacactccttttgcttgagaaaagcagagggaaaataaaggggactttgtcttgcatcttaggtagcaacacagccacagtggagtagaacacaaagcagactcttggggttttctattccaggatttggcccttggaagacatttctggacctgtcctgggccagaggagagcctacttccctgaagggtgagtctcaggccaggcagaattcactacagtctgacttaagagaccttgggccttaaaggaacataggcagtagtctggcagtgctcctcacagccagggtggcagtggctatgggttgaggttccactgcttttggaaagcggagagaagagtggcaggtattgcatctagtggtttgtatgccagctcagctgcaaaacaatagaccaccaggaagacttctgagattttgactccagtcacttcacctgtaaagatacatatagactgaaaataaagggattgaagaatatatttcatgacaatgaaaccaaagaaggacagtagttgctatacttatatcagacaaaatagatttcaagaccaaaactgtaagaagagataaagatcactatataatgataaaaggggtcaattccacaagaggatataacaacttgaaacatatatgcacccaacactggaacacccagatataaaaaggaagtattattagcactaaagagaaagataggttcaatacaataatagttggagacttcaagaccccattttcagcactggatgatcttccagacagaaagtcaaccacaaaacatcagacttaatctgcattacaaaccaaatagatctaatggatatttacaaaatatttcatccaagggctgcagaataaacattcttttccttctcatgtggataattctcaaggatagaccatatgttaggccacgaaacaattcttaaaacactaaaaaacattgaaataatatcaagcatcttctctgaccacaaaaaaataaattagaaataaataagaggaattttggaaactatataaatacataaaaattaaacactgtgctcctgaatgaccagtggatcaatgaagaaattaagaaggaaattgagaaacttcttgaaacaaatgataatggaaacaaaacataccaaaacctatgtgatacaggaaaggcagtactaagagggaagtttataggtgcctacattgaaaaagaggaaaaacttcaaataaacaatataatgatgcatcttaaagagctatgaaagcaagagcaaaccaaaccctaaattggtagaagaaaaggagtaataaagatcagagcagaaataaatgaaacaaaaaattcaaaatacaaacaaaacaaaaagttgtttttttgaaaagtcaaacaatattaacaaaactttagtgaggctaagtaaaaagagacaagatccaaataaataaaatcagaaatgattacaacagatactgcagaaattcaaaggatcattagctgctatcatgagcaactgtatgccaacaaattggaaaatcaagaagaaatggagaaattgctagatacctacaaccttccaagattgaaccagaatgaaacccaaaatatagatctacccataacaagtaatgagattgaatgtataatagtcacccagtaaagaaaagcccaggacctgatggctttactgctgaattctaccacttaaagagcaactaatacaaatgctactcaaaactattccccaaaatagaggaggactgaatacttctaaactcattctacaaggccagtgttaccctgatatagaaactagacaaagacacatcaaaaaaataaataaaaaagaaagaaagaggatgagaaagaaagaactagaaagaaagagaaagaaagaaagaagaaagaaagaaagaaaaagaaaggaaggaaggaaggaagaaagaaagagagagagaaagaaagagaggaaggaaggaaggaaggaaaggaaggaaggaaggagaaactcatgtttttggcctggtcagaaatgatgaatttgccatcatttgaaaatgaatgacacttggggggctgaaatgggaggatcacttgaacccaggagtttgaagttgcagttaagtatgattgtgccactccattccagcatgggtgacaaagtgagatcctctctaccaaaaaatttttttgttttaaaaggaagaaagaagtagtgcaggttttgaggaaatattagttcagattggacatgttaattttgagatatttgttagacatctaaacgatgatgctgaataggaattagacaaattattctgtaaatgaggggttaggtctggactggagtaatatatttaggcatcttcaatttttaaaatgacatttaaaactctgaaactgtctgagatcactaagggagagtgtagatactgaaaagaagaaatccgaagactgagaattagtctgattttcattttctggcttttcagaatgcagcagtaggctctctagaaacagatggaggggaaaatcttccttctccccctccatcagaatgaagacaaattgtgccactatacataagcctgtggagggcttctcttaaatagctatgatggtataatctgtttataaactaagtatcatagtctaacttaatggagcaatccgaatacgtaaatgtaagtaagaatccaacataaaaatttctatgtgtatatatgatttattaaacatkttgtcaatagtatttcagtcttatttggtttagtgtttcttttatcattacataatctttggttacgcaaagactctcactgaatcatttattcttttattcagtaggaacttattaagtgtttattatgtgttaagtgtttttggctaagtcctatggctataaaccttgttggttttattatgtttctattccttatgttttgaaaaacttttctttggatttaggtagaaagaaagtgtgactgttgttatttttagagagttgaaattagacatgcaaaattcaaatatgcatgcatctactattttataactgtagcaatatcggcaaaatttcatgttcagtaacttttttataagaaaatgattttttaaaattccaactactgatacatccaaggatattataaagcaaaatgagttaagttactttgaatttaagaaaccagttaaatattggtgccacgagggtccttcagcaatgaccttgaagagctaaaggataccctgggaatctcactgctaactctcaaagctactaattcttgtatatctccactgatccacatcaactactgttgtgctgttgatcctaaattaaatacactggcctgttcttggtattaaaaacctctgttgcttttgtttacctaactataaagtcttagagttacttatggtcattttccagatgataatagcaaagttacgtaaacattaagaaagagctacagaagatttgtttctagactctagggttttacaaattaatagaccctgtggatgatgatccaaaaaagtgattcacttgctttggtaacatatgtcccttcttaatcttccttatgaccttcgaaattaaaatggtagaaaaacgaagtttactctaaattatcatgtcacatgatatcagtaactgcagaaactaagagatttacattttcaatttttataaacaaaatacccaaagccattcaaagttccttatgaaccatgaaattaccacctgttactgagttgtgcaatggaactggagcataaagtaaaagtagaggtccatagtaatgtgaagtagaacatttttctacttacagatgttcaaagaaaagctcaaacatgtgccaggtcctgagaaagtggaaaagatgttctgctaaaaaagagttagtaacttcatggttctgggcaatggagtttagagagtattaatataggaaaattctgctaaagaaaatgtaagtcaaccccaagccaaaaaaaatttaaatgtcattacttgcactcaatgagaaacacatatttagaaacgctgagagatcaataactaaatgtcaagctttccatgaattgttcatgaaatttgcatctacccactgaactgtgcaaaataatggatgtcctgaaatttgttggtctgaatttttgtaattcacaaacttagagaatacattaactttaaatgtgaatgtgttagtccattttgcattgctaaataaatacctgaggctgggtaatttataaagaaaagagttttattttggtgcacagttctgcagactgtataagaagcatagtgccagaatattcttctggtgagggccccagaaatcttacaattgtggtgagaggtaagggtggagcgggcatgtcacatggtgagagacagagcaagagaaatgccagaattttttaaacaaccaactcttgcatgaactaatcaagtgagaactcactcattacctcgggaagggcaccaagctatacaggagggacccactaccagaagccaaacacctcccaccagggctcacttccaaaattgaggcatttcaacatgagatttgcaagggccaaatatccaaacttatcaattaacaaacataaataaagccaagaaaagttaaaataagacaataacagacagtcaagcataatgttttctaggctcatccatgtttttgagaattgatctcatagaagctgagagtagaatattagtttccagagactggggagaatagaggggaaagggagagggagagatattgctcaacaggtacaatgttatagttagtaggaataagttctggtactttattacacagtggggtaactatagctaacaataatgcgttatatatttcaaatagctagaagagaggattttgaatgtcctcataacaaacaaatgataaatgtttaaggtgttggatataccaattactatgatttggtcattatacaatgtgtatatatatattgaaatgtcaccttgtacctccaaaatatctacaattatcaggtgtcaatgaaaaaaagcaatcaaacataaactaaaaagttactaaaattaaacataaaaatcacatratgacagcatggcttaagaagatgcaagttgaggaggagcaagatggcagaataaaaggctccaatgatcatcaccccctgcaaggacactgagttagcaactatccacacagaaaaaacaccttcatgagaaccaaaattaggtgagcactatatacctggtttccacttcacatccctgaaagatgcactgaagagatagaaaacacagccctgaatcaccagtgcaacccctcctccacccctggaagtggcagcatggcatggaaaggagagcatatctggacactagggcagggagagcagagcaattgtgaggcattaaacgcagtaccgtcctgttagagcagaaaggaaaactggaccaaactcagctgatgcctacccacagaggaagcatttaaaccagccctagccagaggagcatcatggatcccaatggtcagaatttgagcacctgcaaatcttgccactgaaaactatagcactctgtgtctccaagtaaacttgaaaggcagtttaggccataaatactgcaaatcttaggcaagtactaatgctgaaccaggcccagagacaatggactggtgggggtgtggggaggtggggggatgagacactaattggggcagccaagggagtggtggcatcaccccttccctaaccccaggagcacagctcagggctccaaaagagccatgagccattatcccttccttctgtttgaggagaggaaagaaaagagtgagaaggactttgttttgcatcttggttaccagtgtagccatagcaggataaggcaccaaacacagtcatgaggcccctgtacaaggccctagctctcagaggacatttctagacacaccctgggccagaagtgaaactgctgccttgaagaaaaggacctagtcctgccagcattcattatggtgtaaccgaagagtccttggggcatgaacaaccagcagcaatacctaggtactatgttgagggctttgagtgagcctctgagacttgctggcttctggtaggatgtagcacattacaggctgtagtggctacagggcaaaactccttctgtttgaaaaaagaagaggggaaagtaaagggaactttgtcttgcactttcagtaccaccacagtcacaaaggagcagagcaccaagtgggctcttggagtcctcacttccaggatttgactcttggacagcatttctgggcctgccctgggccagaggggaaccccgtgccctgaagggtgagttctaggccaggcagcattcagaacaggttacttaagaaaacttggtccttaatggaacattggctagttgtctagcagtatgctttgtggcctggggcagtggtggcgggcgagggggtggctacagagtgagattcctctgcctttggaaaggggtggaaagagtgggaagtacttcttcttgtggtttgagtrccagttcagccacaatacaatagaacactatgtagacttctaaggtttttgactctactccctgacttccagacacctctggacccacctggggcctggggtaccttgccacactgaagggaaggacacaggcctgcctggctttgcacttgctaattgtagagtccaagggtcttcagtgarcataggaagtagccagggagtggttttggcaggctttaggtgagacctagctatgtgctgacttcagatctgaccgagcacagtcattgtggaggaggctacaggggtgattgtgtcactctattcctagcttcaggtggctcaaaacagagatagagactctgtgtgtttgggagaaagtaagggaagagaacatgagtttcttcctggtaatccagagaattctctaagattttgtcaaggtggtatctctgtgaatctgaaagaaccccaatattactgagcttggagaggccactcaagtagatacatcttagatctcaacacccaagtcctttcaaatatgttgaaagccttcccaagagaaacagctacaaataaacctagacagtgaagactataatgaatatctaactcttcaatgcccagatgctgagaaacatatactagcaccaacaccacccaggaaaacatgaccttaccaagtgaactaaataaagcatcagggactgatcctggaaaaacagagatatgtgactgttcagaaagggaatgcaaaatagctgtgttgaggaaatctaaagaaattcaggataacacagagaaggaattcagaattctattagataatttaaacaaagaaattgaaacagtgaaaaagaatcaagctgaaattctggagctgaaaaatgtaattggcatactgaaaagtgcatcacagtcctttaataaaacaacggatcaagtagaagaaagactcagtgagcttgaagataagctatttgaaaatacacagtcagaggagacaaaagaaaagatgattaaaaaaaatgaaacatacctaccatatctagaaaatagcatcaaaggaacaaatctaagagtcattggccttaagcaggggttatagaaagagataggggtagaaagtttattcaaagagataatataacagagaacttttcaaacctacagaagtatatcaatatccaagtacaacaggattatggaatgccaagccaagcacatttaacccaaagaagactacctgaaaacatttaataaccaaactcccaatagtcaaggatagagaaaggattctaaaagcagcaagagaaaagaaacaaataacactcaatggagcactaatatatctggcaacagactttttagtagagaccttactgaccaggagagagtggcatgatatatttaaagtgctgaaggacaaaaaaaacttttaccctggaatattatatcctgtaaaaaaatcctttaaacatgaagaagaaattaagactttcccaggcaaatagaagctgagggatttcattaatatcagacctgtcctatgagaaacgctaaagagagtacttctgtcaaaaaactgacattaatgagcaataaataatcacctgaaggtgcaaaacttaccagtaatagtaagcacacagaaaaacacaaaatgttataacaccgtaactgtgatgtacaaactacattatcctaagtagaaagactaaatgataaaccaatcaaaaataataactacaaaaacttctcaagacacagacagtgcagtaagatatacacagaaacaacaaaaaattaaaaagcttgtggatgaagttaaggcatggagttttctttcatttgctttttgcttgtttgttagtttggtttggcaaagagtgtcaagttgttaaccagttaaagtaatgggttataaaatagtacttgcaagcctcatggtaaccccagaccaatatcatatagcgtaacacaaaaaataagcagcaaaaaactaaatcatatccctagagaaaatcaccttcactacaggaaaacagaaaggaaagaaggaaggaagagaagatgacaaaacaaccagaaaaaaaaatggcaggagtaattccttacatatcagtaataacattgaatgtaaatggactaaactttccaatcaaaagacatagacaggctgaatgaataaaaaaaacaagaaccaataatccgttgcctgcaagaaacacacttcacctgtatagacacaaatagactgaaaacaaatacatgaaaaaatatattccatgacaatggaaacaaaaaaagagcaggagtccaacaggccccagtgtgtgatgtcccccttcctgtgtccaagtgttctcattgttcaattcccacctatgggagagaacatgcgatgtttggttttttgtccttgcgatagtttgctgagaatgatggtttccagcttcatccatgtccctacaaaggacatgaactcatcattttttatggctgcatagtattccatgatgtatatgtgccattttattctacatacttttataatgctgaaaaaaattatattgatggatgaataaacttactaaacacatggaaatattgaggatataattaggaacacaatgaatacatttgaaattaaataaaaagattagccttatataatatttttagaatgtaatttttttcaattttagttttttagtttttatgggtacatagtagttatacatatttatgtgatatgggatatgttgatacagtcatatgatgtataataatcacatcagggtaaatgagatatccatcacctggagcatttatcctttgttacaaataatccaactatacccttttagttattgtaaaatgtagaattaaattattattgattatagtcaccctgttgtattgccaaatattgatctattcattctttctatgtttttgtacccattaatcaccaactgttccttttacactccttactacccttcccagcctctggtaaccatccttctactctctctatgagttcaattgttttaatttttagctcccgtacatacatgaaaacatgtgactttatgtctttctgtgcctgacttatttcacttaacaaaaagacctccagttccatccatgttataaatgacaaaatctcattcctctttatggctgaatactactccattgtgtatacatacctgacacttaggttgcttcaaaatcttagctattgtgaatagtgctgcaataaacctgggagggcagatagttcttcaatacactgattttctttcttttgggtatatacctagcagtaaaattgctggattttatagtaaytctgctttgaggttttttttgagaaaactccaaactcctctcaatagtggttgtactaatttacattcccaccaagagtgtatgagggttcccttttctccacatcgtcaccagcatttgttactgcctgtcttttggttataagccattttaaactgggatgacataatatctcaatgtagttttgatttgcatttctctgatgatcagttaggttaagcactttttcatatacctgtttgccatttgtatgtctttttttaattatacttcaagttttagggtacatgtgcacaacgtgcaggttagttacacatgtatacctgtgccacgttggtgggctgcacccattagctcgtcatttaacgttaggtatatctcctaatgctatccctccccactccttaagaaatgcctattcgtatcctttgcccattttaaaaatcggattattcgattttttctatagagttttttgagctccttatatattctggttattaatcccttgtcaggtggatagtttgcagatattttctcccattctgtggattgtctcttcattttgttgattgtatcctttgctgtgcagaagctttttaacttgatgtgatcccattagtccatgtttgctttggttgcctgtgcttgtagaatattattcaataaatctttgcccaatccgatgtcctagcgagttgctccaatgttttcttttagcagtttcatagcttggtcttagatttgtctttaatccattttgatttgatttttgtgtacggcgagagatagtggtctagttttatccttttacatatggatatccagtttacccagcaccatttattaaagagactttcctttcctcaatgtatgttgttggaaactttttcaaaaaagacttcactgtagatgcatggatttgtttctgggtttttctattttgttccatgggtctatgtgtctgtttttatgccagtactatgtttttttaggtaattatagctctgtagtataatgtgaagtcagataatgtcagttctctagttttgttacttttgttcagaattgctttttctgttctgggtcttttgcagttctatattaattttaggaggcttttcttgtattcctgtaaagaatgtcactgatattttgataggtattacaaggaatatgtagatggatttgggttgtatgggcattttaacaatattgattcttccaattcatgaacatggaatatctttccattttttgtgccctcttcaattagttttatcagtgttttatagttttcattgtaaaaatctttcacttctttggttcaattaatttctatgtatttaattttattcatagctttttaaaatggggttactctcttgatttcttcttcagattgttcgctgttggcatatgggagtgttactgatttttgtatgtggattttgtatcctgaaactgtactgaatttgcttatcagttccaatattttttaaggaaaataggttgtttaggttttttcaaatataaaatcatatcatcttcaaacaagaataatttgatttcttccttttcagtttcgatgccctttatatctctcatgtctgactgctctagctaggacttccagtactacattaaataatagtcatgacagtgggcatctttgtcgtattacagatcttagaggaaaggctttcagttttcccccatccagtatgacattagctgtgggtctgtcatatatgccttttattgtgttgaggtatgttccttctaaccccagtttcttgagggtttttctcatgaaggaatattgaattttatcaaatgcaatttcagtatcaattgaaatgatcatatggtttttattcttcattctgtttatatgatgtgccacattgactgattttcatatgttgaaacatccttgcatcccttagataaatctcacttcgtcatattgaataatctttttaatgtgctgttgaattttgtttgctagtatttggttgaggttgcttgcatcaatgttcgtcaggaatattggagtgtagttcgttttttttttcaatgcctttatgactggttttggtatatgagtaataccggccttataaaatgagtttaaaagaattccctcctcttctatttataggatgatatggtttggctctgtgtccccacccatatctcacctcgaattgtaatccccataatcgccacataggcaggaccaggtggaggtaattggatcatgggggtggttctcccattgctgttctcatggcagtgagtgagttcttgtgagatctgatggttttataagcatctggcatttcccctatttgcactcattctctctcctgccaccctgtgaagaagtgcctactgtcataattctaagtttcccggggccttcccagtcaatcagaactgtgagtattaaacccctctcccttataagttatccagtctcagatatttccttatagcaacatgagaatggacaaatacagtaaattgataccatgaagagtgggatgctattataaagatacccgaaaatgttgaagtgactttggaactgggtaacaggcagaagttggaacagtttggaggactcagaagaagacaggaaaatatgggaaagtttggaaactcctagagacttattgaatggctttaaccaaaatgctgatagtgatatggacaatgaagtccaggctgaggtggtctcaggagacaagaaacttgctggggactggagtaaatgtcattcttgctatgctttagcaaagagactggaggcttttttcccctgccctagagatctgtggaactttgaacttaagagagatgatttagaatatctggtgggagaaatttctaagaagcaaagcttagaaattcaagaggtgacagagcataaaagtttagaaaacttgcagcctgacaatgcagtagaaaacaaaaatcccattttctggggagaaattcaagctggctgcagaaatttggataagtaagaggagycaaataccaatcaccaagacagtggggaaaatgtcttcagagcatgtcagagaccttcacagcagcccctcccgttacaggcctggaggcctaggagggaaaaatggttttctgggatgccctctcccctgttgtgtacagcctcagagcttggcgctctgtgccccagctgctccagccatggctaaacagggccaaggtacagctcaggctgttgcttcagagggtgcaagcctcaagccttggcagctttcatgtggtgttggtcctacaggtgcacagaggacaagaattgaggtttgggatcctctgcctagatttcagatgatgtatggaaacacctggaagtccaggctgaactcttctgcaagggcagagccccttgtggagaacctctgatagggaagtgtggaagggaaatgtggggttggagccttcacatggagtccccacaggggcactgcctagtggagctgtgagatgagagccaccatcctcctgaccccagaaagccagatctaccaacagcttgtactgtgtgcctggaaaatcagcagacactcaacactagccagtgaaagcagccaggagtggggctgtaccttgaaaagccacaggggtggaggtgcccaaggctggggatgggccaccttttgcatcagcatgacctggatgtgagacatggrgtcaaaagaattttaaggtttaataactgccttattaaatctcacacttgctgccttattaaattgtgctacttgcctgtagcccctttattttggcccatttcttccacttggaatgggagcatttacccaatgcctgtttccccattgtatctaggaagtacctagcttgcttttgattttacaggctcataggcagaagggacttcccttgtttcagatgaactttggactgtgaacttttgagttagtgctgaaattaagaatttgggagactgttgggaaggcatgatttgttttgaactgtgaaaagacatgagatttgggagggtccagggtggaattatatggtttgactctgtgtccccacgcaaatctcaccttgaattgtaatctctgtaatccctacatatcaatggtgggacctggtggaggtaattggaccatggaggcagttacctccatgctctcctcatgatagtaagttctcatgagagctgatggttttataagtgtctggcatttcctctgcttgcattcactctctctcctgccgccctgtaaagaagtgccttccgttataattgtgaagttttctgaggcctcccagccacataaaaatgcaagtcaatgaaacctctttcttttgtaagttactcagtcttggatattttcttgtatcaatgtgagaatggattaatacatagaaatagtttgagtagggttggtattagtacttctttaaatgattggtagaattcagcagtgaagccataggattctggggtattctttactgggagactttttattacagcttcaatctcattaattattattgatctgttcaggttttttatttcttcctggttcaatcatgggaggctgtatgtgtctaagaacttattcttttcttctagattttccaatttattggcatatagttgttcataatagcctacaatggtcctttgaatttctgtggtatcagttgtaatgtttcctttttcagctgtgattttaattatttgtgccttctctatttttgttgttattctggctaaaggtttgtgaatttttttttattttttcaaaaaaaacaagttttatctcactaatctttggtattgtttttatttcaatttcacttatttctgctctaatatttattatttctttgcttctactaactttgggtccagtttgctcttgcttttctagttccttaatatacattgataggttgtttatttcaagtttttcttttttagatgcaggcacttgtagctataaacctctcttattacagtttttgctctgycccataggttttggtatgttctgtttccttatcatttgtttcaataaatttttcaatttccttcctcatctcttcattgacttactagacattcaggagaatattgttttctttctaagtatttatatagtttccagaattcctcttgttattgatctatacttgtattcaattgtggccagagaaaatgtttcaattttttgaaagctttgagacttgttttgtggcctaacatatcatccattctttagaatgatccatttgctgagaagaatgtgtattctgcagttgttgaatgaaatgttctgtaaatatgtatgatgttcatttgctctatagtgcagattaagtccaatgtttctttgcttattttctgtttggaagatctgaccaatgcagaaagtggggtgctgaagtctccagctattattatattggggtctatctctctctttaaccttaacaagatttgctttatatatctgagtacctcagtgttgggtgcataaatatttaaagttgttatatcctcttgctgaattgacccctttgtcataaaatgaacttgtcttttttaatagcttttatcttaaattctattttatctgatagaagtgtagctactcctgttctttcttgatttccatcagcatggaatatctttttatatcccttcattttcaatctaagtgtgtctctattggtgaagtgtgtttcttgtagataatggtttgttggctcttgctttttataatccattcaacctgtttgtgtcttttgattggagagtttattccattggcattcaatgttactattgataagtaaaaacttgctccttccatttttgttagttttttgcttggtttttgatctcctcctcctttccttccttcttgtctttttttttagtgaaggtaattttctcttgtggcttgttttaatttattgcttttaattttttgtgtattcattgtatgtttttcaatttggggttaccacaaggcttgcaaatactatcctataacccattattttaaactgaccacaacttaacactgattgcataaaaaaacaacaagcaagcaaaaagaaaactaaagaaaactctacactttaatttcatcctcttgcttttaaactttttgtcttttcaatttaaaccttaatgtactgtgtcttgaaaagttgtagttattttttatcatttcattttttcatctttctactgaaggtatcaggagtctatataccaaaattacagtgttataatattctgtttttctgtgtactgactattgccaatgagttttgaaccttcacttgatttcatattgctcattaatgttcttttctttcagtttgaagaactccctttagcatttctcataggagaggtctggtgttgatgaaatctctcagcttttgtttrtctgggaaagtctttatttctccttcatgtttggaggatatttttgccagatgtactattccagagtaaagttttattttttttccttcagcactttaaatatgtcatgcaaatctcatctggcctataaagtttccactaaaaagtctgctgccaggtgtattggagctccgctttatgttacttgtttcttttttctcgctgcttttcgactcctttacttatccttgacctttaggagtttgattattaaatgccttgagttaatcttctttgggttaaatattcttggttttctataaccttcttgtactcaaatattggtcttctataacttttttgcattaaatatctttctctatgttggtgaagttatctgttattatccttttgaataaactttctacctagatctttctacctcctcttgaaaaccaataattcttagatttctccttttaaggctattttctagatcgtgtaggcatgatgtattcttcagtaggtcacttccatttttcagctccaaaatttctacttgattctttttaattatttcaatttctttgttaaatttatctgttagaattctgaatcccttctttatgttaccttgaatttctttaagttttctcagaatagcttgtattagttaattctcaagccagtataaataactacctgagactgggtaatttataaagaaaagagatttcattgactcagagtccctcgggctgtacaggaagtatggctctggaggcctcaggaaacttacgattatgatggaaagtgaaggggaaactggcacatcctacatggcctgcaggaggaagagagagagaaaggggaggggctacacactttcaaatgaccagatctcatgagaactctatcatgagaagagaaagagggaagtctgtacccatgattcagtcaccttccagcaagccctttatccaacactgggaatgacaatttgacatgagatttaggtgggaatacagagctaaatgttgtcacagctattttgaattatctgtgtggaaggtaacatatgtttgtctctccagaatttgtttctgatttcttatttagtttgtttggtgaggtcatgttttcctggatcgtcttgatgcttgtgattgttagttggtgtctggccattgaagagttcagtattttattatagtcttttcagtctgaacttttttgtaactgttcttctttggaaggctttccaggtattcaaaaggacttgggtgttggaatttaagtttttgttcactacagttgtatctgcattagggggtactccaagtccagtaatgctgyggttcttaccaattggcagaggtatcaccctggtgatcttggataagatctggaagaattctctggattaccaggaagagacttttgcactcttcctttactttttcccaaacaaacctagtctctctctgtgatgaacacccagagctgggggatgggtgacacatcactcctgtggccaccagcactggaactgtcctggatcaaacctgaagtcagcgcatgccagagtcaaacccatgtcccatggtgagtactgcataagtactgctgctgattttcagggaccaagggctctttagtcatcaggtggtaataaatcctgcaggattgggtccttccttgcaagggagcaagtgtccagaaatgtcatccaggagctagggcctggaatgtgggtcttatgactctgtcccgtgccctctcctaccgtggctgagctggtatccaatttgcaagacaaagtcctctttactcttctttctgttatcctcaagttgaagaaactggtctcttttggagctgtgaatcatgccctgatgttggggaatggtgatgcaaaaactcccttagcttcctctgctggtgtctcattagggctcatgcccaccaagtccactggctccaagcacagcacagcactagtgcttgcataggagttgcagtcactgtggcctagacagtctttcaagtttatttagaactccagagcactttagcctgtggtggtgaggcttgacaaaactctagtactggctgatgagatgggtgatttccctctggctagggctaatctaaatgctccccccatgggcattgactgagttccaaccagtgtttgcagcactgagttctaatgcaaggacccacaattgctgcactttctcccctaagtgcacacattccctctgtgtgccacacggctgctgccagggagtggggaggggtggcattggcaattcaagactgtctttcctaccctcttcagggcctcttccagtgatatgaagttaaatctaggtacttcaatcacttgtctgatttttggtgcttatgaaggtgcttttttaatgaagatattaacagctgttaaattcggtattcctgtggggaggatgatcagtggtggcttctattcagccatcttgctctgcttcccattttatataacattttatcaaaataaacatcagtaagaaaaagtcccttgatcttgctatacattaagaacaatgttgttcatatctcggttggcaaaattccacttcagcagctatgacaaaatacaggcgtcagaattactatgaattttagtgttgcaaataaggcattcttagtctatgttttgaaaaataatcaatattattgtagcatattacattagaatagtgatagattagaaaatatattattctgtrtaatatctaacacatttaattcttggccaatcctttggaataaatttcttctggagcagtattattaattatgtccgtatcagtcatttgtgctgcttagtattctgtagtgagctagtgaacctcattgaaggaggttcactttccctcgggattataaatttcattagaaactaacagcaattaagctacgtctgagagaagttagtgacatctgtattgaaataatggatccagtaagatatctcccttaacctaccatggttaagcagagagaaggatgatgaggaaacaagaactgtgttttggctgtttccttccacacatacatatccaattctatacataatttgatgctgtaatatataagagtaaaatgcctttttatatttctgattcaagcaagcacatgttttcactatatggcattttgtgtgtgcgtgtgtgtgttattagtttttctgctattctaaattggaggacttgataatttatttcatcacaaagggagtcatttatttatatctactctcaaattatatcagagagaatttaaaatactttggcatctccatattttatatgaaatgtttctaaattaataagagttcagattattggtgctgatgactgaaagcacacatgattttggaaacaagttaaatgtagacaaggcttatctttaaatgtaaataaagaaataactacttaaatatcattctgcagtattctagtcaggatattaaaatgaggtcagttttattagcgggtgatgtatcatactcttgtgctttagaatacttgggtcctgtgaagcttgagtttaaaaaattctattttgaatcctctagaaagcaattaatgtcaaattcctaagtcaccttaataatagagcaaaggagagtgaccatcctaggccctttgcatggtgacagcctggaactgtgtgttagtgagggagaaatgacttcaccaaatgacattgagcaactttagaggcaaaggtggatatacagccttaaggcttacacagtttgggaaggcttttttaagaaaaagaatacaaaactgaaaatacaatattacatgtaaaagcaaatatttcttttgaatgaggaaaaaaaatcacaataaattaaacaaatgttaataaataccacaaacaatataaaaaatccagaaaaataacctatatttgtatctgacatatctttattgtaatttttcctacactttttagtgcatactctggttgcctctttatttgaaaacaatgtagcaataccattttcaattaaagaacataagtattgtgagtcttgaaattagattttaaaagcattccatacatcgtccgttggttgggtgatggcacatatcatatccaaaaggacagcaacccatatttaaggaattgcatgccagctggtaccataatgagttctcaacagaccattctactgcttggtttttctgggtgataagatacgtgaaacatcagtgaattgtgagtagagctcattgctgcactttctaggcaataaaggtatcccagttggatgtgatgttgaatgagatatcacaacaatgaagatggttttctgtaagtctacaaatggttactggatagaaaccctgcagacagaaaagacatttccatatccagaacagctgcatactatgagccagatgctgtgctaattttctgtaataaagataccatattctgagctacatctgtgattaggattacctctgattatgttgtcaataacccactgtcattctcccagaacgtgttggcctctgcaccagccaaatgggcaagttaaatggtaaaaactctacccagagatgttcagttcttagatggtagcactgatctctttaatacagctaaggacatggtgttggttttgacttactgctttggtgaaggggttggacaggggtttgattggaggaactttcacttgatcattcatatcataatagcaatgaatcagggaaccaacctaaagtttctgtcttttaccaatgacaatagctactcgcccccactgaccccttactgtggaggataccttccaaggcccacactatatacctgaaaccatggatagttccaaaccccatatacagtcatgttctgcatgacaatattttggttaatgagggaccacatatatgacgcagtcctataggactgtaatggtcagctacattgcaaatttcctaccgcctggtatttgctacactgtactttttattgctactttagagtgtattccttctccttattaaaaactgaagttaattgtaaaacagcctcaggcagttccttcaggagtattcgtctgggaggcattgctgtcataggaaatgacagtccatgagtgctgttgcccctgaggaccttccaatgggacaagatgtggagttagaagacagtgatgatgatcctgaccctgtgtgggcttaggctaatatgtgtacttgagtctgaattttcaacaacaataaaaaattaaatacagaaaaaactgtatagaaaaagcatatagaggaagaaaatattttttatagttgtacaatgtgtttgtgttttaagctaaatattattacaagagtcaaaagttaaaatttaaaaagtatataaagtagaaaacattgcagtaactaaggataatttattattgaagaaaattttttcataaatttaatgtaggttaagtgtccagtgtttatcaagtctacattattgtacaataatgtcctaggccttcacattcactcaccactctctcacttgctcatcctgagcaactttcagtcctgaaaccttcatttatagtaagtgccctatacaggggtaccatttatatatagatagattttttgagacagggtctcagtctgtcacccaggctggagtgcagtagcatgatctcggctcactgcaacctctgcctcctgggttcaagttattctcatgcctcagcctcccaagtagtcaggattacaggtgcacgccaccatgcctggctcctttttttttttttttttgtatttttggtagagacagggtttcaccatgttggccaggctggtcttgaactcctgacctcaaatgatccgcctacctgggcctctcaaagtgttggaattacaggtgtgagccacctcgcccagcctccatttttgtattttgtaccatatttttactgtaccttttctatgtttagatgtattttgatacacaaataccattgtgatacagttgcctacaatattcagtacagtgacaagctgtacaggtttgcagtctacgagcaataggctatactacatagcctaggtgtgtagtaggctatattatctaggtttctgtaagtactttgtggtgttcacaaaactacaaaatcacataatgatgcatttcttagaacatgtccctattgttttcactcaagagaaatgaaggtatatgtccattcaaaaacttgtacatgaatgttcatatcagtttaatttgtaatagcccacaaactggaatcaatcgaaatattcatcaacaggtgaatggataaacaaatcatggcatatttatgtagtggaattctatttagcattgaactattgatagaagcaataacgtgaatgaatcttaaaatgattatgctgactgaaagaaactatacacaaaatggtatgtactgtatgattccatttatagaaaattctagaaaacgcaaacaaacgtataataacggaaagtagatcagtggttgccttagtattaagcaggagggaccggaatgagcgtttacaaagggatacatggtaactttaaaatatgatgtgtattttcattatcttgattatagtgatggtttcatgggtatgtacatttgtcaaaatattacactgtgcattttaaatatgcacactttatgcatattaactgtactccaataaatatatttgaaacatttccatcttttaatttattattattatttttctttttcaacttttattttagattcaggggatatatatacaagtttgttacctgaatatattacatgatgctgactccaaactttggagtttattctcagtacccatcacccaagtactgagaataaaaagaaatatttaaacaaaactaaatttaaacctagactttgactcactacatcagaaaatgttaaaattaagattttaattttaatgagccttcagaaagggtttacagcttctcagctagttttcactcctcagttcacaagctttaaatttctcaaataaagtggagaacacgttttacagccagtcccaagccttccctaaagagacctatggccattaactagagcagctgtaaaatgggaacaggaaaatgtccagggctcccaggaattattagatactgactggatagacattaatacttggagactcataatgacacatcagtacgattatcagagtggaagtttatgaaggacaagatctaatggaacagattgaccttggccaaatctatctcacagttggtctaatgagactgagacctattctatagctatttctgcagaaccagaatgattaggaaagaaatatacagtagttacctcttattgtggttttgccttctgtggcttcagttacccacagtcaaccacagtccaaaaatagatgagtactgtataataagatgttgtgtgtgtgtgtgtgtgtgtgtgtgtgtgtgtatgtgtgtgacagagagagagattgagatatgacagtaacaatttttattacaatgtattataattttcactttattatttattattgctaacctcttactgtacctaaattataaatttaattttaccataggtatttatttgccatccatttatcttatttggtaaactgtctgttcaaaccttttcccccttttttgtttaagttgttaattttcttattatttgttccaagagttatttatatatttagataaaatttctttatcctatgcaatttgcaaatattttaatccactctatttctttttgttcattctcttaacagtgtctttcaaataatagaaagtgtttattttaatgtagttcaagttgtcatttttttaaatctttgaatcatgtttttggtgttgaatcaaaaaaatctttgccttaccctaggtcaaaaagattttctcacatgttttcttccagcagttagtctgtgatccattttgagttaatttttgtatataaagtatggattaacgttctgtttttaaaaaataggaacattttttcagcattattttctgaaaaaaaaactttgtccaataaattgcttttgcacttttgtgaaaaataagttgtccttatatgcatgagtttatttctgaactttgtacaggtcccacaaatctatttgtcaattttgaggttaataatatgctatcttgattactgcagctttacaagttttgaaaactggtagtactagtcctccaactttgttctttttaaaggttgctttgctgttctaagtctcccccattttcctatgaacttgagaatcagcttgttaatttctataaaagcctgctgcagtttgattgagactgccttgaatctgtaaattaacttgggaaaggattgaaatcttgacaatattgactcttccaatacataaacactgttaagaatttaaaaaataatttttggatttttttgcacctatgctcctgaaggatattgtaatatagtttattttcttgtaatgtcattgtgtggttatggtatcagagtaactttgttatagcacaatttgcgatgaagttccatttatattctgaaggagtttgtatagaattggtattatatctttcttaaatgtttgcatgaatctaccagtgaagccatccaggcctataattttcttatttggaagccttgtaattaaaattctaatctcttttataggtataggtctatgcaaggtatctatttttccttgaatgaacttattattattttaatttctcttttatttctgatatgataatttgtgtcttcttctttttcctgatcggtttggctagatgtttataaatattgttgatcttcagaataaaccaactttaggttttattgattttacctattgtttttccatttaaaaaattgatttctgctcaagcctttattatttcttttcttttgctttgggtttaatttgatcttttagtttcttaaagcaggagctgagttcatttatttggtttttgttctttttaaatataggtgtttagtgctataaagttttcccttgttattggttgagatcaagatttctcgatagaggtactattgacattttggggctagatactgctttattatggggagctatcctgtgcattgtaggaggtttagcagaatctctgattccttcctactagatgccagtagcatctctcctcttccccaccattatgacaatcaaaatgtctatagacattactaaatgtcccctgaaagcaagtgggcaaaattacccaagccgagaatcactgatttaggtgcatctcatgaatgttggtatattgtgttttcatttatgtttagctcaaaatactttataatttctgcctttgatttttttcttgatccatgggcttatttacaaacatttgagtacttttccagagatcttcctgttctgttattagtttttttatttaagtcattgtgcccagagaaagtattttttctgacctaaatctttttaactttatcaaaggttaggcccaaaatatggtctattgtagtaaatattccttgtgcacttgaaaataaagtgtattctgttgctgttaggtggaatatcatatagacgtcaaataggtcaagttggttggtagtgttattcaagtcttctatatacttatgttgtctatagttctagtagctattgagaaagtggtgttgacgtctcaaacaataattatagatatgtctatttctcctaacaattttatcaatcttttttcatgtatacaaagctctgttattagggatacaaaaacttaggattgttatgttctctgggtagattgagctttttacaattgtgaaatgactctatccatgttaatatttgctctgaaacatattctgcctgatactagcatagccatgcccatctctttggattagtgtacgcatggtatatcttttcctatccttttacttttaacctactctgtctttatttttgaagtgtttctcacagaaaacatacagataggttttgcttttttttttatcaaacctgtcaatcttcacattttaatgggtatttacataaatccaatttaataagattattaatatggttgggtttaaatgtatgatcttattttatctttggtttatctgttctttgtttccattttatccctttcttatcttcctttggataaatcataaatttctataatttgagtttatctactttttgacttattagctataattctttttgtattactttactggttggtttaaggtttatagtatacatctttatcttatcacagtccttttttctgataacatcatactacttcatgtatagtataagaaacttatagtagcagtatactttcatttttcttttcccatccttgtgttacatattttatttgtacatattttattaccagtacattgtaattatttttgtttaaatagtctattactctttaaggacatgtaaataataaggaaacaatcttatagatttccctgcataggtaccatttccagtgctcttcgtatctttgtgtagacccacatttccatctgctgtaattttaattcttcctaaaggactttcttgaatatttattaaagtttaagtagttgtagataaattctttaaatttttatgtgttaaaaagtctttattttgtcttcattttcaaatatattttatctgggtataaaatttggctggtagtatttttctttcagtactttaaagatttcactccatttatttctcacttaattgtttctaatgagaaatctaccattatgctgattcttgttgttttgtacctaacatgtctcacttctcaggctgcttttagaattttctatttatcattggttttgagcagtttgcacatgatgtattttggtgtgattttcttcatatctctcaacatatacttagtatttattgagattattggatccgtgcatttatattatatatttcttcagatttggaagaaaaacttatccatatttcatcttatatttcttctcctccctcccatctcctttgaggactccaattacatgactattaggcttcttgaaattgttccacagagcagtgatgcttttttccttttctaatctgtttcatttcaggaagtttctattactatgtctttaaattcagtaatattttttcagcaatatctaatctgttgtttctcctatctagtttagttttcactatgggtattattgcttccatttccaaggactttacttgggtcttttaaaaagtatctttcatgtttctacttaacttttcaacatatggaatacagttataataaatgttagatgttgtctgctaactaaaacttctgacggttctggatcagcttcactaaattgatttttgtcttttgcatggattgcaacctgcttctttaggtgttaagtaatttttgaatgggcatcagaaatgataaactttacattattgggtagtgtatattttgtgttgtgacatatattcttgaatttagttctgtgatacagttaagttagtgcaaaacagctcatcctgttgagacagtttttgatttggcaggtggaacctgagcacactaattattcaccttcctgaggcaagactctttttgagtcctctaacmaatgcactggtatttatgaagttttccaggctggctggtggaaactagcactgttcccagtcctgtatgagcactggctgttgttctctctaatcctttcaggtggttcttccctggaactgggtartttcctcacatacatgcactaatgagcattctacttatcgcttgaggatgtatcctctgcaggtctttggggtcctctcactttgtagctttctcttttctgctactctgctttgcaaagtctagccaccttggattttatggactctcagcttattccctcaattcagggagttcacttgactctgtccatgtttcccctccttaagttgctgcctggaatttctctgaaggcagtaagctggaatccactgaggcttatcttatttgtttcccatttgtcatggatcactgttttttgttgcctgatgtccaatgtcatgaaaatcttggttttatttattttctctggtttttccccccatttcaagtaggatggtaaatctgttttccattagtccatttttggaagaagtggaagtttctcatttctgttcattttagaaattgattgtaatggctatcatatcttttaaaatatcctcaaatatttagagaactaaataaatgaagtacagagttgtctatgcttattgtattatgatactgatttttatattccacccatcaattacacaaaggttttcgttaaaattcagttattgtatttctattttccctgatgttgatcactcttgaaaataagtagtaatatgttgtatttctatttttaaaaatattcaaaatccatcaaaactatttgggatatttttgatataggttaaataataaatttatggctgtatttttaagcatgcagatatgagagttttcgtaagtgacatgattttcagcaacaaaatcacatagtgatccaaacattagctgatagcagttctcaaatatattttgcatgacaagtccctttaaaaacaggtaggttctgatttgcatttctctgatggccagtgatgatgagcattttttcatgtgttttttggctgcataaatgtcttcttttgagaagtgtctgttcatgtccttcacccactttttgatggggttgtttgtttttttcttgtaaatttgtttgagttcattgtagattctggatattagccctttgtcagatgagtaggttgcgaaaattttctcccaatttgcaggttgcctgttcactctgatggtagtttcttttgctgtgcagaagctctttagtttaattagatcccatttgtcagttttgtcttttgttgccattgcttttggtgttttggacatgaagtccttgcccatgcctatgtcctgaatggtaatgcctaggttttcttctagggtttttatggttttaggtctaacgtttaaatctttaatccatcttgaattgatttttgtataaggtgtaaggaagggatccagtttcagctttctacataccatctcacaccagttagaatggcaatcattaaaaaagtcaggaaacaacaggtgctggagaggatgtggagaaataggaacacttttacactgttggtgggactgtaaactagttcaaccattgtggaagtcagtgtggcgattcctcagggatctagaactagaaataccatttgacccagccatcccattactgggtatatacccaaatgactataaatcatgctgctataaagacacatgcacacgtatgtttgttgcggcattattcacaatagcaaagacttggaaccaacccagatgtccaacaatgatagactggattaagaaaatgtggcacatatacaccatgggaatactatgcagccataaaaaatgatgagttcatgtcctttgtagggacatggatgaaattggaaatcatcgttctcagtaaactatcgcaagaacaaaaaaccaaacactgcatattctcactcataggtgggaattgaacaatgagatcacatggacacaggaaggggaatatcacactctggggactgtggtggggtggggggaggggggagggatagcattgggagatatacctaatgctagatgacgagttagtgggtgcagcgcaccagcatggcacatgtatacatatgtaactaacctgcacaatgtgcacatgtaccctaaaacttaaagtataataaaaaaaaaacaaaaaaaaaacaggtaggttctcactctttgttaaaaaaaactcacctttaccttgaaggaatagattatatatttattttgagaaatatatcttctgggtagcacattactgaaaatcactagttctccctgaacaggtcagcaaattgggcttaatgcagcttgaaacatcactggaaaaaaattgtaaatgtttgtgtgcgttctctggatgctcagatcccaaacgtctcactaatcatgatggctccacattatcatttgcaaacatttcaaagcagcaaacacacctagcatgagattcaaacagcctggataatttcaaatcattttggcttacttcctgtcttatctaattacatcctcattgttttcaaccttttgatgtgcttataaagagatcaaattagaaatggaagtttctgccaatttttctttgtctgtgaattattggtattatgtttagtccatgttttttgcaagatggcatgaagtctatggcatgaagccagcactgacccctcctctatacttagaatttctgcctttctcccagcatgccttggtgaccatatgtgacacttgcttcttttccatatgaatacattaggacaccagtataaatccatatatgatgtgttagaaaagcttactttcttattttttaaatttaaaatatataattaaaagttcttatattttggtccacattccaccatggagagaggattggcttggctttaaggtataatgtctcttgttgatacactcagctaaattagagagctacaagaaaggacagaattagactcctaaggctatagctattgagtaatggaagcagacagatcactcaggcaactactgtcacaataacgagcctttaagaagaaaaccttctgagaatgaagggacatatagggattgcacttaaaaaaattaaactcatgtaactactactggaatatataaccaaatctcttgtaaaagaaaactccttgccagttaaagaataagaccaaattgatgtactttcctgcatcagagaaatcctatacccagtaccaggaaattctatgcacagatatattaatcgatacattaatggagctgaagttctgctgtcagcagatcttgtcattcaatgaagcatgtccaggtggataaaaacatgaagaattactttctaaagaacaggttttagttttggaaagaattttatgacagttaagtaggtttttttaataccaagcttgcactcatttccctgatttagaggtgcaatgtttctgtagtgtctaattttaaacttgtcctgtcaggtttgaaatgtatgattttggcaacctttgcaactgtgcaaagcatgtatttcaagatactgtggtctttargcttctacttcctcagtactagattgttcccaaaagaatgtatgaaggatgaatggatcagaaaagacattacgctggagatgagaatcaaaatcctgactctaaagtattttgttgacagttggctttttaccttccacattgaaatactctttgtgagggtcatgcggtttaactcattgctacaacttggaggaaaatgtgcaatgtcaagcattcctgtatggtccaaaacytgccataatggctgccaatggctcttccttttctgaaaggagtatctgagtttcatgatgtcagataatcatccttgcaataggaaattcaagtttctggaagctcctctttccttgcaagtcactgtcaattcaatcattgagtaaagtgttcctgtgtgacaggagcagattagcagatgatcccagaaaaatctaagcactgaagatagaatgctaaggattttttaattatttctttattttaaaaaattgatacttctttcctctttttacgtcatgtttcactcatcccccttagaactattggcaagatcatgggctaagagaaaatttaaaagtatttattgaatttagaaacatcagcaagaatttattctaccttcaatatgagatagctctgtagcagtactataaagtagaataacagattttacaaaccatgcttttcattttatgatgtttttaaagatgtggttcatgtacatataattcatggtgaaagatggaataattttaagttatacatagattaatgcccatatgtaaatgtatatacacacattatttcactgtgtaattggtaaatctcattagtgcctcaaaatcagggttgcagaattatgatttttttagggtaaggctagttttttgaaaaaggagttagtttgaaaactacttacaaacaactgttaggtaaatagctgtataagcaatatgcaaatatgggaaaataatgtaggcagtgtgtatgaatagctgagattggggaaactgcattgtattgctctggtggcgtgtgtttactataaggtctttgctgacaaggattttacatgctgttttaggccagggttctgagaagcagagcctgaggcagggatttttgtccaggtgaattactgagggaacactttcaggacaaagctataggggaggaagggaagcaagatagggcaagataagctaggtaaatcaaggttttaggagaatattagcttcagactgatcccccaaggaattttgatgtttaaatgcaataaaaagtttgcgttgcccatgggtgaggtggctgaactgttgtaacctcacttcagtctgccacaggccataggacacttgtgggattagtacaatttttccagtcatgtcctggtaaggtggcaatcctctggaacagtcacagcgactggttgatgagtgcactggcctggtaagggaatctggacaggacaccaggagtgtctgcaatgcaattttaggagaaaaaaaatactcaaaagaatagtaaacaccccaaatacactgagatcgccaactgttagctcttaattcaggaggactttggagccaactagcaacaatgatatgtcatttgtgggaattcctggcagcaatccttagggtcatcttaaccctctccatgatgttttcacgttttctatgccagccttcctgggcctgatgcatcaggtgacattcactgtgtagtaacctgctggaggtcggagactggccttatctgatggatacctgccctgggtgttccatgtatgtggtcctactagctttatgcactctcaattccatagagccatcacaaaaaagaaatatttcctcttccttagatagtatatcagacagagattaaatgtacataatcagttagttgtggcaggcacttagaggagagaaagattaggtttcaatttgtgggagacatggcttccggcaatggctggcccactacagggcatgccaattcattgcagttgaccacatatttccgcctaatatcttgtgaacacaaaccggatgcatctgattaagtgctcccagctctggctgtaataagtggctcgctggcagtgtgcctccttccagctattctgggagctgggcttggagctgctgagatttggcatgcgcacctcagaggcttcctcagctgggccaggtgcctggcagcactcctcttcattattttattctgtctccttgtagcttctccccacaaccccacttttccctctaagccatgccttgctcagcagaccttgcctcgctttgttccccatggactctacatatcttcttttggcctggctgcctgatttggagcagtgcagagagccccaagccaggatcagctggagcgccacttgcagtgagcacgtttattaaatttggtcaacgacagccagttcaggtccctggcaagcaagcctgtacaaagtatttcctgttggagatgatgatagatggtttagtgattaacaacacagactctagagccagactcacgcattttggcaatgtcacttattggctatgttgccttgagcaatttactgactttcccatgactcagaaagatcatctataaaatgggaataataatagtatctccttcatagggttgctatgaggattaaatgagttgttgcatataaatgagtatgaataggtcctggcacatagaaaaatgctgatgaaatattagcaacttttattagcattatttatatagctaatgtaatttttattatttaagtatctcacttcttctaagcaactgaaggtctctaatattgtagctgaggaattctcattataactctgtgttattatgttctatcttgtcaataacaaaattgcagcacaaagaaattgaccttgtctcacattaaagtactaattttattcagtaatttaaaaaaatgagtttgacttatttctaataagttggaaagatacacaaaatatataattgaggagcaactgaaaatcagaaaacaatatgcatgatatgatcatatgattccatttcatgttaaaaacatttctatatgtaataatgtatgcggttatagtcatatagacattataatgtggagaaaattattaatctttatgataactggcacagaaattatttttaggaagggatcatctttgctgaaaagaagctttgaaaagacccttgtacatcagaaaagtgcctcagcctgagggctgaagttcaaggggaaggaggcagaggctcagtattataaaggagggcagtgggcaggttcaaggctcggtgcagtgttagggaaggtcaaagagaagcaaattcccaactggtggtggtggtgaaggaagacttagaaaagaattgccatagggtgaagaagacttcagcaaattctgcatcactcctaatgctctgtggagtgaatttcctttgkgtagagtgtagaaaaatgctaccatcagcttccaggttggaaaggggaaaagatggggttcatctggagatggccagcatctgagttacaggtacaggtacatggacatgcatatatgaggatatacacacacagaggcacagacacacacacacatacacagacacagacacacacacacggacacacacacacacgcatcagtcaaaactaggagaccacaacccagcctgctgtgtggttacatgaacaggagtatgggattgtactgtgtaaagagggttcatagtttaaactctctgtctctctctctttctccttatcatgaggagcatgtatatatgtttatataaaaaggcaaacagtgtgtttccatgcctcttggtggaatgcagcatagggcctctatcaatctagctcaggatttctgaggccaggaatccatcaccgttgcctttactgcaggtatgagtgccggggaggagctgggcttctgggatcaaagtgtgtctgtttagctattcagcacggagggccctgctctccgtatattttttgctaactttcttaaatggtccaacagggaagaagaacaactgacattatataatgaacaattctattccaggcacactcccttatgttttcacctttatcatccttattagctcccctagttagttattgcaggatccattttacagatgaaggaattgaagcttagaaagatttagctaatcgctcaaggtcatacaacgagccagtcctgaaatctctgatgaaactcaagtactttttgttgttgtttctaattccagtcccaacttcctcccaccaaatggggtcccaaccttcctacgaataaatgttcaacccccaactccccaggagcacccagtttctaactttttatctgatctcatggccccctattactccttgttgataacccctgcagggcgccctcttcattcttcacatggtttgtaattctgccaattccttttccaatcgctctgtagttttcttttgttttagtctagttatcatatggaatttttctttttctcagtcttttcaagaaatgttctaatggactggctctttcagggtagaatattttttcccctttttccattccttgagacacaattgcttaataaataccggatggacaaatgaatgaacgaatgaatggatatgttagagctgtatcacagtctggggttttctgacaggctgtaccctactggacacttctttgtccctctttttttttttttaactcaaagtgaaaacattctcttttcccccacaaccttttcctttatttccaccttcaaagtttgcttcccttcctttctccgcacgtggtcctgtggaactcccagaagctgtgtgtccacagtagcagcaagacttgctccttctgagaaaggcttagcaaaggaaaacagagtccaggtggttcccaggcctcatccagtgagatagatgagaggcccattaacaaaactagaaccttttccatagctttagcatttgtggatgccagttatattatgtgaatcgctgactcttggtattttaaaactataaaacataagtccttgaaccatattcgtatttcatttatgagagtatgaagtctcttgagaagagagtgtcacgcttaaatcactaccatccattaatcctgatgggaagaggaggccattatctgtgggaatgtgccgaaatcctgccatcttgtggccaactgaaatatgacatttgttagtttttaaaattctgacactgagcgaagaaccgccaagttgccaggaattccttgctttagaatcagtcttcttcatgcactggggaaaaactgaccttccttccagctcatctctttggtgcttagcatcttctcttctggaaaaaaaaaattttcattttttcccaaaagttatttcatccggtggaaggttggattgttaatccatgcagccaaatgactgctactagaaaggatgtgctaggttttctattggatattttgatgtctttgaattttaggaagcaaaaccaatcaatcaatatctcacgtgtgctttccttcacttttctcccgttgcctgactgcgcagatatcagtcaggatcccaacaagcctttagtagacatgagggtaaatgaaagaaaaataggccaggtgtgtaatcctagcaatttgggaggctgaggcaggtggatcacttgaggtcaggagttcaagaccgaacagcctggccaacgtggtgaaaccctgtctgtactaaaaatacaaaaattggctgggtgtagtcccagctactcagaaggctgaggtaggagaatcgcttgaacccaggagagggaggttgcagtgagctgagattgtactactgcactccagcgtgagtgacagagtgagatcctgtcaaaaaaaaaaaaaaaaaaaaaaaggaaaataagtgataagatggtgattcctccatgagactgtgaaagacctatatgaaactccactaggatctcagtagatgtgaaaggcaggcttaatgaggatctcactgactactttaattacatttatcctagtaatgcccaaagaaggaggaggaatctgaaaagccactgccacacacaggtcctgcaaatgtagaaactgaagtcatgtgggaactactgatttaaggtccctgccattacacagatagtacagagaccctgtaaaaacaatgggtttggtacacatttatcataatttgattagaaattttggtcaccgacactgctgtcctaaaagttcagttattattaatttttaaatattgcagttgaataaaaatgagctttttgttctgctagtttttaaagcaaccctaagcacagtcagaggaatacaagtatttctagatgtttcaaattattaacaattattcattccttctttctatgctaataaaaaccaaactcctaagggcaatcatagagactatgaattgttctgggraaactcgttgtcttttttgcagtcatgacactcagaggtaaagtaaaataggatgtgggtgaaatgttttctgtgtgcaggatcatttttaatggtaaggagtaggactgctggtacaggttgtactttgtagtaatgactcattcttataaatcatagttctgtaaacacttgagttgatgtgaaacttttcataaagcaagttttatgaaattagaaggcgtatgccttggttacttctgaaataaagtcctgaggctcctatgtcatgagccctggtgtgctgatgtagattcctgggcctctgccagtcctatcagatcagacaatctggaaatgtggccctggactgcgtttttgacagtcaggtcaggtgattcttgtgcgcaccaatatttgaaaaccattgttctggagttctcaacttagcagagatcttttaaaaatgacgcctagttccacccccgtgaggttctgaattaattggtctggtgtgtggtgtgggcatctggaattttaaaagctcctcaggtgatggtaatgtgcaaccaagtttaacaaccagtgctctaggacagggattggcatttctttctttttttttttttaaaacaaaagggctagatagtagattttttggctttgtatgtaggctttgcagttcctgcaaagagaaaaggagaatgtttccaccagtgaatacacaccttccccaggaacaagcatggaatttgaacacaaaaatttaacttaaattttttttgcacaaatatgaaaaaaattctctgcctccacattaaaagttcactgttgtgaaggtcagtgatttatggcgcacaccctgttcttcagctgtttggattagaaactggactacacaacacccttttcagtttcagttcactttaacctaggtcaaagctgtgtggtgactcccggcagattaaagtttgagggactaatgtgtgggttcccaagtaagtgcccagagactgtggagatttagatggggcccatcttacaactgctttcactttcacacaatgggagatgagaaattaaatacgctttcatcaaaatggactaaatttgaccctccccacaccattgctttgaattgggttaaatcacttatcatctctgagactcagtttcctcaaatgtgaaacaataacatgtctcaggatctttgggagcattccaggggatcaagaagatacagggctgagttcatggttcacatcgataaatattggcttccttcctcggcctccgttagtttttcagagaaatgaaactttgtttcctggtgcgtgcctagtgataaatatattctttatacaaatttttaaattctgcaatgctgtaaagagaccatcatgcccacaagtaaccagctttagtgaatgagctgacttaacaggcacaacctgaacacagtcttatgtttttcttccaactactaccttcgggtttgctctgtcttatttgtcttcatcccttaatgtatcttggtgattccacagttttccagtcccttttaggtattataagaatattacggccgggcgcggtggctcacacctgtaatcccaacactttgggaggccgaggtgggtggatcacgaggtcaggagatcgagaccatcctggctaacacagtgaaaccccgtctctactaaaaatacaaaaaattagcggggcgtggtggcgggcgcctgtagtcccagctactcgggaggctgaggcaggagaatggcgtgaacccgagaggcggagcttgcagtgagccaagatcacgacactgcactccagcctgagtgacagagcgagactccgtctcaaaaaaaaaaaaatatatatatatatatattttttttatatatataactagttatatatatagtagttatatattactatataaaattactagttatatgtaatatatacatatattttatatatatgcgtttatatgtatatatatattttatgtatatataaaattagtaatttttaggtattaaaatgcctcgtcaaataaaaataagacttttatctcccctttagttcaaagcttttctccttctctcagcttagccctactcatggcctggggacatggagtggggaagggaatgtgatcagggccacacctagcacaaaggacacctgaggatcttcggctcccagttaggtgggacaagaggggaattggctggatttcagcagctgcttgggccccctcaccagactcctttgtacaggatggatgcagctgaacgggatgatgtttctggaagcttttgcttgttatttgtgccagctttttcacttctatttccccgaattttattttgcttctgtttccagactgtccaataagaggcttgtagtcttctgaacatggtgattggtttagggactagtcacatgattccgttagggccaatcagaactaattctgggatttatattgaagcacctttaaagatatactccttttttttttttctcctgctgtggttgctcagaagatgaagctactgccaatcattttgctaccacaaacagataccctgaaaataagatcagcgcaaataaaaagcagaactaagagaggaagagagtcttgacaatatcatatcaatactcagatttatacatgtagaagctaagcctccttatacttcctgataatattagttctggttagcacaactttcatggtagcattcactatcatggaatggtattttatatggtaaatgtttgtgtagatgagtgttatatatactcatctaatcctgacaaccactctgttaggtgtgtattaatatcttccattctatagatgagaaatggagtaataaggaggacaccaaagtttgttccaagtcacataggtagtaagtagcagagccacgatgaaaacagaagtctcaagctatgctcctgacctgacatcatattggaggatttaacttggctctaccaatgttgttttgagtgcacacagacacaggacttaggagagagatcagaactcaatgcagagctgaagcactgagaaagctaaaagcaaagtcactctgggataacaggcaaagtaagaacttggcatttttcaggtctattggagaaggcgaaaccttataaaagtattgatgacaaaatctagaagcaattacaattttacatactgagaatcttttacaaatcgtgataaaggttttggtacaagaaaatggggttgcaacacgaactggatcagaacagcatagaaaatctggagaaaattcaatatcacttttaaagcacaggaaaaaacccaaatgcagattggccagtaactaactgagacattttgtctgctatcttatatttttacttgttccggattttatatatatatgtgtgcgtgtgtgtgtgtgtgcagacacatatgtacacacacgtctgtataaaatatatatgtgaaaaaaatgcatatatgtatatatgtataaatatatatatgttcacacacacacatatatatagaaagagtgaggttatgaagtaaattgctcatatatactatatattgtatatgaacaatttgtatatgtatatatactaaataaatgactataactcttattccataataggggtttgatctttggtctttctcaatatatcactaactggatgttaggaaatcccaagttaatgaaatccttctggtattgctatcaaaagactggattgtttattccttgcctgacttttgcagcctaatttaaatacttaatataaacaatattgacagctaatggaatgcaatttcaacagtttctatcattctttagtagaagggtgtaggaatgaattaatttcctatcactgccacaacgcattaccacacatctagtggcaaagaaacaacacagatgtattaacttgcagttctctagattaggagtttgacatgggtctcactgggtgatatggtttggatctgtgtcctcatcaatatctcatgttcgattgcaatctccagtgttggaggtggagcctggtgggaggtgattggatcatgggggcagtttctcatgaatgggttggtaccatcccctccatgaacctccctgcaactctcttcctcctgctctagccatgtgagacatgcctgcttccccttcgccttccaccatcattgttagtttcctgagacctccccagaagtggagcagatgctgttacgcttcctgtacagcctgcagaaacatgagccacttaaacctcttgttttcataaattacccagtctcaggcatttctttatagcagtgcaataacggactaacatattgggctaaaatcaaagtgccctcagggcagtgtttctttctgagaattattaggaagaatctgttttctggccttttccagtttttagaggctgccctcttcactcctggccctctttctccatctgcaaagccagcaaagtcaggctgagcttcttctcatgctaccacctctggtgctctctcctgattctctcttccacttttaaagatcctcatgattacattgggcccacctcaataagccaggctaaactttctattttaaggtcagctgattagcaactataattttatcagcaaccttagcctgactttgctatgtgatatagcatattcacacattctaggggttagaatgaggaaacaaaacatcataggtgtttttacattctgtatttgcatgagcttcaaatacatgaaaattatgcagatcagcttctttattgtgaatctagttaatattgtttacatttttaaaagactagtatataagattccttaaaatggtacatttgatatcaggtatcctgggatcaaataaaatatttctattattttttattcattattatttctattattctactactattattattacctattatttctacctcaactcatccagtattaattatcttttaaaaaaattataatttcttttaatgagttgaacattgtgattcattaatgatatgtttatttaacagtaggacatgtttgtggaagatgatgtttgtgtatgtagtacttgaataaattttctcacatgacacataacatttgataaattaggaaatagaatacagtagaaaagatgactaaatgatgttattttgtaaaaatcgtagacttgaccgttttcttttataagcgtctaatcattctcatgcaaaagaagagaaattccattatcctatctcttattctagctagaaagtatacaacagtgtgacttccagcataaaacagatgaagaaaataattgttgaccaaatacacaaagatgaaaggaacattaaatctataaaatcaatttatttgtacattatgctcaatattcttttttgctcatctatttaattccatatgtattcattgaacacaaggcaaggccctctttagtaatgaggcactattgagaaaacagctcccaggcaataaaagaggtggacatatataaatgatgctgatatgaaccagctgtgataaatagtatgacagaagtggaaatcttactagtgcacaagctgcatgaaggcagaggttttactaaacccaaagctaagaaatatactcaatgatatgaatagaatgtgctatgggaatataaacaagaaaacacaaaatgccatgagacagcagagagaaaaaaggcttagacaccacgattttggaaagtttcacacattcagaatttaagaaaaaattgagaattgaaatgggtttcatgctccacccttgacttctaaaaatgttattatccctctctgacactaggtggcactacagatgcaggcatgggcagaaacacgtgaaagatttgtgcctacctacttatgatgggattcttctgcctcctgctgcactttgcctggggtagccagactacaggaagacaaatgctgaaaggaataatatcagtggggattttgttcaggaacaggaattctatcccaaacttggattttaatcaatattcctttgattaaaggtacaatttttaaattaaaaattttcaagactttaagtttgaattataaatcttattttatttttacatttagtaactttgaaaaaatgcttttctgaatttgatatgtgagatcaaattctttttcaaacaacaccattttatgtatttaataaaattgccttggatatgttaaactacaatgacaactttaatacatctgtattatctcaaaygtttaattgactaagatatatacagattttattttaaacactcaaatacagatctaacaacatcttgctaagtactgaaattgtagaaattgtaaatcaagtaaatcagacttacaaacatagtagatcaaattcttctaagcatttcccaatggcttgaggcccagaccacacacacaacacatcatgattccctccctactaactagactaaactggaaatgatgctataggctcttttgtatggtcacattttttgtttccagtgaacaggggctttctaaaactcagtcttttcctctgaaattaactgcttaattttatgtttgcaatgctgtgcctttctcctaggtaacctgtccctgacattcaaaggggattttcccagcactttgggaggccgaggcgggcggattgcctgagctcaggagttcgagcccagcctgggcaacatggtgatactaaaatacaaaaaaaacccaaaaaattagcagggtgtggcacctgtaatcccagctactcgggaggctgaggtaggagaattgcttgaacccaggaggcggagattgcggtgagccgagatcatgccactgcactccagcctgggtgacatagcaagactctatctccattaaaaaaaaaaaaaggaggggggtgattttcaggtcctggtgcttataatcccttttctataattattgtgttatctcttcatataggcctagtgtgtggtgatggaatttagaactccttccttaggttggttacatccctttttactttcattgtatatgtgcctcactcatccacactttacggacgtttaattaatacaagcctataacttcccttttatcctagagcaagggaagcaaaactgtgtctcaaatagacttcccagcactggacaccagagtcaagaggcacaggtttgagcctttgatcaaaatggtgccagacatccaagtctcagcagttgatcctgaaatatggtgaactcttccagctttgaactcacttctgctttcacatgttgtctgcccaccatgaccaaaagtatcagacatttttgtctggtaccaacagcatcagagactatcagagatcatattcactcaaccctgtaattctacacagaagggatctgtggtttctctgttgacctggtgggcagtggtggagttaggactagaactcaagtattattttctttctctgcaactccacttgtatgagatgctggtttatagggacaacttttgtcttatgtagttatagaatattaaagagtcattttgtctaatccacttattacgtaaaagaagaatcaattgccccaagaagaatcaattggcatagctagtgaccttagggaatgacttgattttgtgagctttaatgatagctgctatttattgaaaaagtaccatgtactagaaatgtaactgctgttttccatgtatagcaataatattgtgaaaaaggtattattgactaattaacagattaagtaattgagacaaaaagttagttaacttctttaaggtaagaaaagagatgaggagtccaggcgcggtgcctcccacctgtaatctcagcactctgggaggctgaggcgggtggatcatctgaggtcaggagttcaagaccagcctggctaacatggtgaaaccctctctctactaaaaatacaaaaattagtcaggtgtgatggtgcacagcgcctgtaatcccagctactcgggaggccaaggcaggcaaattgcttgaacccaggaggcagaggctgcagtgaacccagcatgccactccagcctgggtgacagagcaagactctggggaataaagatgaggaattaaactagcgttaactcttctgaacttgaaagcctctctattattagcatttttgtttagttttagtttagctggattttttaaaaatataggacttatcaggagtttattaccaaattgttatggaagttatttataatctcttatctaggtagtttactgatttttaagtcaaatttcaattgactgtctgatatggtttggctctgtgtgtcccaacccaattcttcatgttgaattgtaatccccatgtgttggaggaggagcttggtgggaggtgattggatcatggcgggggggcctcccccttgctgtttttgtgatagagttctcatgtgatctagttgtttaaaagtgtgtagcacttcccgcttcactctctctgtctcttgctgccatatgaagatgtgcctgcttccccttcgcttgcagctgtgattgtaagtttcctgaggcctccccagccatgccttctgtatagcctgtgaaactgtgagtcagttaaacctctttttttttaataaattacccagttttgggtagttctttatagcagcatgagaatgggctaataaactgtcgttcaataatttatatgacataggcccctggatggggtcctacaacaatggcttctatttatctacaagtagacagagtgagaaataatttttatgttctaagatttctggaatacatcttaggatgtagcctctgcatctaatggcatgtggtgtaggagtccatagataggtaatcctgggctgatgcaagtgttcagcaatgcttattgggatttgggtttggtccaagttctgctccacaatccatgatatgtttgctttagtccccatgcttgctgcatcacacctgccaacatctccacaacattctgtacaagcagaaaagatccctttgtgtcaagaaagcaaaagttttccaagcagccctacccagcagacttccacttttgtctctccccacttccatagaggctccttaagttactagggggaagagaattatgaggaagggttggctcaggcatcacacagaagattttggattaccaaaaacctctgaaatttagaaaaaaaaaagagtgatcctgaggtaaaaatgcaatgataaattccgaaaagtataatcccatttatatccttatcacttcagcagaaccaggaaatagttgcaggcctgccctctctagagcactatgccaagttgagtgagaggccaactccacagaagagggatagtctataatctgtctcacagagggattcgttcttgaggatgcatactttcacatgacagttttttagaagtaaatcaaggtaaccactgacatactcattcgcactaagttgaatgtagaaaatttcttcctcaagttttagagcagacctcatttatgcacatttttgtatgaaaaaatatataccttaaaagtatataaaaaagaaaaagtataattgcacaagcatgtcaaacaacgactggcacaaggggagcagatactactaattccttaccaaatatctatcttcttcttttttcttaaacagaatcttgtcattgttgctgtttttactcttctggactgtgcatttagaggtaggcaagtgacaaatttctacctaaagattgaagccattgggtgggacttccccaaatagaaaacaaagattagaatttttaaattgtgaaatataactagagaaaaacaaataatgtgctgatttggtttaacaaataatcataaagcaaacacttatgtaaccatctgtatcatattttaaaaattttgtttgtgatggtcatccgtattgttgtgcgtagctttacttttttttcattgctgcaagaaatacagttggccttcagtattcatgagacattggtttcaggactgcccatggataacaaaatcagcacatactcaagtctcacagttggccctgcagatatgaaaagttatacctccctatataagggtttcacattctgtgaatattgtacagtatttttgatccacgtgtggatgtggaacctgcccatacagaggtcctaccgtttttactgaaaaataaaattcctatgtaagtggacccatgcagttcaaacctgtgttgttcaaggatcaactgtatacactgatctatttatttactttgctattgatagatttagtttgtttctcatttagcttctaattacacgtttgtgtatgtatcctgggtgactagaaatcattatacacactgattagtcactaggatatacacctgacagtagaatttctgaattaagaaataatgtatacatttaacttaccagatgatatcaagttgttccaaactgtttggaaagtggttgtcaaaagtagtagatgacaggatagttctattgctctacatcctcaccattcattgatatttttgtactattgccaatctgatcggcgtgcagaaatagattattattattttgatttttctaattactagcttggtcacattttcttaggttaattraccataaattagtttgcttgggctgctgtaacaaagaccacaaactgggtggcttaaacagacacttattgtctcacagttctggaggctggaagtctggggcgctagcagtgttggttccttctgtgggttgtgagaatctcttctgtgcctcttgccttgctcctggtggtttgttggaaatcttttgtgcttcttggtttacagatgcaccagcccaatctctgccatratgtccacacggcaatctccctgttggtgtgtctctgtccatatttcctctttttataaggcaatgatcatattgagttaggagctcagcttacttcagtgtgatcttgtcttaactaattacgtaagcaacaatcctatttgtaaattttattgcattctgcagtattgggggctagcacttcactatgtgaatttttgagagacacagtttaatgcattacaggttgcctggatctcatcttttgtaaggaaaccattaaagccttatttactcattttcttttaggtggtggtgtatttattcttgatttgtaagatttcgctggtataccagatcttttttcaagatatatgtgttgcaatcataacctctctttctatggcttatcttttcactctcattaatattgtttttatgaatgggttttaaaaatttgaatgtgtttgaattttttgatttttcctttttacttagtgacttttgtatattgtttaagaaatattctcctactctacttcatggagatattttcttatctcctaaagttttatagatttgtctttcactttcaggctcttcatctatctggaaataccatttaaatttttttttcaagtggtcatttcactgtcccagttctatttgttgaagcttgccaattacccattggcacattatggtgtctctgtcattttgtgtccatatatgtgaaggcctgtatttgaactcctgatctgtgtcactagtctatgctccttatctctgtgctaaaaaaaaaaacactgtcttaattaccatagcttcaagcaaattctattatctgatagatgacttttttgtctaatatgtcttcttcaagaggatcttgcctgttcttatctcttctcatttttatgagaatctyatgaaatttatagattaattttgataaaatttacatctgaaaaatattttttcccataaacatggcatatcttccttttacttttggtctttttaatattcttcaataaaatcataattttctctatggagattttcacatattttatgaattcctaatatttttagattgtttaatgctattgtaagtgatacttttttcctagttatttgtttctgttaatagaaatacaattgatatrtgtatatttaggttgtatccagatactctactaaatccttttgttaatttaaaaatctatttagattattctagatttctatgtttacaatcacattacctatgaatcgtgaaagtgttgtattccctttcaaattatttatatccagttttcccaaaactacttatcaaacagactatccttttcatgttgtatactcttgggccattatcaaagatgagttgactgttatcttagtccatttgtgctgctacaagagaatactacagactgggtaatctataaagaatagaaatttatttctcacagttgtagaggctgacaagtccaagattaaggtaccaggaggttttggttatctggtgatgtctatattccctgcaaaagagaaacttatgacttcacatggcaaaaatccaaaaggcaagctgctgaatgctgcatgaaatctcttttatgaagactttagtctcatttatgtggaaggagccctcatggtgtattcttcttttaaaggcccaacctcttaatgccatcatattgacaacatctgaattttcgagattacacaaaccgtaacaactgcatttgtgtgtgtttgtttctgggttccctattctgttccattggttcatgtgtttgtttttatgccattaacaaactgttttgattactacacattgtaatatggttagaaatcaggaaggacgaggcctccagctttgttcttcttagtcaagagtatgttgtctatttagggtcttttgtaatttcataagaatcttagggttgtttttgcaatttctgtgaaaattcctacaggaattttgataaggatttcactgactctgtggattgctttatgtagtatagatattttaacagtgctaaccttccaatccatgagcatgagatatctctccatttacttgtgtcttcttcaatttctttcatcaatgtcttagagttttattgtacagatcttttacctccttggttaaatttattcctaagtattgtatttgttttgatgctattctaaattgggctgttttcttattttttggaatagcttgtcatcaccatatagaaatacaattgatttttatatattgatttttatatcttgctactttactgaatttatttattagttctaacagttttggggggaatctttagagttttctatacataagattatgtcatctgcacccagacaatttaacttatttctttctgatttggatgtattttattttgttttcttgattgattactttggctaggactttgaatactattttaaatggtagtggtaagaatgggcactttcgtttactcctgatcttagaggaaaagctttcagatgttcaccgttaagtatgttgttagctgtgagcttgtcatatatggcctttagtatgttgagatatatttattctatccttaagttattatcatgaaagagtgttgaattttgtcaaatacattttctgcatctgttgagatgataatatgagttttatcctttattttattaatgtggtgtaccacatttatcgattatgttggacaattctggcatcccagaaataactcccactgcatcatggcgaatgatccttttaatgtgctgttggattcatttgctaatattgaggatttttgcatctatgattatcagggatatcggtctgtaaatttcttttcttgtagtgtccttttctggctttggtctcagggtaatgctgaccttataaaatgagtttggatttttaaaaaattttgaaaaggattggcaccagttctttttagaatatttggtagaattcagctgtgcagctatcatgtcctgaacttttacttgggcatctttgttatatttttattaatttttttcaaagaatcaggttttagttctattctttttgtgttttacattccattgaattctgctcttaattttactgtttccgtttgcgtgctttgagtttaatttgttccgcttttttttatggtttcttaaaatcttataatattgtttcagaaacgtcattgtttttaaaaattggcatttaatgttacataaatgtcaatttaagcactgttttaggtgtgttccatatgttgtgttttctttttcattcagtgcaaaatatttttaagtttctattgctatttgctctttgacctatgggctattttagagtgtgttatttagttccaaatatttgagcatttccagatttctttctgttatttatttttattttaattccatttggtgagatagcatatgttgcctgatttcaattgctcaaaatttgttgatgtttctttatagctgagaacacagtgtattttggcaaaaatttcatgtgcatatgcaaatatgtatttagttcatgttgtatagtgtattcaaaatattaattaggtcaagttgttgatagtgttatccaggttttcttttttttctttttcttttttttttggaaacagagtcttgctctgtcacccaggctggagtgcaatggcacgatcttggctcactacaacctctgcctcccttgttcaagtgattctcctgcttcagcctccagaatagctgggatattacaggtgcctgccaacatgcccagctaattttggtattcttagtagagatggggtttcaccaaattggctaggctggtctcgaactcctgacctcaggtgatccactcacctcagcctcccaaaatggtgggattacaggcgtgagccaccgcgcccagcctatgttgtccaggttttctatatccttactgattcccatttacttattcagttactgaaataggagtattgagatgtccaatacaattgtagatttttctatttctctttgcaggtctaccagtttttgcttcatgcattctgaaattgcgtggtttgatgcatatacatatagaatttttagacctaattgattacttgattcttttattattatataatacctcttttttgctctggaactatttgttttgaagtctgctttgtctgatataagtagtgattatagctttcctgagttaatgctttcatactataattatttcccatcctttaactttaaatctctacacatctttataattaaataggatttcttgtagacagccagtggttggaattttttaaccaatctctcaatgtctgccatttgatttgagtgtttagacatttacattttatataattcttaatataattgtatttgtatttactaattcatgagtgtattctatttgaacacatccaagttcattcacctttcttctttttttggctttcttttggattaattgaatatttttaaaaatagctttacttaagttttactattggtttattagttgtatatgttttagtactttctttatagattacaatagaaaccattaacttaccatgtttacctttaaatatttaccacctcatttaaagtgggcaagaactttacaatcatatactttcaagtytttcccccttcttctttacatgattgttgtcatgcaatttattctgaacaggattattggatgaaaaacttagttttatatgttttaaacctatgatttttactttagacattcaattatcttttaattatgaaaaattagattaaaacatctatcttattatcctcatttttatcatttcgtgcactctttatttctttgtgtggatccaagctttgatctggtctcacactccttatacctgaaagtctattattacaattttttaaaacatacagttctactagcagtcaattctcttgtttgtttttctgaaaacacgtttatttcatcttttgacatttgtatctctcatttttaaaaatatgttcgctgggtatagaatttggggttgacaatattttacagataacactttgacttctggtgcatgatacagtcatatagtacagtatagggtaacataatgtagtataatatagtttctaatgagaatcctgctataattcttgttgtcatttttgtgtattttgtttataacatttctttttctttcctctgtctgcctctaggattttttctttagctttggtttttagcagtttgactgtaatgtatctactttttagaattatcatgttgatattttctcagcttctggacccatggtttgatatcttccactatttttggtacattttggcaattatattttcacataatcttctgctctgttctgtctcctccaagatcagcaagtttatatatgtcaggctgacaaatatcctacagcttttggatgtccttttctgttgtttccccttctccactctattttctccttgtgtttcagttttggtaacttttattgaattattttcatgttcactcattatttcttctgctctttcaagactattgataggctacataaaagaattattcacctctgatatcatggttttttaaaaaaattccaagtcattttacttgacactttcttatagctttcatctccctgctgaatattagaaagggacattatattggtgtctgaaacctattattggagttgctgaaatcttgaacaacattgcatggtatcctgctactttgagagaaagttttaaagccaaaatgaaaaaaaaaattacccatggaactccagagaacaaattaactttcatttgttaataaaataaaatttcattttatgttaaattaattttaacataaaatgaaaaatggcatacaggagtattagaaatatagcttctgccttgtttaaatataacaatattaaagcgttacataagaatacaggaatctcttcctgtgctctgggataaaagggttctccactcctgccctagaggctgagctttttggcaacataggagggaagaatccagggaagtgggtgatgatttgtgtttgactccagaagcatccaatcaccttctcacatatgcactactaagcatggggctcttgccaatttcttcgcttttctccagtcttataagtacccagtaaagaaccatgaaagagattgtgaatgtatataaattcctctttgtctgggtcccccagttattaataattgatatgctagctagaatcagcttcataaataattccaggcacaaacaatcaaaacctacttcaatcaatgtaaaagtgtccactttaaaagccactaacttctcttatctcacaaagatttttccctagaatggaaaattattaaggctagttttacattcaggttcagtaataaggatactcattttttcactcatttaaaaattatttattgtctgtttatttcataccaggcatttttctcattgctttggataaaaaaagtaccaaaacatatagacacgcattttgttttcaaggaaaaatcattctaatgtgcagaaagacaataaaaaagtaatttcccaagatataaaatgatagagatatagatacatatgttagaaggtatatctatatacagtgcactgtatccttgaaatgttatttcctcaatatagacaatgttttaaggaagataatttgtgaattctgtcaaatgctgctgattagttaagtaggatgagaactgagaattggacagtgttctgatttagcaatgtagaggggattggagagaagatttagaagaaaaaggagaagagggattaaatcatgaaaataaagcctgctttagggaagtcttgagaaaaaaaatgaagcagataaacaatattttatgaccacagaatgttcagcaatttgaacagtaatttcccagttgttgtttcctttgaaactatccatgagacggaagcaatgatttcccatttcaaaattaggaaattgaaactcaatacyattatgcaactatcagatgccagagctggaaacagaatccagttctgacgtccagtccaagccattctagattgcacaatggagacgtaacccacaatgaaaataaattctgcctgcttaattgttctgcttggggccacgctcagctgagttcattgtgcagcttagtccactagctgatgttttgcaggttggtaaaataatttgtttattctgctgcaggaatcctgtgggtgttcaatatgtgttaatttatttgactaagtctcagaggagagttgtaaatcccagcatgtttctttattgaagaatataaccacaattcacacataatcactataatcacatatttattcctcaaagtaagatccctttgatgttctcagtgacaattggggaccttatttcagttgacgcttgtaatgtagaatcatccaaagggccattattgttccaattagcatataagtttaatttaatatttataccagttagaagaaatttttcaagtacattttattcttccctggcccttggaatttcatttttggacaaaactagttaagtccaaattaatggccatcagatatatggaaaggatattttgtcagagagagatatataaatatgtacttacattcttatgctgtaaacaaggcatttatgagagttcatcagaccaccaagtgaaattgttggctgtgtctttgtgttgctacactccagtacagaggaagaaagcgatgtgtttctggaatggagggtcagtaacagcaaataatgttttaaaatgagaaatgataatgctatagaaaaatagaggaataatcctccaatcagacacatacatgcgcatgcacctgcacacacacacacacacacacacacacacacacgcacgcactacttgctactaaatagaggaaatggagaattggagagacatacatgttgaggacctgctacaaccctgtaggtttccatttgctgagacgtgagaaacttgtgtcttaaaatattgaacaggctgacgtaggcttgcactccacctcagagaattaaggtagcaactgttttagatggaattgcactatgagagctgaaaacaaagaactctctttagtttctaattagatagagagccaagatcatgagtattagaattctgcctgcccacaagaggggctctggagcaaaagactccaacctagactctgaaaaacacaaaaaaggacgtatgaagaccgattgtttcctggtagcagtgccactttcaggatactagaggttggttgtggagttggaaatagtgtgtttccaattttgaacacttcgcagagctttccagagtcctttctgtattgttgtgattttgcttctggagctgtggagcttgtaaagtcacactcgttctacagagcagcccagtgttttgcctttgttcatgatgtatgtgatgatggcttaccttacccttttccagatgggatcctggatgtcattctccttgtctttgtgctctcttctattcatcctaacaggatgcaaggtgttgtaaacctactgtccaagttactgaaacctgggggaatgctgttattttgagactatggaagatataagagtcagcttcgttttaaaaagggacattgtttatctgaaaatttttatgttcgaggagatggtaccagagcatatttctttacaaaaggggaagtccacagtatgttctgcaaagccagtttagatgaaaagcaaaatccggttgattgccacttacgagttaataggaaaaaacaagtaaaaatgcaccgagtgtgggttcaaggcaaattccagaaaccattgcaccagactcagaatagttccaatatggtatctacactcctttctcaaggctgaactttgtaacatgttaaggtacaaagccagaggactgtgctattcaaggactactgtaagkttttcgtttctcaaaagacaatgagaaaaaaagaagagaatttgtatttcttgctgttttgtcataggtgagctcctttgtgcattttaagcacatgtaagtgattcagcacagtatgcctttttctgcgctttgaaaacttgatatgcctaagcttgtttgaatttattacatctaaccattttgcttgttccttgaattttataagcattcaattaaactggtattatgtcaggtaattttgagaaaacgtaacttgacattttttgcaagtaaaaaaattatttatttgtttaggcttagtaagccagttcccaaacacgcacacacacagacacacacagacacacacacacacacacacagacacacacacacacaaagggaggaattcctgaccataatgaagctcaaaaccctcaaaggggagactaatatttgcttaaaaggattgttaacttccacatgtaatctacagaaataaagtttttgatgattatataatcatacacatataaacatatatcatgattgtgtattttttgtatgtgtatctctttacattaatgatacttgtagagtggtcagagtaagaaatatcacatttcttcatttcataaaatcaatttaaatccaaacctaagctcctatgccaccagtctctctcacaaaatcctcagtgttcctctaggattgtgcaaaggtcctggagttttatgcaaagcaaatattttaggaggcacttccagtgtgggattcatgctggtccctttcagatgcctgttgtttctaagtcctcataatcctttgrtgttcaggatgcctggagctctggtgctcctttgcagactggtctttgttggtgctaaaagtcagctgcccaaactctctccttcacccccagggcactgctagaagcagagtgagtttgcattgctcttgcctaccaaattccatccttttctcaccctgttgctaggttcttttttttctctctgtctttttctgtccacaaagatcttctccttttcctctccacatcgtggaagcatrtaataatttctttaatgagtctaggcttttataagacacaaacgattggcttcatacagtttctaccatacatcagttcaattacaaactaccagcttgggtggaagtggaagaagataaacagccacggttgcaaaggagagaaagagagagtattgcatgtccagtatgttaaacggtccagaaatccttgtgaggacaggagaaacaaatgggctaacccgtaggttagtctaggctctctctgacaataatatttgacctgaagtttgggtatttttatgaatctcctaacaataacatttaccttaactttaacttggggagaaggagaaaaggaagaattctggggagatcacaagcgagcacagaaggagtggaaaggttgcagaaagttggtgtgttcagttacttgctactgaaattccaggcagcagctgctgctgctatggaaatgagattggaaaacttgcttggatctcttctttagcaatgccctttcaggtggtaaatagtaaggagcaaggaggttgtacagaaaacggaaaacattgtaaaattggaggactaggagataaagaatgttccagcttctctaaatcttgtgaaaaaaaaaattgcgagctgtctttctgtgtagctttcctctttgtcctcacagttttcttcttccttttcttcttctttgttctcctcctcctctgaaacacagacacatagacacagacacagacatacagacacacacacacacacacacacaatctctctttgccattatctttcctgttgcactgttagcttcctctagtttccctcatttctaggatcttttaactgcattaggtatttgtagtttttgttgatacataatagatgtacatattttggggatacatgtgataacttcatacagtaatataatttgtaaatatcaaatcagggtaattgagatatccatcattttaaatattcatcttttctttatgctagaacattcagattattctcttttagttattttgaaatgtacagtagattaatattgactataatcatcctactgatctattgaacacttggtcttattttttctatcaaaccatataattatacccattaatcaacatctcctcatggacccccaaacttcctggcctctggtaaccaccatttcattctctatcttcatgagatccattttttaagctcccacatacgagtgagaacatgtgatatttgtctttctatgtctggcttatttcacttaacataatgacctccagttttatccatgttgctgcagtgtatttgtctgttcccatgctgctatgaagaaatatccaagactgggtaatttataaagagaagaggtttattaaattgactcacagtatgcatggctgggaagtcctcaggaaactaacaatcatggtcttcacagggtgacaggagagagaatgccaggtgaaaggggaagccccttataaaaccatcagatctcatgagaactcactaaccatcatgagaatagcatagggaaaaccaatctcatgattcaattatctccacctggtcctgcccttgacatgtgggaattattacaattcaaggtgagattgtgttggggactcagaatgaaaccatatcagacaagatctcattttttgtggttgaataacattccattttttataaatatcacattttcttcatccattcatccattgatggacacttaatttgattccatatctttgctactgcaaatagtgctgcaataaatataggagtacagatatctctttgatatactgatttcctttctttggggtgtatacctaggggttattgtgggataactggctcatttggtgggattgctggctcatatggtagttctattttcagctttttgagaaactttcatactgttctccataatgactgtactaatgtatgttctyaccaacagtgtacaagggttcctctgactccccatcctttccagcatccattatgcccagtctttttgatacaagccattttaactgaaatgagggaatatgatagtttttatttgtatttctctgatgattaataatgttgagcatttttgaaatatacttgttggccattagtatgtcttcttttgagaaatgtttgttcagatcttttgcccattttaaaatctgattgttttttgctattgaattgtttgagcacattatatattcttgttattaatctcttgttaaatggatggtttgcaaatattttataccattctgttggttatctcttcactttgttgttttttggttatttgttttatattgttgtttgtttttttgctgtgcagaagctttttagcttgatgtaatcccatttgtctactttttgctttggttgcctgtgcttttgaaggcttacacaaaatatctttgccaagaacaatatcctggagagttttcctgatgttttcttatagtagcgtcagagttttaggtctcagatttaagtctttaacctattttgacttttaggtatggtaagagatagggacccagtttcattcttctgcatatggttatctagttttcccagaacgatttattgaaaagactgcctttcctcattgtatgttcttggcacctttgttaaagatgagttggctgtaaatgtggggatttatatctgggttctctatttggttccattggtcatgtgtctgtttctatgccatgttgttttggttactatagatttgcagtagattttgaagtcaattagtccttgagctttgttcttcttgctcaggataggtttggccatttgaggtcttttgtggttcgctataagttttaggatttttttttctatttatttgaagaatgttactggtactttgatagagattgcattgaatctgtaaattgctttgggtagaattgtcattttaacaataacagttcttccaatccatgagcatggaatatatttccatttttgtgtcctctttaatttcttttatcagagttttatagtttttcttgaataggtcttttactctgattagattgattcctagatatttaatatttttgtacctattggaactaggatggctttcttgatttctttttcagcttatgtgccattggcatatataaatgctactaatttttgtatgttgattttgtatcctgaaactttactgaattaatttgtttttataattttttggtggaatctttaggcttttctaagtataaaatcttgttgtctgtaaacaaggctaatttgacttcttccttttcagtttggatgccctttattgctttgtcttgcctaactgctttggccaggacttccagtgttatactgaataaaagtagtaaaagtgggcatttttgtcttgttccaacccttaaagaaaaccttcaattttttctcattcaataaaatgtgggtttgtcatatatggcctttgttatttcgagatgtgttccttctatatagtttgatgaggatttttatcataaagagatgttaatttgatcaatgctttattagaatttattgaaatgtttatatgctttttgttctggttattttaatgtgatgtatcacatttattgatttgcataagttgaactatccttgcatccctgggacaaattctacctggtcatagtgagtgacttttttttttagtatgtgttgattttgatttgttagaattttgttgagaattttgtatatatgttcatcagtgatactggcctataggcttcttttatcattgtgtccttgtcttgttttggtatcagtgtaattctggtatggtgcagtgagtttggatgtattccttcctcttccatttttttttttttttttgaagagtttgagagggattggcatcttctttaaatgtttagtagaattcagtagtgaagccctcaggtcctgggctatgtactacagcttccatcttattattaattattggtttgttaggtttcttatttcttcatggttcaatcttggtaggttgtgtatatataggaatttatcactttcttctaggttttccaatttcttcgcatatagttgtttataatagcctctaatgtatagttagtctcttctttgaattcctaagttgtctatagctatgcttccttttttgtttctaatgttatttatttgggtgttctctcttttgttgttagtctagctaaacttttgtcaatttcaattatcttctcaaaaaaccttggccagatctggtggctcacgcctataataccagcactttgggagccaaggcaggaggatcacctgaggtcaggagtttgagaccagtctggccaacatggtgaaaccacatctctactaaaaaatacaaaaaattagccaggtgtggtggcaggcacctgtaatcccagctactcaggaggctgaggcaggagaatcacttgaacccaggaggcggaggttgcagtgagctgaggtcatgctgttacacttcagcctgggcaaaaagagcaaaactccatctcaaaacaaaaacaaaaacaaaaacccaacattttattttgttgatcttctttattgttttttaatcccagtttcatttatttctgctccaatccttattatttgttccttgctattaatttttgttttggtttgttcctgattttatacttccttgagggtaggttatttgatgcttttctacttttttgatataggtatttattgtgataaacttctcttagtgttgctttttccatttcccacatattttgctatgtaatatttccattatcatttgtttcaagaaatgtttctgtttcattcttttttttttaattaacctactggtccttcaggagcatgctgtttaatttctatgtgtttgtgtgttttctgaaactcctcattattgatttctagttttatttcaccgtggtcagaaaaaatacttgatatgatttctattttttttaatttgctttgagtgttctgtagcctaagatatgctgtattctggagaatgttctaggtgctgagaaaaaacatgtattctgaagtagttgggtgaaatgttctgtaaatgttagttaggcctattcaawctcctgtatggtttaactctgctgtttctttgttgattttctgtctggatgatctgtccattgcttagagtggggtgttaaagtcccctactattactgtattgcagtctatctctccctttaaatctattagtgtttgctttatatacttgggagttccagtgttggatgcacagatatttttataattgttatattctcttgctgaattgacccctgtatcattatatggtgaccattttatctctttttacaattttagatttgtaatctattttatctaagtataagtatagctacttttcttttttagtttccagttttataaaatatcttttcccacctcttcaatttcagtctctgtgtgccttattagtgaagtgggtttcttgaaagcagcatatagttgggtcttttttttttttaatccattcactcactctgtgccatttaatttgaaaatcgagaccatttacatctagtgttattattgataagtaaagggacttactactgccattttgttgcctgttttctcattgttctggaactctttcttcctttcttactgtcttcctttgagattaagtgattttctttggtagtatattttagtttgttgctttttatatgtagtatatattgtaggattttgcattgtggttattatgaggcttacaaaaaatattagaaatataagaagttacttcaaagagatgacaacttatcttagatcacaaaaaaagataatagaaataagcaaacaaaggaacaactaaaaacacttctctacacttcagctccatctcccccacactttgatgtttagttgctccaatttacatattttcatattgcctgtctcttacagcttgctgtagctatttttgttttagatacatttgtcttttaggcttcatattagagctatgaatggactgcacaccacaattgtagtatttgaatattctggggttgtcagtgcacttatgtttaccagtaagttttaaccttcaaatgttttcttttctgcatgttagtgtatttttttctttcagattaaataacttattatagtatttcttctaagaccagtctgatggtggttaattctctcagattttgtctggcaaagactttatctctccttcacatttgaaaaatagctttgccgggtacaatattcttggattgcagggtttttttctttgagcactttggaaatgtcatcctacttcttcctggcctttatggtttctgttgacaagtctgttgccagatgaattggcattcctctatgagttattttcttcttttctcttgctgcttttaaaatcttctctttgtccttgacctacgaaaatttgaatattttatgatttgaggtagtcttatttgagtcgaatctgcttggtgttctctgacctccctgtacctgaatatttatatctttctcaaattttaggaagctttctgttattatttctttggataatctttctatccattgctcttgttcagctccctcctgaataccaataatcctgaattttggtcttttgaggtaattttccatatcttgtagatgattatagttccttttattctttcttttcttttttctcctcacagtatattttcaaatagcctgtctttgagcttttagattctttcctctgcttgatgcagtctactgttgaaaacctgtaattaatttttcagttcagtaaatgtatttctcagtttcaagatttgtttttttaaattacttcaatgtctttgtttaacttctctgataactttctgaattgctttttgttgctatcttggggattgcttcatttcccgaagatgctacttcgaaatcttggtcaggtagctcacagttcaccatctcattaaggacaatcactggttccttgctttgtcctttggggaggtcatggttccctgtttgctcatttctcttgtgtatgtatgtctatgtttttgcactgaaggactagccatttattccagtcttctctctctggcttattttgtttttttttttattggatatatttgcttagaggttctttaccattaggtaactgcctccttttaggttctaggtggcactttatgtctaggtttgcctcagctctaataaatgatttgaggtcccaaaggggatacctcttcagtgtgtcaagtctgggtagcgatttgtgcccaggggatccatagaacttaccttccacagtgtagtggtgctgagcagctattctgattttgtctcctttggctgagttacagagcagttttcagagctggtaatggtagtcctgcatcctccctatgtctctggctcttctcagggatctgtctccttcaggcactcaagatgcttccaaatgtgttggcaggaacaggtctactgccaaaaaacccaagatggtggtaagctggtcattcacctatatctcagctattccagtggagaagctgtgagttaggaggaaatttttgcatggttggtgccaggcagattgtggggaaaggcagcatggatatggaaatttcatctgctcagaggttttttacatctctgtagccccaggaactgtttcatcctcatatctgagttctgggatatcacaaatgataatcctggcactatgcatttgcttttggttttttgtaagatgggggagtgatgtcaggttgcttctatgccaccattttggaacaggaagtcagtatttatagttttactgtaatatattttaaaacacttaaattattaaataaaatacastttttcttaacttgtagaattccagatacattctacattttctatggttttgttttaacaaaatatttaaccaagtgaaatatttataagaacccaatatttcccaatatttcttcattttgttttattatctcacagatagataatatctttggcatatttactccacatggaagagaaaaataaccttgaactaacactgacacaaagccaaatgtgattgagggaaaggcaatccttcagttgatccttaacaaaatgttttattgttgataaatactgaaccacaataatcatattgagataaactcaacagatattaatttatcttattttttaattagagtttcaaacagactgcattcagaaaaatgtgtaatatcatcattacataaacattttttaatgttcttcttaatacttgcttttcctaatgcaaattgatacattaatctccttaaactttttttttaaagaaagaggtcttacataaactgtgaaatatttgactcaaaaaaagtgagcattaaattttcttataaatgctaaggaaatttaggcaaaagttaacaggacatgaaaagttattgaagatcacgaccccttttgggtcacaagaccattttcatttaggcactatgatatttgttcatttcattttaaacagtatttcaagcaacatcaaaattgaagaaaactgtagtggttggcagtatggtgacgaggaaattggctgggtaggtggggaaatgaataggtgcatatagttgcatggggtgggaaaaagaacatcagtgggaaggcgggtaaattatcggctcagagaactaaagttgtggagttgggcgtttatgtatttatttttttacttactactttgtacaaggaatcgtaggcagtttacagaaaatatatgagtgcagtaatacttaaactatttgtggtaaaggccagccttttcccttcccttccctctcctctcctctcctgtcctctcccctcccctcccctcccctccccttctctctcctccccccagtcccctctcctcccctcctcttccctcccctaccctctccttctttgctcccctcctctctccccctctacccccttttcctccctccctcttcctttcccttttccccttcctttccccttctcttccccttcccctcccctccctttcccctcccctcccctctctttcctctcccctcgccttcccttcctattctcctctcctctcctttcctttctttttccctccttctctccttctttccttatcttccctctgcccctcttcacctttttctccttactttccaacttcatcaaagaattcgacctttgacaaaacagtaagaatggattactagaaaatgaaataaaaagaaaacactcaaaccagtcaacttctttttcagcaagatgagttcactgatcacatgcttggatgtcatgacagtgccaaattgctctcaattctgtgtgctttctctgtttattctgtcatgggctgtgcttttagtagtactgtcctatttaaacatggattcaaataaaagaaaaaaaggcaaccaaacaaaaaatcagccagagatcctggaaagccatgacttagactagaaaatagtcctgctgaatttgctccagtgcttggtgcttggctctgttcgcattgacataaaccccagtgctttatctgttgtggtagtcactatttttttggtttgtaagtgatataaatctaactaaactgacagaagttgaaatgtattagtttacataaattctaggaaggacagagttagaacaaatttcagagatcctcggaaacctggaaatgtggttattacataatctacgttttcttttccacatcctttctaaacaaggcttggcatttattcagggagaggaagcaggtgcaagaaggcagagttggacaattagaactcgataagattaggtcctagtctgaatcctaccagcctctgtgtgatagtgtagaggtgttgtcagttttggaggatgacttgtaggcctgttagggacatgatgttgaacaagaagtgcagatgccataaaactacagcatgaggctgccatggcaaggactcagccagagacatttctgagttttacaagtgacagctaatgtccaggagggtgttgccacctatccactgcaggtcatggacaaggaagctagaacaactgttcccaagcaaacgaggagaaggctatggtcttgcaaagaaatcacaaaggatatcactctgtcactctgacctcttcttcatccccagatctagaaaggttagagccaataagaaacagagcccttctgttcagggccatgtgaactacaagagtcacctgggcagagcagatgcggaaaagatctgaaatggatacagagttaaagtgttcaaataaactggtctgtctcagaagctgcatgagaccaacttgtgagaagtgactgaaaacttaggaaatcaggctgagatattgctcaggaagacattccccagtgggaaacaatggctcagcaacaattagaaaaagaaaaccgcttatgtttgtacaagttgaaacaccttaataaaatggttgcttaattaatattgtgtctgctatgttgaaagactgaaaaaaggcaaccatagatgtggagagactagttagaggactttttgctgtgcggtttgggtgaaaggtgactgtgaccttgatgagagctatgataatggttatggatagatgtagatggatttgttatgtattttgcagagaaaataaacaggacctgttaaaatactagacacatatggtgggtagagggagtaatcactctctgtttactggttgggagagtgagtgggtgataatgccttgtaaagagacgagaaaggctgaaagaaggaggaagaattggatcagcattgaaaggggctggaatcaagttttggacttgctaaagtagagatgcctacaaagcatctaaatgtagacatcaagtgttcggttacatatttaatttagagcttagaggttaagtctgggtgtgatataaaatggcaaccattatttggaaggacttgtacacagtaggttgcaaacagaaagcaggtttatattttctccaactggtccttttaattcctttctgttgagttgctctttcgctcccratgaatggcaaaatggcatggcttttaagatagtatcaggcaacataaaaatccattgtagtttccaaactataaaaatttcagatcctcatccaatttgaaacttttcctctcccccaagctgttttgtatttggactcttgaaccccatagtgggacatgtcctcacactttcagtagcttatgattgttctgagcctctgcagattccaagggggttgggggataaaggataaataactggyatgattaaaacatgggattggtgccctgtgggtagggcaaaaataaacagctggtatacccctagtcaattccctggtaggaaactttcctcagcaggactattttcaaggtagctcatgaagtccatatctggcacctggaaaacgtgtactgttgtcctgagtctgtgaactggcaacacacctcaacacaaccttctcttagagtaagtctggtactagttccagtgttcttccaaacgtgtgtgctttggccccatgtggtggttcatgtttgcaatcccagcattttgggaggccaaggtggaaggattgcttgaatccaggagtttgtcaccagctcaggcaacatagcatgaccctgtctacacacaaaaaaatatttttgaaagaaactagctgggtggggtggcatgtgtctgtggtcccagctactcagaaggctgaggtggaaagattgcttgagccaaggaggttgaggcttcagtgagccaagattgcaccactgccctccagcctgagcaacagcgtgagacctcatctcaaaacaaaagtgtgtgctaaactctaaatacttctcacaaactccaactcacatggttgaagatgagaggggagtacctctcccctccttcatagctgtgtggaaaacttgggggaaatggatagcacactgacaattccctttaaagaaattattttgaaagtggctgcttcaacctcctttggatctgccaccttccttcacagattcagaaggcaggcaacagaccaatgctggcagtaccagttttataatcccttagcatgaccaccccatctggtttagtatcttctctaggacgtaagatacttgcctcgtattgtgttgctctcagcctttgtggcctctgctcaagacaggaaagctcacagatatcatartgttatataaacataggattcatctggacagagatagcattcgaactataggtctgcctaagaacattgaggaagagagagagagaagaaaaggaatctcatctaggggattcaaagaactccgatatttagagttaaggtacagaaagaattttacaataaagtttaagagagatgaggggaaaaatacatggttggtatcacagcattttgaaaggtaaaaggcaaagcaatatcgtgatagattttcttctaccagagaagaagtttgtttctgtcactgttgatacttgatagatataagtccataagttaatgtcggaatgggctgtagcattatgagaagattgaaagcattgacgaaccaaaatataagctgattttttaaatacaagtaagttgcttttaattcattaaatcaataacaaagtcttacaaaagaaaattacatttcaatcttcaagttttgtgggtcaaggaggagaagtgaaataaaaaagcaaaaaggaaaacaaaaacaaaagcagaaaacgattaggagggcggccagtattcattttcactctcagatctaaatgttagaacgtaattgctgactcttctatttggttttaaaagttgacatttgagctgagacaaccgtttctaagctgaagtagaattaagcatattgtatactgacatttttcactgtccaaataagcttaaaacraataatcttagaaatgtttgtttggcatcagtgaatatataaatgaattaaggaatgtatgtaatatgtccatacctcaaacaacatgaaatatttgagaatgtatgaaaggtcaaatttatgtttttycccctgcattccaaataacagcatcatgttctagttaagaaatatagtataacttagtttaatgtattttatgccctaaaatgctttcattataaattttgttttaactttgtagttgttcaaattattttaacttctagtggagacaactattgtgtatatagttttaaatggagatttaactattaggattaaggattaatttctacatttgtttagttgcattctgttcctttaaaaacaagggcttcaacataagacaaaagtgcttgagcaatactttgtgcatcattggaacaattactgtctgtgaagccattttggaccaaaagataatttttagcattttctaaactctagggaaaaaaaagttgaactttggaacccaggaatttcgactaaggcatcaacactcttctcgtaaacagtggtaattagggctttgccaagtaggaatggggctttctgccacaaagatatgcttttgtgataatataaagtggtaattatttccattcaaggctatttttaagttgtttccacctgcttgcatgtttatgaaaatcatttctggccatggtaaagcttgacctaactagatagctggcataaacatcactaatgatttgctctgataaacatgaagagaaaaatgtgatttccattttctttcaaatccttaattgtaggaattcacatttgaaatgttattatcctttgttctcaaatcactcattcgccaatcatatatcttggtttatttctgcagatttcctacatgtgtgctgcactgggaccagtcacgcagaaagactggctagactttcagtctcgggagaatagatccaagcataagtggtaaatttgaaggtggcttggttaatgctaagtcaacctggatagtttaattgccaggaaatagggaggtaaaaccaagtcgaagagttgtctattgacaatgggaccaggatcaacgacccctgagatttccaggagtcaatatagtttcacatcaacaggagttaagaatcgtatccttggagattacgtggcgccaaaagagcgaaggtgggaagttcagcgttaaagagtctctccagcctggagaatgagcagcagttcctaaaggattatgctatcttctgatcaacttttgacatttgacttaaaattttaaacttgcataagtaattgcatgcacacaataaaatattcaaaaggttcaaacaggtgtataatgaaagggaagtccttctccaagccctcagttatcttcctcagaagaaaccactgtcccagcagctctgaatcccccttccagagatattccctgtgcctgagcacagtgcctgtgtataattacaactgtttaatatacaaattgtatcttactggtttgctctttcttttctatttaacagtgtgtctttgagttcattttttatccccattcattttaatggcttctgttacctttttatctggtggttggggctgtcagtttaactctatttcatctaactcatttcacttaaataagctttaccttacatttaaattagatcatatgtagttagcatctaaaaaatatctggcatggatcaggctcttccacttctatttgtgtgatattgaggaagttactcaattttcctaagtctcctttttctcatgtatataatggggatactatctgcctgactgacatggccaatatgactgctatctatcaaatgtgtgctctctcttttacactagagagttatatctgggaagaaatagtacagctggaggctctatttgctggtgcccattatagtgttatcatgtgactaagttttgccaatggaagatgagaagtaatgatataggtcagttcaagccaaggcaattaaaaccacaactacacactaaatcatataattggggtaaagggcaaataagacaacataaggaaaacatttagggcatagtaatgctaagtaagtggtatttattattatgagtattataacccacatttggcactccatatgaataacctgtagtttttcctgtatcaacttcaataagaacacaatacttggtcacatgcttcaaggtcaaatgcaagtcacaatgtagattttaattgcagaaataaaagagcaaatttacattgcacacatcatagcaaagaacttagtaacaatctccattagaccttttttctcccagagagtaattcttcagctgccagcctagagatgtttttctttmttgatattttccccataaatctctaagttatactctattgtcccaacaaattcagattccacttaaaaaataatctcacttgaagaacttctgaggtcaactggacccgccttccttaaaaggcaaattgtcaataacccattgttattcaacctgatttttgatggtctccattcttagctaatcataatatccaaatatccaaatatttacccaacattactagagcctatacctagaaggggattttttttttctaagagaaatattctccctcctcacccaattttcgtggaattttaaatgagtttctcatttgactcctggttgcattaaggaaatggaccatatttggagattctctcccctttctgactaaaatagccctagagaagccttgagttgcctcattaaagatagcatctgcccaccaagctattttttttagagtaactctggcctttgcttgtgtttggtccattctttatcctcttcaaaaaaatatagcttatggacattgtccctgcatatgttgaatttggtctcaacaacgtactccttccttccctgtcctgggaaattcctgtctttgtattcttgatgatgttcacctaagtctcttcattgaaattcagcctcacagtctacccatttcactaaacctctggaagacatgattcctactcctgtcccctgaacagcaccagccctctttacgtatacttaatgagtcttagttctttcaaaggagttatcatccaactaacatccagtgtggctaagtctaccagtctgtggcacaataaagataccacactatacctgtgactaaccatgaggcaagtgtggaaaacaccgaaattgttttataatattcatcccttgtttaataactgtcttcatcaatatactgtaaattatgcatgggatgaaccgtgtctgaatcattccttgaagtatcctcagaatctagcacagtacctcaggtatatcaggggctctgtaatgtttattaaaggaataaacaatatagataacctataagtgaaagattaaatcgtcaaatatgtgtttatcaaaacaaaatccatactacatttaaaaaaatctaactcatacttaataattactacctttgtaaatttagacaaactgctctttggttctcagcgtccttttctctaaaatgatgcagtgaaaagtagagtaaaagaaattagaacatcacaaaaatgctatctcaatgttagagattgttgttttcatttttattggcaataggaggctgacagattaattattacagtctaggatattaatcacttccactcatgtctactgcattatatgagaagtaatgtgtctcagagacaactttataggagctcattgcctagctcattgcccctgacttgctggacacagaggaaaatcacatatttccattctttgtctttaaaatgagaaaaatgcatgtctgcttcctggttagattacatatatctaatcaagtactcctaatttagtgtttttcagttcctccatcctaagattttccttgcccagtttcctctgtggttaaaagaaactgtcaattattttagtctcattttaatctgtgtttcatattttaaacctgctgttttatattaaaatatagaaacaaataactgttaaaaatttatggaattaatctaatgcaggggtaaaaattctgttcttgttgttaacaaattcttactattaaactcctaaatgaactattccttgaaccaaaagtaacataagtatgttgtcacaaaatattaaaaacaaaatcctgtaaagcagccagtgatgggtttccatccacatagggtaccgaggaaacttccatcatttattaaatacctataaagtgagggtcacttcactataaagtggaggtttagatacataataggcaatgtcttcaagggagtacccaaatctcagactcttcttatcctatcaaggttgctagagagttttacgtcagtagaaagcctccctcactgtagcaatggaatgggcaatggaaaacctccctcaaaatcacagtggggctgggtgtggtggctcatgcccataatcccagcactttgagagcccaaggcaggcagatcacttggggccaggagttttacaccaatctggccaatagactgatgaaaccccatctctactgaaaatacaaaaattagctggacatggtggcacgtgcctgtagttccagctactccagaggctgagggaggagaatcgcttgaacctgggaggcagagattgcaatgagccaagatcctgccactgcactccagcctggcgacagagcaggactccatcaaaaaaaaaaaaaaaattacagtaaacactttgtggaaaggaacaccctggtctcttaagactaaaggtcattcctagtggaatgctttaaggtaatggaggatgatgaaagctaaaacatcaaatgtgttacttgaaagctggagatccaggagcacagttatgtgacagctggagacggcaaggtaggcagtgctctggacaggagccagaagcaccagagtccttgactccaacataagggagctcaaacaaatcagtaagaaaaaacaaacaaacaaacaaaaaccagtcccaccaaaaagtgggctcaggacatgaatatacaattctccaaagaagatatacaaatggacaacaaacatatgaaaaaatgctcaacatcactaatgatcaggaaaatgcaaatcaaaaccacaatgtaatgccaccttattcctacaagaatggccataatcaaaaaataacaaaacagcagatgttggcatgaatgcagtgatcagggatcacgtctacactgctggtgggaatgtatactagtacagccactgcggaaaacagtgtggagattccttaaagaactagaaagaactccttaaagagctattgtttgatccagcaatcccactactgggtatctactcttaggaaaataagtcattatacaaaaaagatacttgcacactcatatttataacagcacaattcacaactgaaaaatcttggaaccaacccaaatgctcatcaattgagtggataaagcaactgtggtatgtatataccatggaatattactcaaccataaaaaggaatgaactaagagcatttgcagtgatctgggtgaaattggagactattattctaagtgaagtaacccaggaatggaaaaccaaacacagtatgtcctcactgatatgtggaagctaagctgttaggactcaaatgatacaatggattttggggacttggagggaagggtgggagggggacaagggataaaagactacaaatagggtgcagtgtatatttctcaggtgatagatgcaccaaaatctcacaaatcacaactaaagaacttactcatgtaaccaaataccacctgtaccttaataacttttggaaaaaataagaagttgatagcgggagggtgagtggtcagaatcccattggggcctttgagtaggtcttatgaaaggaaggagcctagttgatggagccttgaagaagtgacctaacttccttggggacagacctcaacagaacttagaattctggtaactaggcacccacattctagggatagccccatatccagccattggtggggatgctcaagacagcaagatgttctcctgctgtatctcagtttgtctatgtccttgtctcaacaaaggccaaagtgagaatctttccagagactgcggacattggctgaaccctcaccatcgacgcctctggccatttggcagaaggcacccacaggtaacacagggcagcccagtggcaggcccttccagtccaggcctcagctgtgatccaatcagggctgtcccatatccttccccatcaccatgtgttttagggaagcaagagatgaggggccctccctggacaggrgcaggttgtcaggggttgggagcraggtgggtctgtcagattcatactctggtcatggctggcaggatgggaaagggagtgttggggacaaagcttttcttttcacatgttcatcctgagaccaatctctcatctagtttcctctctgactggagatgctctgcagatgctcctatgtgcctgatcttggaaggaaagttctaatctgggtgactgcctggggaaacagcaaggctggccattgatgcctcttggcctggcttttggacactctcttttcagagttccatgcagcatattaagcaggagttgttggatggattcaccttctccatctccttcaaagaagggcaggtgtaccatgtcaccaaccatgaccagtggtgctctagggtgagagtaggcaccgagtggtccccacagacagccaccagagaagaccagggtggacccaggacatataaatgaatatggaaattccctgggctctctcctagggctttcccaattgagtaacccactgtctcctcccagaggaatctgcctgacattattccccagtggcaacttgattacatgcaaaatccctttcaccaccttgtaggaagatcagagaaaacaccatgagtatctctgcttgttgccacagttttgttttaactccccaccctagatatctcatatagcacacagctccatggccctgctagacgtcctccaagactcacaatccaacatttactggggaggtttttacacaaaagtaggggggttacacaaaaaaggaggtgaagctactccatgcatttgtctgtaaagggtcatcccacagaattcatccctctagccccatcagggaggagccccatcaggaagtgccctcacatggcatcatactattccttaagggaagccatttcccatagcgggtcagcctctcaatgctgttggatcctgtcataataagattccatttccatgtagccattctgcagggagcatcctatgtgtgtcctaataggctgggatagtttcctagggctgccataatatggcacacagactgaagagcttaaccacagaagtttagtttctcacaattttgtaggatagaagtccaacaacaagctgtcagtctggggtggtttctctgagccctctcttcttagcttggagatggctgtcttctgtctctgtattcagagggtctacttttgagcttttttgtgtcctaaccacccctccttataagacctgcagtcatattagattagggtacacatcaacaaactcacttcaccttaaaaaaaagaacctatatcacagacacacaatttaatagaggcagagtctggattccaacctatgctgttcctgatcttatccatgatgttattgccccagttaacatctggcaggaattaatgtatcagactgcttctgtcacccagccagaatctaagagaataagacatcagacaggtttatttgatggaggtataaagtgaagaaagaagggaaaatggagatgtatcatatgggtatgctacacagaaagtgcagataattgtcaaatagattattcatttagctcctaccagtttttgcttctacttgtctcctggtctaagattttgacgttgataaacctgcctctcttcctttctgcctttctgccatttgacagctccctgggctttcatatctgcatgttttcaacttggcttgtcctgttgagcctgtgtaacccagtccctcccaatgttctctgggtggggtggcagagcagctaatattaggcaaatatttctataactctttgtagtgtgctgtaagagtagatacatgtgagaacttcttttcaggcatgcattcttcttttcctccatcagccaggatcaacacacttgaaagactcgaatttgtgctcttctgctgtgcattcatcagtttatgtgatgcacaacacatacattttaaatgttcttaaaattttaaaatataattttgataagaggtctgcttacttgatttgcagaatcttaacaaaatggctagatggggtctttcaaggctacatcttctgaggagtttcattaacttaagacattatgttaaaaacaaaaatatagaatctaagaatggctgcattatgttgtggactcaggaataattatgtacatttgcatgtgttgcagagtagtcttttgatatcattgtcctttgctattcaatcctgttgaaggattagtaagagctctagaggcagcagctaaggcaaccatctctctgcttactggtttccagatctattttcatacacaatccagattctactgacgttcttctattagtcctaggttattatttcattctcagctgtaacattcacttgttttgtatcagtattgaagaatcctcagttcttgttttagttaaaagttcactttaattacagatctttaaactactaacatagaaaggaaattgctttcttccagtgtttttgggaaacacctagatatagctttatatttgtttgtttattttgctcacctctgaaattctgagccatggatatatttaaaaagtaaattgtaaattttggtttttgtgtttcaataagctccagtaactctatctttcaatattatcatccagctaaaggtaaggggaaagacataagggcaaacgatatgcgtaatggagaaaaaggcactgataacaaggcaactgaaaggtgactgcactggaatccagctttcataaaagtgagcccctgtgcagccagccttgcagggacactaatatgcaaaggaccagcatgattgacagtagcatgactctcatactcagtcccagagtttgacataaatggcagcatcttttaattgacttccatgcctttctgtcatcatccttcatgaacaagctggctaaaataatattcacagccaccagggaaaagcacatgaggtatcatcttgacagtgttcatttaagagatgtaactgtaaaatccaaccattttacatttctgcattgatgatcttgctgctgatggaccaatttcccttgacaaggttttccaaccatctctagaatacacgtattcattttccagtttatatactttttattacttaaaatatgatataatttttattttgccagctaatacaatacatatatcttcattacaagataagctaaataaaacagattaaaacattacagataagcctaacacccccttatctacccacaccaaccccagatacttctccaaagggactttcatctgttagctttctatccttcatacatttactatgaagtcatgtgtgtctctacatagaaattatgtagacttctttttttacaggaatggcatcagattttatgtattgccccttgttttgtgttggagatattttatgtcagtatatacggatttacctcattaaaatgatgaataatatttctaatataaaaatgtacttttagatggttaaaaaattacataaatggtgtttggtacatagttcctgagtaccatgacaacactgttgaaatcagtgaggtacatctgtatgtagtgaaatgaaaagatctctaaagcacagtgcatgagaaaaagaacaatttgtacattatgattcaatatgtaagaatttttaaaaatgcatgtttatgggtgtgtgtgtgtgtgtgtgagtgagtacacagacaaaggaggaagaatatatcctaaactgttaaagtggtttgttttgtttgagtgttggctttagattttggcatgtgttttcatctttatcaatgtcttatttgatgtatattggcagcattttggaaacacttagctggggatagctagcctgatgaaatattaaaccagaaattactatgtatttgtttcatgctcaatcatccacagatcatgcatattttattgtatttattttattcaacaataatgaaaatgaatcaagctctatctccatgccagctactatgtaaataagtaaataagtaaaactgtaatgtttttcaccttctacagttttccctgagttagctgcttattggcatcagttggtggctgttattaaacattaggatttctgtatcaactagattcattaaatgatgatttcatgtaaaaagagtttctattttcaaccctatataagagacagaacagagggaaaattatcctagctcatgtggcttcttaaccttttgtaaccatagatgataagttggaatttgtgaggttcaaaaaatgttccagtttggaattgtttttatgtatcattaaaagcaaagttaggaagtacaaaaccatgtggactttcttatataagtaaatgtggcttttcacattgaccctgtggtaagctaaattttgcttttattatgttattccaggtcccacaaattgtcagaactttgcaaatgtgtttctaattccctgacagtttattaggtaaagatcatccgatatcatctgagcagcattaacctccagtggaatatattattctatttgaatttattaatttcttcaagattccaacttacatagctgcaatacttatataactaggataactaaagtgcatttactgttagcagatagtctctctctctctttctctattgcacagtactaacaaggaggcataggcaactaatcttagaactgttctactgcccacttaaaagtcagtaaaagtgatagcaataagaattcaaaaagaaatccaattcttttaggagaatctaatctccaatagtctggaaaaatagtttaaacagagatggactaataagaactaaatttggttcagagtatggttcaaagatctgctcagatatgggcaactcactgtcttctccctttcctaaacaaagtgggctgtcattccagcaatcctgcccaccatagggtatggccaggtgagtaggargattcagagtgaggatctgcagaagagacacagaatattgactacagcttacttttctctaagcgtgctcatttctagtattcctgttgtcatgctcagaacaacaccaaatgaactgagaatgggaaagaagaacggaggccatcaaccttggccaagacaaagaaatattacaaagggagatgaacttcgctgtgttataaaagtagtgaagcattatgattcagaacacaggctttgggctaactttcatgtatggaatgacatggaaggaaggtcagttgcaaattgcctttttcctttggctagtgtttgcatggaacatctttttccttttttttttttcttttttactttcaatctatctgtgcctttttatttaagaagtgatttttgtaaaaagcatacagttgcatcagttttaatccaatctgaaatattctgtcttttaactggagtgttcagtacatgtacatttaatgtaattattgagatagttggacgtaagtctattatcttcttatttgttgacaaatttttccatctatttgttcctttatttctcttttcttgccttcttttgtattaatggaatatttatattttattttatcttctctattagcttttttggttatactttgggattcctttagtgttttcctagaaattgcaagtgcattgttacattattggtctaagttagtaattttgccaaatccctcaatatgtaagaaatttataacagcataacttaatttctacctcttactttgtttcctactgtcatatattttacttccagaaattataaacccacaagacttttttttttttttttttttttttttgagacggagtttcactcttgttgcccaagctggaatgcaatggcgtgatctcggctcactgcaacctccgcctcccgggttcaagtgattctcctgcctcggcctccgaagtggctgggattacaggcatgtgccactacgcccagctagttttgtatttttagtagaaacgggttttctccatgtcggtcaggctggtctcgaacttccaacctcaggtgatctgcccgcctcggcctcccaaagtgctgggattacaggcatgagccaccacgcctggtaaagacatttttatacttgtggttttcattggttaatattcatttatttttacccatttatttaccctatcaggagttgctgccactactagaattttttggttttgcttccatctgaaatcatttttttcattgttctgctgacaatcaataaactatctcaaattttgtctgagaatgacttatttcaacaaatacagaattctagctcagcactttgaagacgccttttcattgtcctaggttttccacagtttctattgagaggctataatccatttttactgtatttttttcttaaaaactgtgtgtcttttttgttttttttctgtaggtgtttttagtattttctctgtattttgctgatcagtaagttgatgtatgcatgtaggtttagctttctttttatttaccttgcctggggttcatgaaacatcttgaattgagggattactacctttcattagatttgcaaaattttcagctattatttcttcaactattgcttttatctcatcctttcattcttctctttctagaactccaattacatgtgtgttatgacttttgatcatgttctacatttttcattctctgttttgatctttccattgtttatttttcctctgtggtccattttggacattttctaatgacagatcgttggatttactattctgtcttccaatctttcaatctactgttaaacccttcaaatgggttcttaattttaagtatttatttatagttctaaagtttttatttgatccttttcatagtttctatttctctgtgaaatatccccaaatggataaaaatatgataaatactttatatttttatctgtctttgtccattatttcctctgttggttttaacataataatcctagcgattttgaagtcttcatctaattacttcaatatatagacatctatcttgtatttttatctcttgagtattgataaattttatgtgcttcttgcctatctggaaatgtttattgtctatgttatgaactgaatgtttgtgtgccctcaaaatgcatatgttgaagccatattcttagtgtgattttatttggagatagaacctttccaaaaaagaattaaggttaaatgaggtcataaggatggatcagatccaataagacgaatgtccttataaagagaaacactggaaagctctctttgtctctccacacactcatacagaggaagtcgtgtgagcacataaagagggccgcctgctggccaaaagaagaggcttcagaatgaaactttcttggacttcttaacctccataaatgtgagaaatatatttctgttgtttaagttacccattccggggtactttgtcatggcagcctgagcagactaattcagtaggtttgacattgtagatgatggttatacaggctctggatcctgttaactttttcaagagtgttgtattttgttttggcaggctgttaatttgctggtggattagattgctcctgtaaaggtctcattttagtctctgttgtagggggttgtctttcagatccacccttagtcccaggttacagcccttctgcctaaggcattaatggtcctcactcctacttcacaaagatttctgaacgctgactgggctgaaactcggatgtcttctcagcactcagagaactctgtaattcacatcttgggattcaggagctttcagactttaggcagctgttcttttttttttcagtcctttttttttttattacactttaagttttagggtacatgtgcacattgtgcaggttagttacatatgtatacatgtgccatgctggtgcgctgcacccactaactcgtcatctagcattaggtatatctcccaatgctatccctcccccctccccccaccccaccacagtccccagagtgtgatattccccttcctgtgtccatgtgatctcattgttcaattcccacctatgagtgggaatatgcggtgtttggtttttcgttcttgcgatagttcactgagaatgatgatttccaattccatccatgtccctacaaaggacatgaactcatcattttttatggctgcatagtattccatggtgtatatgtgccacattttcttaatccagtctatcattgtcggacatttgggttggttccaagtctttgctattgtgaataatgccacaatgaacatacgtgtgcatgtgtctttatagcagcaagatttatagtcctttgggtatatacccagtaatgggatggctgggtcaaatggtatttctagttctagatccctgaggaatcgccacactgacttccacaatggttgaactagtttactgtccaaccaacagtgtaaaagtgttcctatttctccacatcctctccagcacctgttgtttcctgactttttaatgattgccattctaagtggtgtgagatggtatctcattgtggttttgtgtgagatgttatctcattgtggttttgatttgcatttctctgatggccagtgatgatgtttaccagatgtctcagagactcaccacgcaatgtgcagccctgaaattagccaagatcctagggacatttccatgcaaatatctgagcttctgtctccgtggctgctgccctttctgatagccttctgaacccagttgctttagtagccctgaaccctaatctctcactgatgtttgggcttcactttcatggatatgggcccttaaaatgcccccaacaagaaaatttgtgtgcctgtgaggctaaactccagtacatcccctctgtcagatgtgcagccctgccttggttgtttgccaatgcttccaaacagctattttgtatattttggttagcctttatagttgttcccagtaaacaggaaagttcaatctcagctaaaatcagtcttgcctttgcctaatatttaactaaataaatggtaacagcaattaaatactcatcccaaagtcaaaagataatcattagtagcaacaaaataaggaaatgagtataatttcttgccatgtaacttcaaaatgaaataaagaaaataaacgatcatgatatagaaagtcctggctttccagaagcagtactgatgagtgatcaaatcgtaagtattatttctcaccagttaagaatgtctgcaaatttggagtgaaatgaactgagcaactacacttacccttttctgatgggaggagagggcagagtgagtagtcatagtagaaatggcttgggagagagagtagagggctccaagaatgaatgaagagtgcaatctcaggcttaagggaatctttctgaaacagtatgtgatcctgatggcctgcattaaatcctgagacagagtctttagtaaaacctgagaacaaaagcagagcatgtaacctctctcagaggctgcacagagactcagaagccctcaccttctcatctcgggatggtagacagaatgcaatgctcaccttcaaaccattgctttatagaaaaaacaaacaggcctcagacaaggtaggaatgaagtcaagcacaattaactgaatttgtatcatagcaaatatgagtcttgatctaaaaaagaaaccaataataaatataaaaacacactacacaggaaaaaaaaggaggagaaggtcattgtaagcaaaagtaggctaataacaaatttaaaaacaacaagaaaaggaagaaacaggtattctcaattatacaatacagcacctgcaagaccttcttgaaaacattgcttaatgaagatatcaagggatgaatcaaaataatcaataatagaaaaaacatgataaaagaatcaatgaaagaaatttattctatttaaatatagaactaagtttaaaccactttgggaatgagagttataagtggaaagtgaatgttacaaatcttgacaatgaacaaacgaaacctgtgtaaaaatatagaaggagggaagaaaaaaagagacataataaaagagctattttcttctttttaaatagcaaacagtcagttgatattgactaaaacaaatatatgtttaagcataatgaattcagatctggttttatgtaataattcaaactgtaaaggaatctttagggtgaatatctcatgaagtaagtgactatctcatgaagtgagtaaatatctaaagtttggtcagcctttaatgttcactttaattttgttatcttctgcttcattaagtgtacttttaaattaaaaatagcatctacaggatgatgacacttagcatatctgtgccatttcacatacctgtccatcaggatgtctgttttctacaatatmtggaatgatgatggtccccttatgttaacaatggttattatttctggatagtgtgattctggggatgattttctacatctttgtatttttctactgtttgaattatttataacaaacatgattaacagctacacagacatacacacacacaattccagtttctaacatgctttgtggttatatcaacacttcgtctacttgttttgtgttagaggttttagctgaagcctaaggccaggctaagagacttgaatgtgacaaggacttcccctttccccaggagaattcttgcccagcaaacatatgtcatggaaccgtaagtacaaagtgtcctctgcccttcttactgatccatgaggcaggcagcacaagagagcgtgcctctttttgctgctttagagacaaaggaagcagcccgcagaatataggatacatacggaagatgtaacacagtgggagtcaggctccaagatagctacttcatctatcttagagcagcacatcaagaactgcagatgtgtatgcaaatgcctccctagttgagggaggaatgctgttgttatatgggctaagcaggaaaatggagagaatcaggttccataggcaagttccaaaagaactactacaaatgggacctggcttgggccctcttcgaaaacttactattattatttttttcttgagacagagtctctttttgtcacctaggctggagtgcaatggcacgatcttggcttgttacaaccaccgcctctggggttcaagtgattctcttgcctcagcctctggagtagctgggattacaggctccttccacaacgcctggctaatttttatatttttagtagagatggggtttcaccacgttggccaggctggtctcgaacttctgacctcaggtgatccgcccatctcagcctcccaaagtgttgggattacagatgcgtgccaccacgcctggctaattttttgtatttttagtagagacgctgtctctacccatgttgcccaggctggtcaataactcttattaaataagagtggcaaagtgggaattccaactcaagtctctgtaaatagtatatttacagatatagggtcacagatttttttttttttattaaatcttgccctgagtataagatttaatgggggaaacaaggtaacatgtgaaacctgaacaccttaatgccacacgattccatgtaattggaattctgtaagattctatataatgaatctgggtaattattatcccatcccagacttcaaagatcttctgcatgctaagacaccaaagtctctctcttttccaggcctctttcttaaatgtcgcagccccatacattcaatttcttactggatggtctatcctaaatccagtatgtaaaaaagctcaaacatatcctatcacaacttcttctttatcttaattcattcaattcagtaggtattctttaactacctactatatgccaggctgtaggtatacacackgtatggatgatgctgggaatacagaagtcacacatggtacattcctggcttctgggagctcacagattaatggagaggactaaggggmagaaatgagtacaacacaaacacaatgataagatcacagggtcctgtgagatacagagggaggcatctaatccagatgtatgtggtgtggagggaggggtacattagtgatcaggaaactcataaaccatacaatgtttgagctttctcaaagaaccagcagggcagctcctgctcagctaggcaactcctctttttgccatagatctagctgttccattcagccattcactcgtggctgcagtgaccttccaggtcagtctggactctggaaattgcctccatggttacctcccttcccattgatgacattctacagatcgttcagtttgccctaggcccctgtctgttctatataacactggttttctggaagccgtttggtatcttggtaagaatacccagatttataagggaaaaacaataacataagtgcctcctgcttctttgctcagatgtttcagtttttgggagatcatttagcctctctgaagctcacctcctcatctgtgaaaggctagtaattataatactagttcttacatgaagagagggtgtaaaaatcaaatcagatgagggatatgaaagcaggtccagcacagctcgcatattaattgtctttgttagggtctgagcataatggagtatgactccaatgcaaatcctataaatgctgatcctgtaaggaggacgagaagcttttggaactttctcaaatatatgaatagaatttcaattgaattccttgtttgtttttcctagcatctctcagttcccaatccagtctggatttcattccagccatttactagccttgcgttaccttctccttcagtttcstcttgggtatcatggagataattaaagatacttcaaagagatattgcgaggatcatttgaartaaggaatagaaaacaccacgtagtgatgctttcttaggcaaggttttgaccgaggaaagccgcccttcggtgggagcctggaggcttggaaataaccagtgaaaaagggaagcccgtcttgggtgcagcacgttaaagacccaagctcgcaagcctgggaggcagcgcggcgggaggagcctgcccctgcccccagtagggggcgccgaagcgccgcactgcagcatcctggccgcygagcgcagcggccttggccgggctcagctcgcgtcctgccgcagtccctccgccgctagtcggagcgagcgcgagtgaggagacccccgccgggccactggcacttgcttctgcggcgagtcccacccacgaccgcagcccagcaactcgcaaacgcaacctgaagcctgggctgcgcagtgtgggagggcttcgcgatcttgggggacccattccgaacttgcagaggaccgtagctctcctggcctggagagtgtgaacaggtgagtgtcacgcacgtgtccaggcagctctttcgggacgacttcctgcagacccattccgagccctgagcgcgctcggcctctgagtcggtcctcttggtcaccgggttctcctcccagggcggctttggggttcgctgcgagggagatgtgaacaccagcagcctatcttgacagggctctcctagctgagagggaaaatgcccttttgacttaaggctgcattttctccctagcctgaaagcaagtgacttgcagtccacaatggatttgtttattcttgcaagatacctgttgagttcagagcaacattaaatagccaaggggcttatacaattatcctggtttgctgtgggtactgcgtagtgataagaagaggaagaattcctagtaatgagaccaggaaaacttgatttcagaaccagagaaggggaggccaaaaaagaagagaatctcatttccaggcctagactagggtctttgcttccctaaatagctacacttgattttgatgagcgcatgcaaacagaagttccaagcatgattaccttataaagacgcttgcttgccccacccccaagaggaagtagaaagcatgaaccttgataaatatagccttgagaatgatttattaggaatgaaaactttctttaaataagtaagtaaataaggttacagttatctaaatatcataggtctaacagagtgtaagctcttcgaagggaactacttttatttgtatgtgcatagcgtgaaagtgtggaataaatcaatgaatgcatcactaataatacaggattttagctagcgtttttcctttttcctttaatttatgtttagggaaaaaaaaacctacaccttcaaactaaataggtatgattttacctttagagtgatagcagctgagatgtttttgtcctaataagcaccatccacataaaaagtgaatggcaaatttcagccctactcagaatatttcagcagaacattaggacaaatggattttcttagatccacgtatggaagctctcagattatgaattatttggaacatcagaaacttggcaacagtttacttattacaacaatttacatatttatttttgttttctatcttgtcaaatgtaacttttcacattttcatgtgagaaataaaatgttgaagaactcctgtcagttttgtgtcttcctttaagtgatttttctaaacataaaattaggttgacaataaccagctgtatctttattaggttataaatggaaaaaatagcccacacaatttctctttcttatgtgaaattcctatgcctctggggccatttgggagttactaaaaaatgtgacttgtcatttttttaaaatcacatttgatggctactttcatgaaacattaatcagacagataattacttgcattttatatccatgtatatgaacagttttgcatgaaacaaaattattgtttayactagctgcagacacttgcgtgttcaatgtttcaaagaaatacttgccagcacctcttctcatttataatttaaatagttaatatatctccacatattatgtttctgtgatgaagccctgaaccttaaaaacatagggccttttcttaatgaatgcatctaaagtgacaaataaggaaatctttttatctttagccaaaaatatgggactggacaaattgcagatgtttaagcttctggtttttgctaataatgattacttagacactttgtcattattgaggatgaagtaaacaatagctaatgttaatgttgatttttccttccttcagaggaagctctggcactttgaaaatcagcaaatacaaaaccttattaggtacaggatgatagcttaaatacctaaggaagaaaacaattacatgataatgtctttgtagaaatactttttcaggcggattttcactttttaatttctctctcaagaagctctttgtaaaaatttatagatggaaaaatctggcaggaacatttaacacatttagataacatatttgtgtttaaaacatctttactgccttgaaaatggaatgaattatgcagactggtgtgattaagattaacacgggtaaaagtgctgtgctgtatttaggtttaagccattgattgcaaatgttcggaatgagggggtctgcagtccgtgtaaaagatgtgaggcttaatgtgattggctgtgctacagtataaccatggtgggcagattaacgatagtgaaaatctcagggaatttacaccgggtcagtttgtcaggtcatatctcaaagtggaatgcagtggacaccatgcttttagagtgattaagatgttgaggaggcaatgcacatgatgaaaaagggagtgaaggtcaaaaaaacataaacgagagtgtacattccgggaagaacaagtggacaggctgggcctcatgttcctagaaaaaagaagcctaggatggagcaaagggtcctactagatgctaggatccttgaacggttctgagtgaaagaaaaagttgacttgttttgagttatttcatagagagaaatgaggacaaatgagtagaagccgcagggagacagtttagagctcaatattagaaagatagttcctcctaattggagaaatgaagcagctttcagaagtaatgagcccacctttcatacctggaagtggtaagtcaggcatggaatatggaatgattgttatgtcctaaggaaagattcttgctagaagaatggctagaagatttcttcagatgacccccactccagcccccaccaccaccaaagctctttccaaatttacgtttccatgatcctaagaacctagatgtcactcctaaagcaccaaactaaataagatgtgcttactttgtacataatgttatttcccaagctttaagacagcactataaacaaatttacttgaagtcatcatagaaaaggaataacttggagcatggcatttatcgtttttgtaccagggcattgtgtccagcaaaatatagaaatgtaatctatgtattatatattgattcctagaacatgtgtatctgtatctgtcacaggaattcatcatgtgatcaagtgtgaattgagaaaaaatttaactttgagatgcaaaattgaattgtgttgcattggagttgactaatatgaatgtatgttattcaacccaaagagacatgaagaggcccaaaagtgactctctccattgccccactgcatgtgtttgtacactgaatgyttacagatagatggtaaatgtgtgtattcacttttactttcagttactatcaagaatcaataccttcataagaaaatttcttgaggaagtactttagaaatgctattgtgtgtgataatgcacgttttagtaccaaccagatccaaatccaagtcctgaatctaccatttattagttaaatcatttacagtaagttaccatagacttctcacaggatagtggtaaagatcaaaccagaaaatgttgaaaaagtgaatggtggctggcatatagtagatgctcaataaatattaattcattttccagtcacttatgaattcccaaatttcttttgtttaaggattgtggactcttccaagattcacaatgatayggtgaatccaaagactggaaccaaaaagatttactcagtgctttagttttaacaacagtaaattgtctaccaacacccatcatggctaaaagtgcggaggtcaaactggcaatatttgggagagcaggcgtgggcaagtcaggtaagattttcgttgtggttgttatagtgtgtgtgtgtgggtgagtgtgtttctttattactgtttcttgggattgggcaggtgagtagttggtattcctcctattttcatttcttactcttttagataaagtctcttcatctagaacttttattttgcgtaatcgactgttacgtatccttttgcttatttatgctgaagtagctttgctgataacacacaagataaaggatatatcagaggtcttggcattctgatttttaacaacctccaaagaaatcagatgatggaaattaaaaaatatatatttgttcttttctctatgtatgagatcttgagggactgattttacatctcattcattttgatattctcagcaaacagtccagtgtcaagcatgtgttaggtgctttaaaaatgcttaagtgaatctagctttatcagaaacagaattgcattattgccaaacactcaaaaatcctgagaggattcctgaaactttaggagtgcatgctctcaagcaagatagctattgcgaatgcctctgcagtgaatttaaattagcaagttctggctaacatcagtaattcagagactttgttcactatctgagaaatcgctagcagacctttaagattaagggtgaaatggtggaagtgaaaaatgtacctgctatctaatttgaaaaatacatcttcgatcttataattaaagaattccaaagtcaacgttgctgaaacattagggcagcatgacctttcagggtaacctcttgccttagtctcttactggaggaaggaaccataattaactgtacacagagcttttggttctcaggaaaggactcaaacagatatctggtaggtgcatgtttgtagagggaaacctgtttggaaataaactgtataatccaatacattaggtaatccacaaaatcttagacaaatacacataattgctttttaattctgtgaccaacctttcttttctaacctgctgtctggtttaatttcagcagtaatcttccctcttctaagtctttgtctctcgtttttcttttaattttctcaagagtactctttcctgctaccaccattttcttctgtttggtttgctcttgcctctggcagaaaccacacaaggaaaatagatagttggcaaggctaagaaactgccagccttcacaagattgaagatagttaaactcctccctgttaatctcctcagtgtttcctaatggcgtgagaacctaatttctgtagctggtagaaggatctggagaatgaggaaatgattcctgtgagtggaggatggagggaaggcagtgtgggagaagatgtgcactgccagcaagagcttgtctaactccttgtgagtgcagggtctaggcttgaggctgaccatttattccttcattccagacttccaaaggcaataagggaaggagattttttaaaaccttgtatcatttgttaaaataacctacatgcgatttaagaagtcaaacataaaaatgaaaactcagctgagagaaccacgtagctgtacgtgcgtccatccgtttcccatcttcatgatctcggagcaagctgggtgtctcctcctgtcaaggctcatgcatcagcctgagctgggatgcctgttttcgttgcctttccccacattgtttcaattattcctctcattctcacctgaccatttttcctcacgcatgtcttcgtccactgcttcatctttttcttttcttcaagcttattgaatatgggttcttcccttactgtcttatctttttttaactctcccattcattgcttaaaacatagccatcttctgttacaaccatgctactgaaactgcttttgctaaggtcactaccaaacaatgaccaacacatctaatgatcattttccagttctgatcttcttagacttctttctatcatcacacagctgcttattctttcctgaaattccttccttcccaggctcccatgacatcacactctttggctttgctgctctctctccgtagctcctaactagctgttttcatgggtttgctcttcgtctgcgcacttctcaaagttgaagcttccagggttctatatatcatcctcttgcgtccttactccatacactgcccctagaagtgctactcacacccaaagctgaagataacacctgcacagagagatcaaattctgctgacctgaattttattttatgtaaaatgcacaggttgaaattgctcactaagtttctttccaactctaacattcaaatcttctttggactgttttctctatttgccttgaatacattccaccatttgtgtttgttttcatttaggtgaaaatgacaatgacagactacatatctttaacaattgcctttttgtctgtcatctataaacagacagtgttttcctatgtcaacattaaattatttttctgagacctgtaactgcacctcacattttaaaagtagcactcgtttgatgcatgggtgaaaattgtgaaacctttttccatagttcagtgaaaacgaccacaaactacttcatatctaccaattttattttaagacactgggtctccctctgtcgctcaggctggagtgcagtggcatgatcatagctcactgcagccaccaactcctgggctcaagagatcctcccaccttgatctccccagtaactaggactacgagtgtgtcctaccacacctggctcatatgcaacaattttgaaaatagactgcaacaatattgaatttatgttgattctgattctttgtgaatatggctatttgatgtctctgcctcatcattgtatcacacatttatctttctactgcagagactttatcagtcttataggtaacttttgcttgtttaagtctgcaagaaattatacctgctggaatgtaattcggtagctcctcactgaattgtttcagaggcttaagtcttacctgtcccctctactttccccacacttaataccagtaggaattgggggtaaataagaccatattgcccatttgctaacgaggagtcgtatagcttggagttaaagagtgtgagcttttgtttgccctgtgaacttggcaactttggcaagttacttaaccagtcgatttcttcaactatgaagaacatataatagcatctcagttgttactaggattgaatgagttgttacatgcaagtgttcctggcacattgcaaatgctcaaaattagcttatattattataatttgttaaggtatgcttttttaatttgtaagttccacagtgaaaacatacaattaaagatatacttgcattcaagtgagtattttggttttcactaagtcagacagcttataaggtaaaaactccacacacgcgcacacacacacacacacacacacacacacacacacacatactttctctgtttttctctttcttgaacctaaaatctggttaatgtcaattatagcttgaccacagatgatcataacaatacttcgtatggcttatatttaatcttgtaaaaagccagaaatatattagtgtcaccaataaattaacacttttaaatttgaaagtgcttctggtatgtggcagatggcttcctaagcccaggtgatagataggccgtctatatttaaaacagaatttaacatttaccagaactttttcattgacagtttgaccacagacatgtcagcaaaggcaaaaatttaataatgtgctgattactaaggagcactgataaaacatgtgagggatgtgtgtatgtgcacgcacatgtgtgtaatatataagtgtttacatggtctgctgtattgggggaattcttgttccttctaagtttatcttgcagttctgtcttcaagtgagcttgctggcatagggatagtacagtgaactctgtggggacgctgcaaagtgtagggtcatgatttcccagccctttctatcttttcttgccccagccgggtaaacatttactttcattggctaagggtgaagcactaataatgtggcatgcaaggcacagatttccttacttgtgtgcatcagcctatattttgacaagctccaagtaattaaagtgataagacttgccaataagcctagaatgcacacatttttatttaaatgcttcttgtagtcgtattattcagatttgtagtaagtgtgggagggggctgatagagaaacaactgaaattgtaaatttagcttcacagttgacattctcattttagaactgaaatattgtgtgccacagctaactatattgcttgaaagggctagtcttaaagttaattgagtaatgctatcctgtaattcaaaagccaattggtgcactcatccatgaaggcttaagttcatagactcagattgccaagctataaactggatgccaaacacaaacaagcttgtgatatttttttccgtggcacaaagagaagtgatttttcatcctattttttgttctttttcttgtctgcttttttctctgtcaattataaagaagtttttaaaagcttttttcatcttatttttaagtgggacagggactattctaattttaaatgtgacttttaagataaccgtcaaaacctgctttaaaatatatgtatacttcaggctgagatatatttatgagatctcacatatatataataaaaaaacagaaacctcagtcgcatcttgggtaggtcagttttcttatgctatagaactacattttgtgttttagaacttcttctctatttaagtagctatataccaatttttccccttcctcagactaagtggcatagtaggatgctttctgaatattgttttcaaagtacttttaataggagaaagaaaaatctagggggtttgggatgtgtaagcatctcataatcatgtaagtattttgcatgttttatagttatataaaatatatgcaaaacttactattaatccctaatatatctatgtttgcttaaacataaaaacaatctgccctaaaactcagtgactaaaatggacttttcaggaagatataaaaagtttattcgtggccgggcgcggtggctcacgcctgtaatcccagcactttgggaggccgaggcgggtggatcatgaggtcaggagatcgagaccatcctggctaacaaggtgaaaccccgtctctactaaaaatacaaaaaattagccgggcgcggtggcgggcgcctgtagtcccagctactcgggaggctgaggcaggagaatggcgtgaacccgggaagcggagcttgcagtgagccgagattccgccactgcagtccgcagtccggcctgggcgacagagcgagactccgtctcaaaaaaaaaaaaaaaaaaaaaaaaaaaagtttattcgtggctctaatatcacataggtttcaggtccacttgaggaccacagatataagaagtagcctcggctgtgcataccacgtgaatgtgagcactgacaacaaccctgtatctcagtttctacctccttgaggacccaactagccattaaacttttggagcattattttctaagattctatatatttttcaccatcactcaaggattttgttttatttttagttgacagagtaactataaatgtttatagagtataatttgatgttttgatacatatatgcattacggaatgatcaaaccaggtgaattagcatgtccatcccctcaagtgtcatttctttgtagttagaatatttaaaatcctctctgttagcaattttgaagtgcacaatacattattgtgaactatagtcaccattctgtgcaatagatcaccagaacatcttcctcctgtgtaactgaaactttgtaccctatgaccaatgccttggttttgcccactgatacccctcccagtgacgttaaccactgttccactctctgtgtctatgagtttgacttttttagattccacatatcagtgagatcatatggtatttgtctctctgtgccagacttatttcacttagcatcatttcctctatgttcatccatgtggttagaaattatagaattttctgcctttttaaggccgaatagcattccatagtgtgtgtgtgtgtgtgtgtgtgtgtgtgtgtgtgtgtgtgtataaaatgacattctaaaatccatttatccattgatgggcattaagttgttttcatgtcttggctattgtgaaaaattctgcagtgaacatgggagtgtggacataagattatataatctttgtggtaaatttgctaaaaacattaatcaaggtaagaagaggggcagattatgcttccctctgcccatgtggatgcagagcttgcatggccccttaacacatgtgtgtatgtaaagaagcttttcctagttggtttatgaaattgaaggactaccagaaatcctattgatttcttgtgtagttggtggttagaggaataattgttttttaaataattggaccaaagggagggaggtggttttgagacaaatttgggtgtagttagaaaaaaggagcctttttgttgtcctaaaatatagtgctctggttacctgtggctttacagggtttgtatcttcctttacctgcaaagacagaaaagcaaaaggaggcaaacagcctagatgagtccattgtaatttgttttttctaccccaagaccaattaaaccatgttttcaaattgcaggtatatgcctacgtatatgtataaaaggcagacctctgtgcaatttttaagtcatcactgacctttcttgtatgcccaggaaraaaaaagagaaatggtgcttaagagggcataggaaaataaaagtaaacaaaaatctagaaaaaaaaatgaaagtgaattgttactggtaggtggctaagtactttgcaggttgacaatgatcatttcttagttaaggcttttctcttaagaaaaatatgaytgggggggaaacaatactggaaaacaaaacaaaacaaaattaagaattatttctcaaagccaaaaggacatatctctgttcttgcttttttattggaatatattattaaaattcaattgtcctttattttaaactaatggctaatttattcattgcaatgtttctgtagttaaataccagctatctattaattccattttgatcttgacttgttttcttggcaacttgaaaagactaactttaagtggagggaagaacattttaaatcatccttgtaattcccctttttattcctggtatttctccaacttatgggtttggggaaatcagccagattttcaaggtggtactggccttgaagccaaaattccagtgcaaatgcatgtctgttgctacagctgcttttgaaaattgatgtggtttcagaaaaacacataatttcttccatcccatgaaaaatgagttgctatattgtaaaggcagggcagtctgaaatagataatttcagcatgaataaacaaatatgtaaagcttatccatacatatgagagatacatgtgagagagagatccttagcgagatcacccagcttgttggtgctagagccaagtctagcattccagtctatgactcaatgcaaggcttttgcaactttgctatcaaaggttttcattttgtatcattcagttattttccacatcttctcagatattttatattagaaaatgaaatgaccattagaattttatcatacaaactttgtaaaacctgatggattttgtttttataagaaattcacagtaaccaataaataaccaatgcatggcaaagccctctgggagtaccaggtgtgttatcaaccaaaatagccaaaattctcagcaacttttatataaaagagcgttctcctgtaatgcagtattctatttcttatagcctcggatcaagtgttaaaaaaaaaaactgatgaatcatcttttgctaaagaatatgtttctcattgttatataaatagcctacattacactgtgtcctgtccttatgatctaataatgaagacgcacacaattgactgtaggattagaaccttattttaatttcatccttatctccttttattcatctgcccaatgatggattcaattgttcttttttcaatttttacagaatgcaggtaggacaaaatgaaattatggcactgaaggtactttgaaaaattacaagtctgatacaaatgtcggcttaatagtaaggttctgttattattgatcttcatccattttttccccttaygttccttaacatttgtctttggagaagcagcatggtgaattctctggstgtccgctactgaaggccagatgaatacactcagtccagcagttggctgtttgtgttcctccatggactgcctagcagggaggaatgtgacagcatatccggaggttgtagtttcaatgccttaggaatttttggtttcaaatatgtcacatgaagagacattgagttgatttttttttttttaagtatcagtatgtaaagtgggcagtcaaaaaggagaggagggtttaggacaataacttagacttacgccttatcagagaaggacacatggtgtgtttatataatgttttaataatcaaatcttatcgttataaaaattaaagctttaaaaccttctaatatttttgccagatttctcaattaacatgtatgtacatgtatgtatatatgtgtgtatttatatatttccctacaatcttaaaatatatttttattcattcattcagttgttcattcaacaagtatctgttgagcaccaattttgagttctagaagagctgatctggtatccctgcatatcgtacaggatccatgtaccttccaaaaaggcaaagcagtagctgtttctgttcattatacctctagagcctcacacaatatttgacacatactaggacttaataaataaatgaaaaatttgaattagactatgttgtctagtttgccacacgtgctttaaaattatatcaagggtcatatattttaaatagtctccttattatgaccaaagtggtttccttgcctgaacttgactgtctccagtgacaggaatgcaacatgaccggaagtagatcattcttgcacatccacctttgcacaactgtattagtcagggttccccagggaaatacaaccaatagaatacacacacacacacattcattcattcattcaaagcaattgtctcttttgattgtggcagctggcaagactgaaatctgtaaggttggcagggtggaaactcaggcaggagataatgttgcaatcttaaggcaggatttcttctgctctaggaaacctcagttttttcacttaaggccgtccaagaattggatgaggcccatccatattatcaggggtagtctcctttactaccactagtctactgatattaactacatcgacaaaacccttacattagtgtttgattgaatcaatggatactatagcccagccagattcacacattaaattatcccaacagttcttcctgtttgttgcttttccttctttggaaccaaaggtttttctgtagcttctaggcattgactttaactttatcccctcagtgtcacgtagagcatgataaatccctctccttatgacagcccttcacaaaattgaacatagccagcatgccttgactcatgcctgagtctcttcttctatagtctagctacaaaaagtctcttggtttacccctgtgaggttttcaaagcatcatcctctctctttcgctctacaatgcactccatgaaatgtggacctggaatcaaagagacatttcagatgtggtgtacccagaacagatcagagcacaactgtgattttgcttctagatcctttgcttctgctgaggcatcctgaggtcactgttggtttcaggataagagacaacataatgttggctcatggggagtttattgcaaatggagatggttgtttttgtttgtttgtttgtttgtttgtttttaacgtatgccattgctgagccaaaccttcccaaatctgtacctgagcaatgtgtgtgtgtttaacccaggtatagatgttcattttcatcctcttaagcattattttattagatttaatcaattctcctggtgcatcgggagccttttggatccagcatgtctcttatccctccccactttctatcatctggaaatgtttgttttggaactaatgttttggaactaatggacccttgtggcacttgaatcacagaattttccactcaatgagctattatttagttctcgaaacgatgagaaattctagtgaaattatgtcactttttgggtaacttacaactggttaacaaaagcataggtctttggttcttggtgcaggcacgttaacactgtatcacattacttctgtggtcagtaaataacttctgtttaggagatttgccataacaaaggtgagctggggagaagcttcacagttacaatctcctgcttaatattgtattttatgtctcttgtttctctctcccatgcttttcttaggaatcaagacacattgctacagaaagtgcctaacagtgatcaaccattattggcccaaatatctatcctatgcagaaactcatttcccaggcatttattccaagatatgaatgaatacttttgtactaaaatggctgaatttatgtgatttagcactgctgctgcaaaccagagctgagtttggaaatgtgtttttttattgggttatagcagttgatatcaaactttaccatgcctcgggatcaccagcagagcttgttaaaatgtatgtttcaggaccccacctccacaggttctgactcagtaggtctgcaccgaagccagagaatttgtatttctaacaagttcttcagtgatgctgatgctgctagtctaggacccacattccgggaatcactgtgttaagtttgctgagtactcaatttccatttgaggtatgtgttttcagcttcagaaaagcatatagctttttgtgagctgcacattcagcgcattgagtgccatgccctgttgggtgtactgacactatagtaataaaacaaggagctctctgcctttatggagttaacattttagtgagaagagacaaagtgagtaaaaaaatattctgtgggccagagcacatgtgaagccttcctgtggttccttaaaactagaactttttctttacatcatagaagggtgaattttgtttaaaaaataaaatgtaagcctcaacaattgtgacaggatgaactttgattttaagatgatactttgtgctatatgataatagtgggaagggattgagctagattgcatggtaagtgtttggggattaaatatatagtctatgaccctgttacaaattttctgctgatagaatctcagtagctgtataggagttgaacccataaccttgagttattgacacctcgctccatatagttaagtcttagataaaaccaaattaaagtcagatcgtttttctttccccagtatttggaaaaatgatattaaattgctctttgacagtggtatttataaaacttatgcaatggtagatagaaagaacagcagtgttgagaaaagttcctaagtttccactgttttaggtacaaagataacgtcttttcctcaatgatgcatttcctgttttttaaatcttttaaaaagttctttcttgttttgtgccattggacagtaatttaagaggtgaagtcaaaaagaaaaagtacaaataaaaaattgtgactttgtctgaaaagtaattgagttatttttgcactaagaaccccataaattacaactgaatctaacaactgagccagcttcctagtcatttggcaacacatgttgagtttgacggtttaaaggaagactcagccatacatggtagtatgaataacagtgatctgttccaaagtctgggactttcttttccattcaaatatttcgtatcttgaatctacttcttagcggttctccaaaagaggtaaaatcaggaacacagtacatgtgaatcttcaggtcccaaaatttaacccacgatttcttaggtctcccacttatcggtttacaaatatttgtgaaaatcctactgtgttcctaattcttccaccctttcttcagtcctccctctataagcccaataaaatgctaatatttgtgggagaagtccaaagaactatgtaaattttttcttgtcctcagggaccatagtgttttcctgagcgtgtataacttacaattcaaaatcagccagtgatagtatgtattcagcagaataaatgatttttacaactttttatattgaaataatattagataattatacagagttgcaaaaataatagagagttcctgtgtaccctacacctaattcccctcaatgatgatatyttacatgaccacaatgcattagcaaaacaaggaaattgatgtagatacacaattaagctacagatcctagaattattgttttttaactcaattcaggcccaaggcctgtttgaaaatataactagggaaggacagagaaggagagactttaagaaatgacagagctcattatgagtttttaaaaagtgaaatttggtaagctatttattatcagaaatgtacatcttgtgttatgtgcaatttagctatttaaattgtatataacaaagttttagccatttttttcaggccataaatgctataggagtcaatgggaagaacagaaatcagtgagaaatatttggggaggcctttagggaggcagtaagtttgaaatactgtaaattcagtgggatttttatggtaagaagtggaaaagcttttcctcttatttattgtatttcaaaattgtattatcttcatagcaattcacatgttattaatgttggaattagaaggagaaaaagaccagtgtcatgaagcttttcctctatcttttttctaggggttttacacttccaagttttacatttaagtctttaatccattttagttgatttttgtgtatggtataagatagaggtccagtttcattattttgcacacgaatactgaatattcagttttctcaacatcatttgttgcagagactatcctttttataatgtgtattcttagtgcctttgttgaagatcagttgaccatatgtgtgggtttatttctgggctctctattctgttctgttggtctatgtgcctgtttttatgccaatatgatactgttttgattactatagcattgtaatatagtttgaaatcaggaaatgtgatgcctccaagtttgttcttacttgaaattgtgttggctattctgggtcttttattgttccatataaactttagaattacgttttctatttctgtaagaaatagaaacttgtattttggtgggaatagcagtgaatatgtaggtttctttgtgtaggatgaacattttaacattataagtcttccaattcattaacacaaaatgtctttctatttatttgtagattccttaatgtctttcatcaatgtattatagttctcaatttataagtcttcaactccttggttaagtttttaagttttccccaagttttttattctttttgatactgttgtaaataggattgtttcttaatttatttttgaataatttgtttagtatatgtgcaatcgttttttgtttgttgattttgtaaatagtattctacagctttactgaattcatttattagttctaagagtgtttttggtggagtctttagggtttgctacttataagatcatgtcatttgcagaggtaattttacttctttctacttatttggatgccttttattcctttttcttgattagttactctggttaggacttccagtactgtgttgaatagaagtcataagcatggtcatcattgtcttgttcctaatcttagaaaaatagctttgattttcaacattgagtataatgttagctttggatttgccatatggagtattacactgaggcacattccttctatacctagtttgttgagtgtttaatgatttcatgaatttgccaccagaagcacagatgacaaagcaaaaatagacaagtgggactacatcaaactcaaaagcttcttcagcaaagaaaacaaacaagcagtgaaaaggaaacccaaaaatgggggagaatatttgcaaaccatatgtttgataaagggttaattttaaaaatagataaggcactcctacagctcagcaaaaacaaaaacaaaagtctaaatctaaaaatttaaaactgagaatagtgtttaaattgacatttctccaaagaagacatagatatggccagcaggtatttgaaaaggtgctcaacatcactagtcatcagggcaatgcaaatcaaaactgcaatgagatatcacctcataactgttaaaatggctgttataaaaacagcaacagcaacagcaaaaagacaagaagtgttgatgaggatatggagaaattagaatccttgtatactgttgatgggaatataaaatggtgcaaccactatggaaaacagtatggatgttcttcagaaatttaaaattagaactaccatatgatccagcaattccactcctggatatatgcccaaaagaaatgaaatcagggtctcaaagagaaatctatacttcagtgtgcattggagcattattcagaatagccaagctatgggaatgattcacatgtccctactgacctacaaatgaataaagaaaatgtggagtggatatatgtaatgaaacattattcatccttaaaatgaataaaatcctaccatttgcaacaacatggatgggcctggaaaacattatgctaagtgaaataagtcagccacagaaggacaaatacttcatgattcctcttatataaggcaaatacaatagtcaaacttacagaattagaaaatagaatggtgattggcaagcatggcagtaaggtgaaagagggagttgttattcaatgtgcataaagttacagttattcttgatgagtaagttctggatatctgctttacaacaaagtgcctttaattaacaatatggtgttgtgcgcttaaaaatttgttaagaggttagatctcatatcacgtgttcttaacatacacacagacatataaaatagacacaaaaggcaaaggaacacaaggaaacttttgaaggtgatggatacttttattacccttaattgtggtgatggtatcatggatatatgtatatgtccaaacacatcaaattgtaaacattaaatatatacagttttttcacctattaattatattccaatgaaactgtaaaaaagaatgtttaaaaggacaacaaagtaatgaaagaacgggataggaactaaatgttgattaggaaggaagaagggcttttgagatcttactgattcagtcataggaaaggtccttttaataccttacagagcttactcattagccctctttcccttcgttggcaggaccatgtgtttggaataagacagaccacttattaactgtgtgagtgatcagcttatttaactttggtgaaccctagtctcctctgctgtaacatgctgatgaaaacagccatcttatattagggcttttatggaccaaaatcaagtgagatagaacaataataatagtaattaacaattactaataattaatattagctaattactaacactaattattactaataattaatattagctaattattatgattgttaattactattattactaataattattactatactaacaattactaataattaatattagctaattattattattgttaattactaataattaatattagctaattattattattaattactattattagctaatattaattaggtaatgatattagcatatcatttaccataagccagccattgccatggtacttcacacagatgaactcataaattcatcagaactactttatgtattcaccttgttcttatatatgagaagattgaggtgcaaagtaagtaaattgcccaagatcttacaggcagtgatgggatttcagcagagctagtattcagctcaggcaatttggctctggtgtctgagttgatttacagaactaaaaatttctaacaaaatgccaagtacattgtagacactcgacaaatattttcttcccttctccctcccttgtcctctcttccatgttacttagaatactcatttagattaatcagtatccatgaaaagtacttaacctgagccattgctagaaaaaaagtgaggaaccagaatggaggaaactgtgattaaactactaaaagatcttatggccttaccttatattgttagtcaactcagttttaaaaataatatttttgttccaaattctgcctatgatttcatgttaaaacctcttatttggcttttagggcccagcagtatgtgaaggaagtgttaagggaggaggatggaaattgtaaaggaagatagaagagcataatatttaatatgtaaaaaatgcgaagcgtgtcaaatatcctcagtggaaagggaggatacattaataatttgacctggcatagccccagaagcaaaactcagaagccttttaaaaacacaaaagtcctaacatgtcaacattaaggaaaatatatagtcaagttggaatttttaaatgatgatatgtgttcaaaatattggattgaagacattttcttcattattcatcacaataggagggtgttttattcttcactaaaatacaagatgttcttgtgaatcaaataactggaagaatcaagcccctacaaagggcaaaatgccaggaagcttcaaacattttatgagggcaggttgggtagaattggatcccatcagataactagagatcttttatctgccatgaataattcatgacttctaagtcaataaatattgttaaaaacgatgatgcttttcataaatgcaaaagaccactgtcatttatggttgctatgttttcattctgtaactgattattcagaattacatgatgatggtgctttttggatgaatgattggcacacatagctttgatgaagaactggaaactttaccatacagttttctcaggtcattttttcaggttcattagaaaggaagttttgttcactacaaattaaaaaattcctcaagccaagcatcactaagaaaacacgagctcttgtaaatgtgttttattcaaagtatgatgaaacaagattttaaaaattatctttaattatgcaatgtagcattgccatagttttcagtaaataaacatttctttcttggtcatctacagagtattcattatagtctaccaaatgcctttgtctactcagccaagtttattctaagtttgtgcacttcgtgtggagttacaatattgttcccagtattaatatgttttatttctaatgtgtattagtttgaatggcccaaaagttactgtaaaataatttttttacaatgaaggagtttcattttatagaggagcaaatgcaaacgtactaaaagaaaggaattgccaagaaatctgaaatttattttaatcttagaatgctttctctatgaaggtgcattggtacaggtagaaataaaacgaaacttctaaggcactaaagacactgcattaactgctatattaaattgtataattttcaaatccccgctgttatttgatgaatgtgtgtatatgagtgagtgtgtgtgtgtgtctgtatctatatgtatgttggctaaaactactatcctagaaaatcagaacctaaatcatctatggattttgatgttttttagatttaaaagatggaaaacattgagataccaaggggttcaatatttagtcttatgtttagctttttcctccatatgtggtaaataccagtctagaatataggaatgtaaggaaaacaagtgtctacctccaacgtagactcagagttggactaagaatacgaagattgaaatgacatacagtagacatatgggaacttgcagaaaacaaaaaacaaaaaataaaagccactcatggcacttttgataaaagtgcctcagaatgccataatcaaatggaaacatttgataaaatgtgtaaaccaatagaaatgatagcaactaaattatttcagaacatttacattgaaaaagagtacctcacgttgccaatttgagcttcacccatgcctgatttatataaggtagatgatgagatataggatttttgagctgatgagattttggactttgrgtagacactattatgggttgagaatattgaggaccttgagatgaatatattttgcatgtgaaacagatgtgaatctttagggaccagagagaagactgtgataggcagaataatgacctccagagatgttcatgctctaatctgtagcacctataaatatgtttctttacatggcaagagggactttgcagatgtgattgaagtaatggacctttagacagggaagtgaccctagattattgggtgagcccaacctagtcacatgattcgctaaaggcgaagaaccttcccaggctgaggtcagaggctgaagtcgggggagatgtgacaaaggaagaatggtcgcagaaatataaggttactggctttgaggataggggaaagggataattagccatgaaatgttaagtggcttctagaaggtgaaggaggcaggaaaatggaacctgtttcagagcctccagagagaccttcatgacctgtgtcatayttctaatctacagaactctatgatagtaaatttgattgttgtaggccactaagtttgtgataacttggattcttatacataaaaattgaatgtggctcccagatgctttgatttcatatgtatactgaaattaaacaagaagatattgctgagtatcaacatattctatacagagtgaagtttctgagcctatgcacacatattcccccttgctctgaggttcaaaatagcatttggaaactcaggaatggagccccaatcagatgggaacaccaaatggatggagctgaccaacatcctgaagagtcatagctggttaatttccaaatttaaaggatcacattgagtgatcacttgggttaggcatggcctgaatggagttgagttctgcacccctttcgaccaagaaaggggtgcattgagagcggtacacaaaacagaggagctcataacagtaagttgaaccatctagatttataagtgaatgcctcctcaccaagagacaagataggaaaatggagagaaaaggaaatagagccagaggttgagaactaaaaagaaccaatgcatcaagcgtagagtggccaggccaggtgatgtccttatagacaaatcagtttgtgattctcaggcatctttgctttatatgagtcctggatgacacagttattctgagggcaagacctacaggaagcaaagctggtgacacaggaggaaagagccagtctccttgggcaaaagggactcagcaaccaagacaggctgagctgaatggtgctcctgggtaatacaggcccagcccgtcctttttctctgcaccgcccaccactgtgcacacacatactgaagacaggtgggctatagaccagttctgcttccttccgtatagtcaggaatttataaagtgcaaggctcacattcctaaaatgacttaaattaggttcttatattttattgtctaggtttgagggcccataaaggcaaataataaaaatggcttactttatacaatatcaggcactctaccgactattttatttgatctgtcgcctttaatagcttaccaacatgcaatgaattaagttctgttattttaagtcccctattttattgatgaggaaattgaggctcacataggtttaacaactttcccaaagcatgtatctactaagtggcagagctggtacctgaactcatatgtgctcactccaaatgccagatcttttcagtttctggccttgctcagactattccagtcaagaatagctcagtcttaggaatccagtaatatcaggcctaggacacaaacatctcccaattgtttcacattgaattgtttatgatttatgagattctcattggtctccaagagagactgcattttatgatgcctgctaactataatagttttataatccaatagtcagacttcttggattcaaatcttggcttctctgcttcctggttgcactacaatctaagttacagaaaacaggcatttttgtgtgtttgtctgacatattctagttgctcagtaaatatttggagaataaaatactgcttcagattgtcattgtaagtattaagcagaataattcatgaaaatgctttagaacattgcctgacacgtaataaatactcaaagttagctctcattatacatgaaactgaagcccaggacctgtgattgaatagacctgtggtctcatgagatactaacaattaggaggtttggttattttatgattagaattctcacttctcttctcattctcacctacgactgtttcgtttcagtgtcagcagtcaagaaggattgcacaacatttgtaaaaatataaactgctatgaatgcttaagaatagcctttcctctctagtacagtataattatgtacaaaatacctacctcaatgaattactgacagtaattgtagaatcaccacttctaaagttctttagaaatgatttctcatcccagagagcggcagtatgtgtttcatttttagtgtaaactaaatgctcaccaatcgctaaaagcttttctctcattcatgtgtttgagttgaccccaagcatatttttggtgcaaggtctacagtcttgggagctgaggacctgattgaccttcataccagggcttagacsttgaacacggttgttaatatgaagccctagcttgaggttgcatctgtttgagaaatacttcctcaggggaaaagaatgattaagacaaggtgtcaatttccagcatgtttatgccagccttgtaataagctgacagtgttaattatctcagttcaggaagctgaagccacagtcatttcttcagtcagaagagatggtaaagtgaaatgatttttctttccttttccatagagctgcatccatactgttaaacagggatgggcaatgtgctcactcctaygtatctatagatattacctgactgctttctcatttgacttaacrtgaatccagttcaacaaattgttgaccaggcagagcttacccatggaaacttgaagaggaatagaaatgcctttctcagattttaaatggcctgaaagagggagagaagtcattgaatcatactctttaggcagtcaaagttcccacacctagctttggggtattgttttggatggggcacatatgcaaaccattgagcattatgctggacacctatgtcccttccacgtatgtttgtccatatggcttgaaaaactttcccaagacacacaaaagcagctggtggagtggcttttcaccttaagttattcatgcatttgatttaagtcatgaattggagatattaatagggagcaggatgagaaccaaagctgtgagccttccaggaaggtgggtggcatattagcaatgtaattattattagtgatgcaacttctaggtatctgcatgtctcagtttggtgccatatggcagcagttactgatttcctcccatcctttgaccgcagttcaatttgagacgaatagatgctgaatggatttgggtaattaactaaaccaacagaatacaacacacacatgcacacacacacacacacacacacacacacacacacacacacacacacagccaagcttgctgtgccttaagaagttaagtggaaattttccatgggaagttatggaactggaatacataatcttttgtggaatagggtgaaggccacctacttagcaagaggaaaatgagtgggcaagaaagcaaagattaacaatggcctctctgttgctccaactcttcgttccctaatcaggcacccttggcattctgagcagtgccacttgtgtgagaggtggaaaggggaggcaggatggtcttatagggtttgtatgtcattccatttgtgacagcttgggctcatcccagtcgttttggaccttacccaaggcagtattcctggaggcattttggaaatctcctcaactctgccatcatatctcgtgggctatctagaatcttcccatgtcagcagttatttattcattagccatgactataatgatgttcagaagggctttattcaagccactttgcaagcattaatttgacaagctctctagctttctgggtagtagattaaacctttccacaaagtgtttgctggaaggtaatgtatatagacatttagaaaacaaaacaaatggaaaaaaactatcaatttttgatggctataaaggactgaatccttggcatcagttaccatgtgccatctggcagcctggaaattggtcttatagagatagtggatattgacgtggttgtggaaattgcacctagagaacccattgccccgtgtaagatttcctctgtgaatttcattaagttctcagtggtcagacacattcagcccaacatcctgcagcaaccagagggtgaaaaatggacacagcaagagatcctgctgttgttaaccaataaagcaaaatagaactcctttcttggcatctgaacgctgaacatcatgttaagcattcttggaagagatgggctccaagattttaagcaacaccaaggctctatatacagtgtatgaatctgagatgatggaatggcaggaagagtgtggcattcataatagagatttcattgaacaccaagcttttttttttttagggagatcgggctccttcttcctcttctttgttttttaagttaaaaacattcagtctaataaaactgattttcaaaagcacatgttctgaggggagagtgtatatattttgagaaccgaggagtagcagacaatatgtgagagaataggaaaagagtgtttcaagaggccattcagtgacttctgaatgatcattcacgattatacttaaatatgtcttgcctttgctccctaacagcaaggcctggaatgtgctgttgaaggaaaccagtgtttgttatttagagcgcagcctgaaccctgcaaaagtttttcatgcaaacatagatgtcccccagctgcgcactctctccttttcacctgtcagcatatgatttagcacaatcccctgaaggttctcaaaacagggaaataatcttaaattcttgcacagagttcatgagtcattgttttgattgttcttgtaaaggtacttacttttttttcctgctgtcaatgtgaaatctsacattcaaatccttttggagggagggatgggaaagtaagaataaaaagaagcaagcctcttttcaccaatttgctcctttctataggattaataataacctgaatcgtttacctaccactgaaacttaggaaataacacatccaggggaaatgatagccaaagcgttctaaggcagatttctctcatttgcaattatacttgtactttctcttacttacaatatttttccatccaaaccagacccagagtgaaaataccagatgatcaggaatatcttccagctctaagtacagcactcttgttcctatattatatggtcatgtgttcattattatattgtggacccataaaagtttctaaagctgtcatcttgagtttatctttctttgagggaaccaaaagtgagacagagagccccagtgtgggcagcatgggatgagtgtagagttaaagccatcacagtgttctcagacacagatataaattctccaatagaaggcagatggagtttttggagaagtgattagattcaaggttggggcatgggatgaagattrgtatggaacatcttgtggtgtctgaaagtaaggaagtgctgaaaaatgaaagggtggaggcatgtctaccaacctcaaataaaaacagttccccatggcaggagttatacagtttaagcaaaataaataacagcgtaaagccaaaaatattactgaatataactcaagggataaaatggatatccctgaggccataccgaaacaaataactgaataaaggcagtagaaacagcaagtcatccttagaacacaattccaattaacaaattatagaatgcatgagtggaatagaacattagaataccagaggaataatcactaaaagcagccatcaatagatttagtgggtagaaatttaagcagaaacaggatatttgcataatcccatagttctccccttaaataaatatttattcattacaaagagaaaagtggtaactttatggtgaaaaaaatccggcagacactatgttaagcaatactaaaggttagcatagctaggaatgagacatactgacatgattatatgatgcactgagaagggcacgtcacttctctggcattctttccaataatgcttatcctcattatgggttaacatcagacatacctgaaatcaaagacactctgcaaaatggctggccagtactctttaaaagtgttaaggtcacgaaagacaaggaaagactgaggaactgtcacagattacagaaagccaaggaaacatgacaagtaaatacagtgtggggtgttgaatcatatactggaaagagaaaaaaacagcattattggaaaaaactggtgaaatccagttgaatcagttgtttagttaatagtattgcaccaatattaatttcttagtcttgataattgcattttggttaagtgaaggaatacataattctctgttctgtgctattttcataacttttatatgtctaaaattatctcaaaataaaaaggtattgcatatgcaatatttagggttttttaaaatacattttaaccctgtaaaaaaataactgtaaggtgttgtgttaggctattattgtattgatataaatagctgagactgggtaatttataaagaggtttaattggctgatgattctataggctatacaagaatcgtagcagcacctgcttctggggagacctcaggaagcttccaatcatcgcagaaggcagaaggcaagcaggcatatcgcatagcaggagcaggagcaagagagacagcgaaatgccgcacacttgtaaacagtcagctttcatgagaagtcacttactatcgcgaggccagcaccaaggagatggtgctaaaccattcatgagaaatctgccccatgatccaaacacctcccaccaggctccacctctaacactggggattacaattcaacatgagatttgggtgaggacacagatccaaactatattaggcatccaggacarwgacaagatagtgcttaccatgatacttggcatttgttcattcaacagcagctcagcaatcactaggtcaggtcaccattagccttagggatttgtggctaacaagtcaggcagatcctgataaagcagtaagtgccaggataagagaagtgcatggatctatgagaacgtatagaagcaacactgaattcaggcttgcaggcatcagaggtcacagagctgaagatgagtaggaatgggccaagttggaattgactgaggagagaggggataaatgatagggatgtctttagagtggaagaaatagcatagcagaagtggagacaagggaaaayaaggaacctttgtaaaatgaagaaacagttaacttggctggatcatggagttcaaggggaggctggagagagatgaagctggaaagttaagtagagtgcacattgtgttaagaagtttgggatttaacctaaatacgatggcagctagtaaagagcttgaatcaagagtgatgttattaaatttacaatttgaaaaaaaattctctggcttccctatgaggaatagattatactgggaggatgaggccctgacactatagtgagtggcttggagagaaagtggacagatttcagaggtctcagaaaggcataattaacaaaagctaatgcttgattgcatagagatgataagggagagaaaggatttactgtttagaatgttcaattctacatctagaattagtaaatcattttagtctacacagaagtccatgctaccatgtatggcagcagcctgtgactgaaatatgattgtctgaagatctatgatccttgtgtgggtgtgacaggcacccctaaygagtcmtgtcctctctccttgagtgtgggtagaatccgtaactgtcttctaacctataggaaatggcaagggtgataggatgccacttacataattaaaagttacattccataagactgttagctgagagtggccccagctgacagccagcaaaacagtgaaaccttaatctcacaactttgaggaattgaagtctactgacaacctggggaggcttggaagtaaatcttttccaagtcaagcctctgaagaggctgcaatcccaactgggaccttgaatgtcgcctggcaagatgctgagcaaaggacttctgaccacagaaactatgggatgataaagggttctgttcagacccactaagctcatggcaatttgttatgcagcaacagaaaatgaatatacttactccagatactgtgttcttccttcttttgtatttcccatctttggctccgtccattatcagggtcttaaactgggctttcttcttgtttttgcctatcatttatgttttcagctacttaacctgtatattctaaatgttgaaaactctctttggctctatcagaactgggttgacctacaaatcaaggagcatctttgccatctttgggtcaacctagaactatgttgtgtacataacccattaccaatgacatttgctttggggtgtctgagcaccccaagacattcccactatttaccaaacttgtccgacctgcggcctgtgcacagcatatagcccaggacagctttgaatgcagcccaaaacaaattcttaaactttcttaaaatgttatgagattcttttgtgatttttttaaagyttatcagctatcattaatgttagtgtattctgtgtgtggcccaagacaattcttcttccaatgtggtgcagggaagccaaaagattggacacccctggaaccctgaggacctgttgtaggcccaaactggcttcccatgctttcttatgtcccttaccacagaagcaacaggcctaagctgctttaagcctttaagctatcctcatctactttaattcttacagaattgaactcccacacctgtaatcttatttttaaactggacttcatatactgtacccttctctcttatcttactgttactgagaagtgtaacattgtaaactactacctagaaatggatagagaattatgaaaatagcatatttgggaaygtgtagagtttaagaaatcatgcaggtttcttaacgtcaagctccctggtttgtaaccttgctgacataagtgataaccaggaggctgtggccttctgccttttccatgaatttttgagaacagattcagtgagccctccatttcttagtcctcatgtttggttaaggtaatgcaaagtcctttctcagaagacacttctttctaatcctctagctgtagaaccatctattcaacaaatgtttatttaccacctactatatgtaagtcactgtttaaggctatgggaatatagcaatgaacaaaagagctttaaaaacaaaatttgcattctaaagggaaagagacataataagaaaattaatacttcaatacacagtgtgtcagtaatagctataatggggaaaamtgatgagactaaaaataatattaagagttgcaatttttaacagaataaccagaatatttcagcgagaagattgcatttaagcaaagatctgaaaagagtgagagagtgaatcatgtggatatatggacaaatgtattttaggaaaaggaaacagcaagtgaaagggcctatttctgcaaaaagaaggccagtttagrtggagtagagtggaatggaagagaagaaagaggtcagagagattcttggggaggtgaaactatgtagcttcttgcaggtcactataaagactttgactattactggaataagatgaaaaaccattggaatattttaagcaaagaaatgacatgtgacacatttaacagtctataatttctatgctaagaaaacaatatgatgtgtgtttacaggagagaggttgaaaacaagggtaggaacctagaaaccagttaggaggctactgcaataatccaagtaaggcagggcaaacatagaacattaccatcactacacaacatcgtagtggacttatggggagaagagacaatatgggacaccttgtgttttttggtgactgatcaagaaatcaagaaatctgataaaaagaacaagtgatctctcatcatactctgagagtgcgtgggcgtctgaggcattcccataactactgcccatagagaacagaaagccatggaaaggacagttgatttcatcctttctccaagtagcatatttacttatctctaaggactataatttcagctgaaaaacccttttaaggaagagcaaataatctcatactattgagcacctattacatgctaaatacaattttaatatgtttttggtataagcacacatcatgtccacctgttatgtgctagatacacttaatttttttaaaaaagttcatctttacattaaatatgaaaaatatattacatctttatttctggagttcagggaagatgaatgccatgcccagggcaggagtcagagttggagcatgaaataatccacaagatcatcactttttgttgatgtacttgatgctgcctcctctttggggatttcttcatgcatgacgatccaaagagaatgttaatagattagaaagctttgtgtgtttgtgtaactttctgaatatatctgtagagacactgtgaccttctccaagtaacagtggttacccaagcttgggtctctggacagagcgttctgtcttgtcctttgtcaaaaacctattctattagagcatgcaagataaatatctcttcaccaaggaggcattaaaggcaaccatgtgagaaagaaacaaaacactgctggaaatacatgaacattggactggtgaacaaggaacaggagttaaggccttggctttctcactaattagccacgtggccttgcaaacctagtaattcatctctctggatatctatttctcatccttaagatacaagtatttcctgttgaaggacccattctagctctggaactctataacccagtttggtgttctctataatttactccactgggaaaaaattctccatgtcctcctatgttcagtatttatttcctgataataaaagggagaacaatatgtagtctcataaaattataataaagtctgtaattcatctagtataactcaagaaaaagttctcagccaggcacggtggttcacacctgtaatcccagcactttgggaggccgaggcgggtggatcacttgaggtcaggagttcaagaccagcctggccaacatggcaaaaccctgtctctacttaaagtacaaaaaatagctgggtgtggtggcgggtgcctgtaattccagctactcgggaggccgaggcaggagaattgcttgaataaggcaggaaaatgttgcagtgagccaagattgcgccgttgccctacagcctgggtgacaacagcaaaactccatctcaaaaaaaaaaaaaggttctcagagcatttatttttgctattaagaatagctaaatgactaagaaaatgtagtaaatatgtttggccttaattcatgtttgtagctgacattgtcaaacttaagacccatcagtgttatggctggtcaccaaataaagtgtgaacaagtaagcaattgtgctaagaccccagacttaaggagtttgctggcttctagtcaaatcacatttagtttgtattaatatagttagactttggatgtgctaagtactgcatttactcttgggcacattttaagctttgctttccaacaagagtagtgtgttttactagtattcagcattgtgccttactcctacttgttgccttgagagctggttctacccctctgctcttgaaaggtcaattttcagagtctatttcctcccaccatctcctcaaagattatcttggtcgtaacttccagtttagcctgaaatagtggaaaagttttatccatcgttaagatagttgaatagtgagtgtgatgaactagatagtctaattatctctgtaggaatcttaattgaaatcaaattatccccatgttaatttttttctaataagaagaaaaagaggaaaacaagccaagcacccaagttctcctccattttctgcttaatagtgaagttaacaagaagcttttcctgagtattattcattgactgggatcatattggctgtccccagggccatcgactcttcccagctgctccattaatctctgggaaatccccagtgctgcaactgtcactgtataattaaatgctttgttattttctgcatggtcctgtactttggcagcttattttcattaaatagcaaggcctgttctttgtcatttatcccatatggctgtgaagaagtggcctccaaatctttctttgtttgattccttcttctaaattaatgttttctcctcctcctttttcacttcctccttctcttcttccaccttctcttcttcctcctcctcttctcttcctctcctccttgctcttcttcttttcttcctggtctctttgactcaaagccagactatctaaataatatatcagattgatataaactattttttatcttccttttaacctcttctgagtagagaaaatttaaaacattagaattaaatgtacatttttaattttttaaatttttcctgcaaaggttaatctttgactggagcacatggcccagcaaacatccagacaaaatgaattgctataaatgctgaacaggaaaaaaataaataatttcacttcctgatgtcatcatgctactgatttatatataatataaaatataatgtatttttaaatataatttgtatagctatttgggtatcctctgaaataatgtatataagagaaagcttatctattcctctaagatttggtaaaacatgactaaaacatttttctaagtcttgtttgttcaactttttaatggtcattggtcattgaaaaacagttttccaggctttctcagttcaatttttgatgttatatttttctaaaatattgtccatttttatatcttaatatatgttggcataatttgcttcatagtattctcaaatatttttataaatatctactctatctgtagtcattcctcaaatttttaatttttttcttctgttcttttttctaatcagtcttattagtgttttatcaaatttatgttttgtatttttttttcttttcaacttttgtttttgtttaggggatacacgtgcaggtttgttatatgggtaaattgcatgtcactgaggtttggtgtacaaatggtctcgtcacccaggtagtgagcatagtttttgaccctcaccctcaccctcctcttacctttccccctctagtagaccctggtgtctagggccataacctgataatatgggaaggagtttaaaataattattttcccccagagagcccaacttcagaattttcccttaaaataccgtactgttgctaaaaaatgacgcaattactttcatacaggttggagtgtttcttgacactaactgaggtgtcttcacctagcgggaggtaggggcattccaggagatccaggggagtgagggattctaagagcaggtagccactctgctctgaatcacattgcaagctccctaaagagcttctctgtgagtttctgagtcccctgtccattgattctcagttttggggtgtacattacaattatgtgagagctttaaaaatcttgatgtctaggccacggttaagaatattgtgaaagaggattgatatgagattgatatcacaggagcaaaggaactaaatatttcatgttctatattctagttgttgaaacatggcagaatttgggtccgatttatgtgtattctgacaattgtggcaattaatctaagattaaatatttcaggggaatgagcattatttaatataaacatagccatcagaaaaaataattgggggtctgcacctgtccctgagatcttgcctgcataggaatgaagtgaatactgggggaatcatattgaggctatttatgcagtgcttagtctgcgtttgacaaattactggagctgcttttttgtcactttccattggaatgttttattaggttaagggaaaataaaattacaggaaaatagaatgtccttctctatgcctgcccccattctttcttgtggtgtttcaagttatgcaatctatgagagacctcctaagtgcctcagttcagattctgaaaggactcctgaaggctgaccttcttaaaatgttagaaatacagggaaaatcacataatttcccacaagctgacttggcaatattcatgtttcacaactcgtctctgactgattttatgacacaccttctgtcattatgatttgctgtcatcggacgctattaaattcatcacttcaaacacactgtgttcccaggtttacagcctgtaataatgatccggatctcagtgcattcctgataaataagacccatcctgatcatgtagtgtaagtggggggaaaagtttactggatttagaaatttcagacattctggtttatcacatattctctagaaaatttttcactcatcatatttctttttttttctttctgtaagaagcaagccagtttagaaaagcagaatacatccacttgagcataaaaaagtccttcttccctgcaagactgctctcatatacaaaggaatatttttccctcttgtttaaactaggttcrtttggaattactacctgtcactactgtattaatatattattcacattatgagaaatataaaatgtagacattttggaagaatgagattaacataatagaaatagaagtttgaatattttcttcttctatatctttggagactagtggtgtagacgaggatatggacataaagacattaagtgattgatttcttcccttatctgatttgcgttcaccatcacattctgactcatgagtgtcactgggtttgatgtgtcctggagagtgacagggatgtagaatgcatttccataaattcgcatcacacgttttacttttagaaagattatctggcttcctgcaaaactttgataggcaaacagagatattaagtgtttgtttataggctcctcattctactctttatggaagatgaagagatacatagttctgatgagactggggactactcccagctgggttcgtgacaggttaaccctgaaacaagtaagtttagggtaaatctggatgaccctttgctttccacactattcatgggtctgtgtaaaagctgtgctttttctggatttgggacaaactacaataaaattatttttctaaaataatatatggggatcatttatttaaagaaaatatcctaatagctttctaatatctcagaatgacagatagtaaaataacatgttgtaagcataaaactttacataacttgagggaaaatattcgtcctgggttaaaaattgtatacctgaactagaaacttcgattgaatactgtatttcatgtctccattgattttctttcactaaaaattgagataaatgccttttttatctaaaaaagagatactttattaatatatatttcaggaagattacaaagttttgaatttatatacaaaattattttaattttgcatttactttttaaaattgaaactaaattgattactcaatttcaatattctggagctttcttgattacagattattatatgtttgcccacgtatctcagagatttgtgttgaaatttaaatgatatcatgcatgggaagatatattctaaaccattaaagacaatataataatgagttattattacatttcaaagatttatcattaatttagatcttacatccccatattttctactccaactttttataatatttgcatagaaatctcccattaatactttcttttctgtttttgtttttgtttttcggccagggtctctctctgttgcccaggctggagtgcagtggtgcaatcatggctcactgcagcctcaacctcctgggcttaaaggatcctctcacttttagcctttcaggagctgggaccaatcacaggcacacaccaccatgcccagctaatgttttaattttttttgtagaaacaaggtctccctattctgcccatgctggtttcaaactcytggcctcaagcgatccacctgcctcagcctccccaagtgctgggattatagtcttaagccaccacacaaggcttaataccttcttagttagataatgtctgttaagtattttgagatcatcagggagtaaaaattattattgttaagtcagaatataaagatgaacagtttatatcactttactttgatgtcattctagaatcaacatgaatatgtagaaagcatatgttttgcaatttaacaattgctattgcatyacaattggctcatcttttttagaattatagaaatgtttaattgttttagatgagaaaaaataagatctgtactttataatgtgatattatatctttgagtcaatattcgattatttttaacctttgaaactcttcctagctaacagttgccccttggtgccattatggctaagacttgggaggaggtatttggtgaggatggagagttcttttagcaagaatccaggaaaccttttaaaagttaattatagggccgggcacggtggctaacaccagtaatcccaacactttgggaggctgagacaggcggatcacctaaggccgggagtttgagaccagcctgaccaacatggagaaatcccgtctctactaaaaacacaatattagccaggcatggtggcacatgcctgtaatcccagctactgaagaggctgaggcaggggaattgcttgatcctaagagacagaggctgcagtgagccaagatcgcgccattgcactccagcctgggcaacaacagcgaaactccatctcaaaaaaaaaaaaaaaaaagttaaaagttaattagtttagtgttactttctgcttctgagataggattgtctggtgaacagtaatttaattcttcaaagtacaagagagagaaaatgactgaattttcaaatggctcctgccagtggtcagtggttgtaatgacattctcccagagtttgctctatgaatagcgaagccctgcagccacacctttgcaatgccctgcaggtattttccacttggttctatgtgtgacctcacttctcactttcttttctccattctttactctctcctcatcaatataaacgtaaccaccccagcaggctttagtcgtttgccttcttcctctgtaaatggagaaaagattcacccagacataatagtatctcacatttattgaactcctatgatgtccagggattattctaaacaatttacatatagtaattaattctcataacaatcctatgaaataactaacattatccccacttacagacggagaaatggaggagagggaggttaagcatgatatccaaggttatgtaactagtaagtggcagggccaggatttgaaacctagcagcccaggctgccaacaccctacactgtcatcttacaatatctcatttctcacattttaagtctgcaaagcccagccattagcaatcttgatgaatggggtatttgtgaacacaaacaaagaaagaaatttcatgccagtttctgaattgatatggaatttcataaaagtgctctagcttaatatttcacatattgtttggattattaagatttttcaagatgaagaagactagcttgctggctgttgggtttctgggttaaatccacatgactcagtcattatcagtctctccaagggcctccactatccagggctggttgaggactttctttggactactgcaatgttatgtgctgtgcttactagagtctcagyggcagaaggtgaaccaaaaacagagttttaaagctattgatgtctgtgtttggtttcttagtggctaaatgacatttccccagcgaggggagggggtgggaaacaattggaaaaatgaatgtctggatgcaatagaattgctgctattaatcatttgtacatgctagaagaattgagtctgagagcgtttgaagtatctttacaactcatggggctgcctaactagaagccacctggctgtgtggtcttactccccagtttggagcaagagtattggaaaaattctgcttcctactcacaaagctgggagatacaaacccatggagtcagaagtgaggcttttagcctgtgagtggggctgacagatccacttcagagatctctttattggtagtgcatgggacaaatgagcattcaggatcacgtagtttctagcagatagaagggctctacctcgtccctatttacttcagccagtgcacttccatctcaaagtctgtgcctccagttagagggtgctgtggatgatatattagatttgtctcatgggtgtggggttttgcttttgatcattcttggctacagtctccagagctactgcttgctggaagcttggctgtggggcctgtacagagagatagggcttgttttcatgtcagagccattgccagtagctcaagcctttcaactcaggaccccagctctccccacctctccaagatgagaaggaaactgtctactggtttgtggacagttctgggagactgaatgacccaagacagggacccccaggcacatagtggatgtggcttgtcagctcacttcagcctggaaatagggctacatttttatttttgattttataattctgatctttgttcactacatatgtcagccctttgcagtaaaattccaaggccttgcttatggagtcatattcttctctgtttaaaaagacactattatattgtatttcttggttttccttgtttaaaaaaagttaaatttctaactaggaatgctcttgttccatctttttttctttcattttcctccatcaggtttctcccaaataagttcatatgtgtgaattttatatctcttcttcgtctttcttctgaaaacttctaaacttgttgtaatgcttttcattacaactttggcctggcccctgacccrgatgatgtgggacccagcttgtgatgtcctgtaacatgtgcttcatggaaagtccagctgtgatcttttgaagctcccattgtgcartgtgcaagctgtgataatgaatgactataactagagctgcccacactatatccctcagtgtctcctttttttttctctgttgattggtagttttctccatgaaaaacagtgaatcactctgttgtggctttcagggatggcaattggaatacaaaaacccgtaggcattttctcacatctcttaatgtctttatatttttagatgttacatggcagtaagcaaatgtttcctaacaatttttgggggaaagatataacctaaacatggaagataatacaatcaggggcataagccagatactgtagaaagttttggtggaaattcacaaaaattatacatttgattgcagcactgtggggtgggagattgccttccagcaggtacagatcttttatcctgggtttgaacagtgattgatggcaacarccttaatgcasttctgcacttcaatttagaaagagacaagcagtgcagagccctgggtttcagactttctccaaactgcattggcttttgatatcctttggttttgaactgcttttgagattgcagaaagtgactctgataacataaggaaagaaaaatgcatctgtcttcagaagggattgtatgaattaaaagacaatagagagatttagtttcatcctcagatagctgagaagtagccactcttatcagcacctctgctacacacatatacacacattgctactacccatttctcttccctacccccaaaacatacattctctcttgcgcttctccttcccttcccttctttctttaatttctatatttctgatgcctgaaatctttaactggggcatggggaaacaaccttgttctaggcagaacagctggagaaagtaataggttaggatttcaatacaaagtattgacaattaagaaacttttactttaaatgctcacttcctacaacagataaaagagttgatgtaatttttaacacagttgtaactccagaaaataaaataattttatattgacaggggtaatctcttcaggaaaacattttttcacatctctaacgagatggtcttttattgaatctccacatacattgaggaacttggaggttgttcctgtacaatgaatgtcttagaggttcgtaggagtcaaactctcctttcagtgcagtcatttaatttatgatttggtcctgccaacaggttttattatccgtattttacagatgaggaaattgagactcagtatattttagtatatgtaagtaactcgcataagttctcacagttagtaaagagataaacctgaaactcaaatctaggccactctgaacccaaagaatcttctctcaccaaataaaataagtctacaaaattaaggaagaaaaccaaatggatattgtcttggacttctccctagatagtgtactgattatttctgataccttttgcatagtgtagatcaagctcatttattagtgccaaggttccatattcatatttttaacagaggctcaaagacatatataataatgaatattgtagaaaaactcaatgctgccattttaagtgggggtgaagaggtcgcatgttttatttagaaggttgaaatgaataagaagaatatagttagccattttgtagagagcttagagctactcttgaagttattccattatagaatcaagttgttaatatacatttaaaatgagaggattgcaaagtacgcctccattatagcacatggctttctactttcttattcccctttagcaataaaactccaatctgttccatcagtcatccagggaagggtttcaatctatttgagaaagaagctaaaaagtagagatctagggattataaaatttaaatatgtaaatatatgcatccagctccccatttctgtgtgctcygtgcctctggttaacaccacaaatagaaaagtataatatccttgttataaatggcaacaattatctaataagtcatacagctaaaaaaaaaaaaaaaaaaacaaacagagggagccagagagatatcaattttagtttttcatgttttctcttgcttctttgttcctcacattcttcttagactctgtcaaaacaatgttttggtctttgctctagatttttaggtggagcctaaatgtttgtaagatagaagtttgataacaagtgttcctttaaactgacagtttagttgtcttcagttttaaaatatactttgattatttctgctgcttttcatgctcaaatgtggagccactgaatttatcagaaagagattttgaggtattctattaagcaatggtatgaatttcagatgaacatcataaataagaaggctaaattatagtgggagaattgctctgtatgaattgtaaattttttttttctttgaggcagagtctcattctttcacccaggctggcgtgcaatggtgtgatcttggctcactgcaacctccacctcctgggttcgagtgattttcctgcctcaccctcccatgtagctgggattacaggcatgtaccaccacatccggtgaatttttgtatttttagtagagacagggttttgccatgttggccaggctggtctcgaactcttgacctcaggtgatctgacctcctcagcctcccagagtgctaggattacaggtgtgagccacagcgtccagccatgaattgtacaagttttaagaaactagaacttatcatgccaaaatatggtcttaaatttatttgaatgttgacaaaggattatgcatactgcatatcacttagatatagatgaactgaatgaggacatcttcaataaaatcaattattttcatgtcttatgataagattttaataagatgccagaaaggtttaatggccaaataagtgtattttccctttttgtattcttgatatttaaaatatttaaaaaagtgtatgtgtgtggctagttaataggaaagaatgagctcttttaccaaatgatcagatatcagaaagatatttgaaaataacgcatttcacaatggaagaagaaatcttttgttaatctactttaaataaattttataaaatagttttaaagaataacaaaataaaataacaagtaaatttstgtgctttggtattttgctagcttttttgggtattttcagatctcactggacccaagtccccaaagtccaaaagagaaaaaccaacctgttcagcatttatcttgcaatttctattatctcgtgtcttgcttcaagttgatttgaatctgggtaggtttatatactcagtcaagtgtgtttgctaataaacaacagcaataaaaacataatacccttaacaggagaaatgtgaaagccctcgtatgtcctgcaaagatctgattacataaaaaataatatgtctggctctgggtaccacatgttaaaaaaagcataactaaattaaggggaataaaaaggagagttacttgggagattcagccctctatataacacgaggaaatatgtgatatgaagaaggtgctgaaagaaactaggaaaatgtaggcttctgtcacactctgtaaattaatattgaattttgaactacaatatgcaattgcctaaataaaacagttgaaaataaagatgaagaatcatttataatgcacaaaaatcttcaattaaactttgttttcctttaaaaataatactagtaggaaacttctggaatggcagtatgaggacctctacctctataatttgccctgccataaaagccatgaaaacactggcacactaagccatgaaaacactaataacgttttagacttctagaaattaacaaagtcttgtaacaatctgaaaactgcttattcaggaaaaactgctgaacctcattaagaactgcagagtttgtggtactttatctcctgttatcactctttccccatctctgcagtagcctggaaaatcagcagcctcacaatcatagtagctatgaaaaacagcagccatgcagccactggcggggtagatggggtttgtaactccacagaatgttctatctgcagagcactgtcactgtttgacctatctcacagcctctggaaaagcccactcaaaaggagcagttgttatttgatctgattcacaacatatgttaaaggaaaagccctatccccagggaatttttcaaaaacaattagtggtaattacttaacatgagagataaacaagagcctggccagaaacttaaaacgtagataagggraatgagatgtccctggggcttttcaagagctctaagatattcctggggatctagatggctgcacttacatgcaaggttgtgtgtatgcccagtaaagacctgagayggccccagtctctagtctttggctgatcttgaagccctgtgcaagcaggaaatgaagtctagggtakagtttgtaaactggctgcctgaacatggaaagcatgccccaacacacacacacacacacacacacacacacacacacacacacacacacacacacagagcctgagagtaaaggttgaaagatttaatttttggaggcatttaagaaatctctgaccaagcattagctgattaacaacgtaactgaacagaaccgtggttacacactatgaagaatatagactttacaggattagcttaggaaagttacaaaacaaaaaaaaaaacaacaaatacaacaaaatgatagcaacctttctcacacacacccacacaccttggttgggaggtgttgatctgatttccagagttgccacattatattatttaaaatgtccaattttcaacaagaaattatgagacacataaaaaagcaagaaagaattatccatacacaggaaaataggagtcaatggaaactggccctgagggatcccaaatcttagagttattagacaaagattttaaatcagcttttatgaagtgtttaaagaactaatagaaaacatgaaaataaatcaaggaaagtatgacaacaatatctcaccaaatrgagaatatcaataaagagataaaattataaaaaacaaaatagaaattctggtattgaaaagtattaagctaaaatgaaaaatgcaccagaraggcccaagagcagattttagctgacagaagaaaaaaaatggtgaactttaatgtagatcaattgatattatccattgtgagaaacagaaaggaaaaataaacagagattcaaagatctgtgggaccatcaagtatacaaatgtatatgtgtaattggaatgtgagaatagaggaaagaaagaagcagaatgattacttgaaaaaattatggcccaaaactgcctaagtttgattttaaatatatatatataywcacacacacacacacacactcaacaaactccaagtagaataaattcaaggagatccatacctatacattattatagtcaaattttcaacagacaaaggcagagagagaatcttaaaagcaacaagggaaaaatgatctatcatgtgtaaagaatcttcattaagattaataattagcttctcatcagaaactacataggccagaaggcagtggataacatatctattttttttcctcaaattactttttaccggggctgatgtatctaaagtgctgaaagaaaaagactgtaatagaagaatttcacatccagcaaaactacatgtcaaaaatgaaggaaaaattaaacactaccagacaaacagaaactgagagaatttgtctctatcaagactgccttacaaaacgtattaaaaggaatccttcatacagaattgaaaggatgaaaggacaatagggagtgcttgactccacgggaataaataaagagcattagtaaaggtaactgcataagtaaatataaaaggcagaataaaagtatttttaaataaaaggtatccatattagaaaggaaaaagtaaaacaactatttgcagacaacatcatcatgtatatagaaaatattcaggaattcaattaaaaattataaatgagtttatcagggtttcaagatgcaagatatttacaaaactctattatatttctatatactaacaatgcaaaattaaaaatgaaattaagaaaacaattttattaacaatagaataaaaagaataaaatacttaagtataaatttaacaagtgtcatacttgtacaatgaaaagtataaaatattactgaaagaaattttaaaggactgaaataagggaaaagcccatatttatttatgaattggaggaattaatattgttaagatgacaagatgggagtattctccaaactgatctacagattcattgcaatccctataaaaatttttttatctggaatttttgctgaaattcacaagccgatcttaaaatttatacggaaatgcaatagacccagaataggtaaacaatcttgaaaaagaggaacaaacttggacactcatatttcctgatttcaaaactcattataaaagctacattaatcaaaacagtgtggtactggcacaaggataggtatatagatcaacagaatagaattgacagcccagaaataaacccatatatttatgaagaattgatccttggcagaggtaccaacacagttttgtagagaaagaatagtacttccaacaaatggttctgggataactgaatgcaaaagaatgaagttggacctgtacctcacactatctgcaaaatttaactcaaaatggattatagacctaaaaataagagctacaatgataaatttttagaataaaacctaagagtgtttgtgactttgggttaggcagtgatttttatagatataacacaaaaagcataagtgacaaaagaaaaaattgataaattgaactttatgaaaactggaaactttttatgcattaaaggacattatcaaaggaagtaaaagaaaaactcactgaatggaagaaaacactttcaaatcaaatatatgagaagggatttgtagccagaatttataaagaaccctcataytcataatgaaaagatgaataaccaaattaaaaatggacaagggatttgaatagatatttatccacagaagatatacaatgaataataagcacataaaaagatgttcacattgattagccattagggaaatgcaaatcaaaaccacaatgtgatccacaatgtgataccacctgcacccactaggatagctttaattaaaaatagtaacaaacattggcaaggatgtggtaaactgcgactctcaaataatgttgataggaatgtaaaatagtgtagctattttggaaaaccgtttggcagctcctaaaaatgtaaaacatggagttaccagatgaccaagcaattctgcttctagatacatatccaatagaaagaaaaartatgcctacataaaatcttgtgcatggaagttcctaggagaattattcataatagcccaaaataaaaacaacccaaatgtccataaatgaatgtatggattaaaaaatagcatattcatataatggaatattattcagtataaaaagaaatacttactcaaacatgctataacatggatgaatcttgaaaacattatgctaagtgaaacaaactagtcataaaagaccacatattgtatgataccattttaatgaaatgtccagcataagaaaatctatagacacagaaagattaagttacctagggctggggatggatgggcgtggagtgagaattgactgctaatgcakatggggtttctttttgktgatgaaaatattctaaaattagactgtgttgatggttgtacaactctgcaaatttactaaaaccattgaattgtacacttaaatggctgagttttgtgatatgttaattatctctttaataaagctatttttaaaaagctgtatgtagctttaaagaataagtaaaaatgttaggtcttaacacatgtttaaattatttcaaaaaagtcggagaactacacataagcttattaactattagtatgattctcgttattaatatatttaaccaataacctctattattttaggtagcatgtagtcagagtatgtcaatgttcttttccttggaaatacatcacttatgaaatattcttttgcatgarctctgggaaatggaatgttttaattttattgaartttcaagaccttttcaggttaacttaaaacccacttaaaaataattcattaacaacatgaaaaataagaagagaaaattgttttttaggtatgtctctcagatatttactttgactcatgacttctaatcacagtcatactaagcatgctttgattgtgctcccgccccactcagaaacctctggaggctcctctcctcccacctcctcagctggcattcaggatatcctacactctatctccaatccacagtccagccttatctgctgttctttcatgaaccttgtaaatcatccaaattatttggtccctgaactcaccttgtgttaattaaatcatttattcaattagtcattcagttaaaatatttgttcaaagtctactaatcgtactgtaaattcaaggttctgatatgtggggaaaaatcagaagaccacaaggcggagtaaaaattcacgctattaatcaactcatacttggcagtaggaaggtccaacaccagctctgaccgccagctttgattatagcctcctaagtgggtgaatgcacacatccctcagcacatgggtgcatcctgaaggaagacagtggcatcgcattgcagtgatccttctaagccagacagagacctgaaaattttcattcatgttactacagtgataaacacaataaaygcaccaattaaattctccctattggtaaatcaaagagaacaataacctctgtagatacctgggattttctaaagctcccttgaattgtctgcagagttttatttatgcacacagtcatgtagtagaagaggaagtattagtagttggttttatattaactgtgatttttatttcctctggtttttaggaaagtgatttagacttttaaaagtggttgtttagggtgattttaccttttgggaacttaagttggaaggagatacagtatatgcaagagctgtggcatcttctgtgaaaactggaaatgccatctctgctcagtgtgccttcacactgcagaactctgcaggcttcctcgagctcggctgccctttgcatgttctataaaatatgttcattcagaaccaaagtctggatccaaaaggtaaacagagtctatcctccagaccaacatattatactcagagattggaagccactggcctctgcatgtttgtaaaatgcaattgctagcagtaatcctgaagatcacaactccagaaaatgtgcttttaaaaaaataatttttctttttttwaaaaaagcactctatttttaggacagttttaggttcagggctaaactgggcagaaagtacagagttcctatatgccctctgtcctcccactcccttccccctacacacacccagactaccccaccatccgcctcctgtgccagagtggtaaatatcttacaattatttatgaacctacagtgcacatcattatcacccaagtccatagttaacatttgggttcgctcttctaatatttattttaaaataactcaaagcatttattttatttaaataaaattgcacttttattttaaaatagtcttaagttttattcactttggagttgaattcatttatgagtgccatttctatatctgtatttctcacttactttgaatctggcgggttttataacaattagaaatacaaaataccttgtaagctgggtctcatcatctggtcttcccaaactcatgcattgttgatccctgatgttacacacacacacacacacacacacacacacacacacacacacacacatttttagcagatgacgtgtgtccttcttgtttcattgcttgtgtggtgtttggcttctgttaatgtgtccccacattgtggtctccctaaagagtgtggtttaatcattaagagtcaaagtttagtactggccaagaattggtatcacatgaatgcctggctagaaactcataaaaataaatttctatacatatctgagagggaatcctttgtattagggttctctagggaaacagaaccaataagatatatacattcatgtaaatagatttattataaggaactggctcacatgatggcagaggctgtgtggttccacagatctgctgatctgattttgcagacctgctgtctgcaagctggaggcccaggaaaggtccacagatggtgtagattccagtctgtgtctgaggcctgagaaccagaagtgccaagaggaggaggagatcaatgttcagctcaagcaatcaggcagaggggacaaattctcccttccttcttcttggcttctggtccgggcctcaaaggattggatgatacccaactgcattggtcagggcaatcttgactcagtctatcaattcaaatgctaatctctctggaaacagcctcacagacacacccaaaataatgtttagctaaacatctgggcatcctgtgatccagttaagttaatgcataaaattaaccatcacacccctgtatagtcagaaggaacactacagatctgtttttataggttggctcttatagaacttactatttaaacttcacctcctcgatcttgtaggtttaagtttgcacttatcattcatttcactggcaaaccaatgagaacgtgttttattttcttaccttgggattcccttgatttacaacctttcatctccagagtcattaaaacagaaaaacaaaacaaaacaacaacaacaamaaaaaacctttagtgtatcagcagaccatacccttgagttgcctatgtacttatttctttaaatctggttttccagaagaaaaggttctgctcctcactatgtacttgagaagacaataagaatctgcatctttgtttcctcatctgcgaattgagagaaataatattaactgcacagggttataaaggttaagaaacatcatgtgcttgaaaatgattttattacctttacagtggcagagaaatgttaggattatcatggcgagttgatatggggctgtcatcatttctcatcagtcttcaagtaggaaccagcagcacacatttgagaaactgcttgctgggagcaggaatgaaacctgcggacacagtccagggcaaactaacaatccatcacagagaatacactgtacccacaacatgacaccaggaagaaggagatcttgactcttttaagacttatgaatttccaaagtgctctcacttgtgttatctcattttgattttgatcatcaaaacaaccctctgaagtagtccaggcacagattattggccccatttcaaaactgaaaaacctctggggagtcaaagggtttcctcaaggtcctggaaccagtaagcgtttgagctggaatggaaattgagtctttaggctcagtgcagaactctctcgctgttgtgttgctctcctgctaataaggcagacygcaacgaagaagctaaatgrtgcttatatttcacctcttatttgtggtgagtgattaaagctgcaggggaccacatccaaatcattaatactgaacttgaaaacagcacataaatctcaagaaatgcaatcttctttggaaagtagggaattgcacacatttttatgatgatggaatgtactattaaagcagagccttggacatttgagtgtcccaacaaaaaggtgaaaagcctaattggttaattagatgagaggcaatcataagccagacttgtaggcataatgaaaggaaaaactgaggtgtacagttgacattaccttctctcagggccatagttcccaattgttattcaactttcaaagggcaatttgtaactgtgtcaccaacctgaaagccttttgcctcaatttgagcaaaaaaccaattaaaactgttcacttttaatagccagagatgggaaaaatgactcatccaaaaaagtatgatttttttktctttattagaaatgttaaacagggaagtctatgcaaaaaaaggaatgctttatttggatgtaatttatataactagattatctatttttaaagttaacacccactactactatcttttttaaagtatctccattccagcttccatcaaaaacagctcacaaaactgcctgtctttttggcatatttaaagggtcaatttagataccagaatatatgatggtttctcccaaacattgcttctcaacacatggtcctaagagcagcagcaccagcaccgtcttagaaatgcagttacccatgccccaccctagaccsactgaatcagaaacccyggggccggggtccagcaatctgggtgttaacaagcccctccccaggtgattctgctgatgctgaactttgagaaccacttctccagaagaggcaggcattgacttagagctggggtggagtctttctgatgcagaacctaaatcccctttaaattcactacagaacaaagagggagggccagtctagagcctggactcctctcagggcaacccagcagatagtcacattcaacccaggccaagtctagtgtctgggacattctggtttgctcaggcctccaggcaggcttaattgggaaggccaagtcagattaaccctcagtaatttttatacatgccctatacttggtaagaaaatgtaccctctgcaccaaggcttgcctatgcattgtyggcttaataagacctgccttgcttgtaagacattatattttcattgatgttttgaccttagaacatgagaaagcacatgaacatatagcaaaactgaatcttagggtcaggaaagttcttccagcatggcacatgtatacatatgtaactaacctgcacaatgtgcacatgtaccctaaaacttaaagtataataaaaaaaaaacaaaaaacaataatgtgtcagacatgatacaagatgatttaaataaaagacctctttaaatatcgaaaaaaaaaaaagtgatctagtccatccgtttgtcaggcagtatagtggttgacacaacattctgaataacaacaacaatgaaagcaacaacaataaatactttcaaagcaccatatcttaccataaagtcatttcatatatgctgatgtgaatttcacataatgtttgcattagggaaggtaagtagctgcagtggcaccacccctaccaccaccaccaccaccaacaccaccaccaacaccactaccaccaccaccaccaccatcaccaccatcaccaccatccccaccatcatcatcatcatcatcatcatcaattatcatgagactgaagctcagagtgccttggtgacttgtccagagtcccaaaattaaaaaggagacactgaaattcttattttcccattctttttgcataacacctacataggattaaggaatttgattcaattggatgaattgtgtgaatattatgttctagttctaaaraatcttgcaagcccatgaggttggctatttattttcaatacctttcaatctagaagaaaccctgggcttactctctaggcctccttgctactctgcccttggcagccacatcctggccaaggcagacagcagggctatctcatgcttttaagaagttgataacaataaaaatatctttggaatttcttctcaaattagaaatgagggttctcatggagttaagtcttttaccctgtgcatatggaaatgagggttttgaattatctctagtagtgataatgattatacataacctgcacaacctctcccagtctcttatactagtgacctaggtgtacctaggaaatggtcaggggagcttacagtcatggagccaattgtgatcgaagcacatccatgctcagcccatcttccatctctaaaaggttgacagggagagttggagaggataagatcctaggattggcaggtttcaaaattaagagtgaggccgttagttgatctcagaaagtatttaactttcagggaatttaaaaatgtgccataattggagtgttatagttattaatatgattgtttaacctctttggctctccctggtacttactccagggcatcataaccccattttaaaacttcattctgctaacctaccaggctcatctggggagagttgttagttaaggctactccagtccctacatgctgtaaatgaaggtaaatttctcatggtgagtcttaccaccacccataccacctaaacaacttgcccaagggcaggcagtacatgaaatgaaggagctgagaatcccacatcacccatttgtgagttcccttagggaagcataaagtgtatattttctggaagtacaatttattatgttgtttgaaaatgttactctgagcaacagatgttatttttggagcttgagcaactttattttagttaaaaaaaaaagtcttggcagaagttaaaagattgttggctagaagaagtgtttggtacatgagttccaatctagtttccttagttgtacggagacagtttacatgcagaggcagaaatccgtaatttgctgtctttgagtggtcgccgctcaaagacatgctgctatgactaatgcagccagggctcagcaggagtccttcccttaaccttcagctttaaagtgccacacggacaaggcaaatgactgagaatctgatcgtgtcctcagaatcaatttgggttttggtacattttgttcctactcttcatttagctctgagtctgctctggaggagctgtttgagacctcaaagagagagcacaacctttagtgccaagaggattattgacaatttgctcttacattaaaatttccagagcggcaccctggcttaatgaagagagtgctccactggaaaacttcaataataccctttggattctctccaggtgcaaaaggtcaattttccaaaggaaattttgttttaactctatcttattctcatacacctttgactattttgtgctagttaacaccttttgtgggtggcaaatttctgagggagagataaagaaggaaaattcaatgtgactgcttagtggaccatgggtaatccaagcccagcaaagtaaacagtggttctgttggccccctaagacaaagtctatacagctcagggtatggcaactaatagaaaattctgctgttgactatatcaaggcggtccaatgggtgggtggaaacacagagcctggagaaacttgctagtggtgatacaggacgtctaataggtggctgcactgaagccccagatgatcaatccttttcggatcaatattctagcccaaagttgggggtgcaagccttgttcatgtcccttggaagtgggaattaatgagcttcacaggctgtcaaagtctcaaaagaagggagtaggttcagagaaggctcatgtggtaagctggacattagctttatggatgtcccaaatacttagattgtttaggagaagtctaaagtttggtgaataggcagtgagttttgagcttacttcagaagctctagaaaggaggatggatgaatctaggccccacaaatggtaatggagcccctatgtaaaacttgctccagtcaggactggctcagagatcagtgagtcttctggagtcagaccttattaactgtgccttgtgctagtcaattaactgagtaacctcatccattcttgctctttccctgctttgctctgttttaaatagaactgcatttccttgtctctcttctcctcttcatttctggcacatttggccaatgtgaggtagtagcagaagactgcaatatggaaaggaaaaaccacaatgtttctctctctctcctctctccactctcctctctctctccgccctaccccttcctgtagtatttcctgtgatgtttccattcctgtggagtaattgggtcccatctagagttctaattaccttaagaaagctcctccttcaatgatcgtctttcccactaggcagtcttcactgactccagcttctcctggacagctccagatgctgggctctggttacccatttcctcctgttgtttcatcacctctagttgtggttacagttttctcctgttgccttccatctcctaatggcttctcaggtttttcatcattttggataataatttcccttgattaaatgcatcggtttgaaagacgtagagtggtttctgttttcctggctagaccctatgatacactctcactgagcagatctggattcgcagcagagaccatctgactattaaattactttctttcctctattccacatgtatgtcttatccgctactggaaacacttcccctatgtaacccaattcttcacattcatgtcgaatcttagttcttttgggtcattgttcctttgctttcaaatctgtatattcattggaaaattaacaagggcaacgtttgaaatatgatccaggaaraatgactctgagtcacaaaatgatgttatcaattttaatcttcatctcttcttcttccctgctccctgagtcatccaatttttctagcatattatttatttctcttttttcaatatcaggccacctggcagggataacgtctgcttggcttttgtgtagtgcttctggcattgttgactcactgcaaaagaaagtgctatagtctccacctacattttgtgatgtttcaacaaaaggttgaaactagggatcctcgttaacacaaccgggggctcaagggcaaataatactcatattgcttcagcaaagttcatcaaaattcttagcaaaaatctaggcttaacctgaacatctccataaaacctattgctaataggaagaatggaaactcttcataatataaacgtatgttataggactctaaggtctagagcaatattgtaaggaggtctaggttccatttttcacagtggcaggaattagctgtgtgatgataggcaagtttayctttctgagataattttcacatttgtgaaataagggaattggactaggtcatctttaagagcccagaaaaataaagctgaaaccacaccgtaaatttatttggttgtgtttttaaaaaattcttcatgttatattttccttccttgagaacaaaagagctcttcatgtatgtagaagaaaggcttctctgctgccttttctcacttcaatactcccacccattgtagtaccatttatgttttgaccaatggatgtataatgcttatgtataatgggacatgtatgataattagggatcttaattattccttcatcataaaaacaatgctataggacctgtctctaagaatgagagaaaactctaatggggttcttaattatggattttaagcctgtatagttaatatttatatgcccaagctctccccagtcctcttagctggaggatttatctgatacattggaatatttgaactcctgatttctttttttattctgattgatgtaagacatactttctcctggaggcagtccttggccagggctgtgcctggaccttgtttcactcagtgcataaccagagtagtctgccatttcagcaatgagatttaggtccttcggccctcaaacattcctcttcccattgctttgctcttgttctgtgtaagtattctgaaattcataagagattcattttgattaaggcagtagtctcatttttcaagtctttctttagacagcacttcctcagggaaaatttccgttcctaccactagtctaagttacaatgtatttctacaatgctctcgaatctccttaccaggtaaggatactgggtttaaattttgcctccacctcttagtaactttatgaaaattatttaagcttcataagacttaatttttaaacctgtgaaatgggaataataacagaatatactttgtatgttttgggaagaggatttttaatgcaaaatacttagaacagtgcttggcacatggtaaatggtcaacaatatgttttattattattattattattgttattggtagtattgattccttagttatatatctttaccaccagatagtaagctgcatgaaggcagagactgtaggtcttgtgtatggttcaagtccaggctcctaacataggttctgattcaaaataggtgcttgataaataatcaatcaagtgaatgagtgagtctctaaaatcgttttctaaaatgcatgtgcttccaggagaattaattgagtgcaccagctactcatggtgagtgaaggggatctggctggttcctgaacaggcaaaatgtaaatgggaagaaggaggaaggaaggtccagagtgtttggtgaacaggtctgtgcactgtacaaggggctttcaggaactagcttattattcctsagactggagaggacctaaggagaagataaacattctccaaagaatacacttgttgactgatgttttccttgggatggtccatatgtacagattatactgtgtgacacagtggcctactttattactttatttgtactagatagagcaaaacactaagtgatgcccctstttctttctttctttctttctttctttctttctttctttctttctttctttctttctttctttctttctttctttctttcttctctttgagatggagtctcaytctgttgcctaggctgcagtgcaatggcgtgatctcagctcactgcagcctccgcctcctgggttcaagcaattctcatgcctcaacctcccgggtagctgtgactacaagcatgtgccgccacacctgagtaatttttgtatttttagtagagacggggtttcaccatgttggccaggaagatcttgatctcctaacctgatgatctgcctgcctcggcctcccgaagtgctgggattacaggtgggagccattgcgcccagacgatgcccctgtttctaaggagtattattccctaaggctttaatgcttattgagcaaaccctgatgtatttttccaattcaattcttacatctccgtctccactatgctgccatccaagctgtggggctgcgttaattcttgacttccagcattctgtgtaatgccttcaaatgtctttggacaaagcrtgatcataattaatataattatttttcatatgcaaagtattttattgtggcagtatctcttttgatcactaaaattatcctgtgggataaataatttaaatattactgtgatttctattttagacatgaagaaactgagattgaaaggttaacaaatctaaggctacactccaaattctgcataccttttgyggtgtgatttcttcttgtttcctttatagatggagcccttaacaaaagttttgaaaagcccttaacaaaagttttctaaaaagccatgtttcagcggcacctgagatgctttgcacctgctgcaatccctgtgtgcctcatttcagcttgtcaagtggtcggtayccgcgcatggttactgtgctgcccagcgagggtcacagtgctttgtacttagaattcgtgaaatatacacaatctaacactactgttttcagtacaatatcaagacaaggattcaaaacaaaaaaaaatgaccaaaatgtgcacatatatatatgcacatatatagaagtgtacaaataaaaactgctcaactgtggagaactgtacttagccattataatgaaacagatttgctgttttatacaagtagaaatttgttatagatactaaatattcgtgttcatttttccctctattttccaaaatgtatgataatctctactgctttcttccttcttatatcaactatggaatatcaaaattttcttaattgtcttaggccaagatgcattaaatctcacccttttccattgtttggaagataaatttggttgggattttttgttgttgttttgtttccattaagatttttttgtttgtttgtttgagacggagtcctgctctgtcgcccaggctggagtgcagtggcacaatctcggctcactgcaagctacgcctcccgggttcacaccattctcctgcctcagcctcacaagcagctggcactacaggcgcccgccaccacgcccagctaagtttttggtatttttagtagagacggggtttcactgtgttagccaggatggtctcgatctcctgacctcgtgatctgcctgcctcggcctcccaaagtgctgggattacaggcgtgagccaccgtgcccagccctccattaagattttttaaattgtatcaatagatataaatatgtccaaatcaataacttttatttgaaaactaaaaatcctgagaggccaaatacaatgtttaaaatatatagttaaatcaataataattctcccttctgtaaaagtaaataattatctttatgtgagaacgaaaaaggtatttctgtactagtaaggcagcaaattatgcaaaagcatgaactactattgtggttgtaggccacaaatggtagggacctatcaagaggacacaagaaccagcttgaaaggactctccctggtgacttctgagacaaagtaatgtcagtaatggattacaatccattgaacaaaaaaagaatacatggttccctgttgatataaacagtaagtgtataaaaaaatcaacagggagaaagacaagttctttcttacaatagaatatcaaccaataaatgtagaagaaatgacaagttagaaaactatcattcggaaattatcaaaataattgattcaggcaggagtcaccagtggaggctgaaactaatgagtgaaagtgtggtgaggatcaggatatttacatagtttcagaatatcttccacaaattgctcattaattgtcagatagaaaaataataactttacagtggaaaattctaaaaaaatgccaccttaataaaataaaataaaataatgccaccttaataaaataaagttcatgtcaccaatgatgggacatgaaccaacaacatatgcctcctgatatgaagcactaagaaggacacacatcgttctgtagcatttctgccccaaaatacctaatccgaatctaattatgaggaagtattagacaactgagggacattttagtctatctctcttgaaaaactgtgtactcttcaaaattccttatactctgcaaaaatgtcaaagatgaaatatcattaaaaaatgctgagaggccaggcacaatggttcacacttgtaatcccagcactttgggaggccgaggtaggtggatcgcttgagcccaggagtttgatcccagcctgggcaacacagtgagaccccrtctcttaaaaaaatgcaaaaattagccaggtgtggtgatgtgtgcctgtaatcctagctacttgggaagctgaagtgggaagatcacatgagcccaggaggtcgaggctgcagcgagccaagatcataacactgtgttccagcctggatgacagagcgagattctatctaaaaaaaaacaaaaaaacaaaaaaactgaggaactgttccaatttaaaagagtgtaaagagttataacaactaaatgctatgttcagtcctagattagattctggaccaaggagaggaaagtaactagaaagggcatgattgggacaattgaagaaattcaaatatagactgtggattagataatgtcattgcatcatgttaaattttctgatattgataattatacttttgttatcctacaaaatgtatttattatgaagtatagatattgaaacacttaaatgtaaggaggcaaaatgtttccaacttattctcaggtacagaaaaatatgaatgtgtgtatatatatttatttatamataaatatttatgtatagagagaagggagagtgaatgataaaacaaatgggaaaaatgtaaacagtttgtggatctggataaacagaatatgagagttatgtaatcttttctcatagcttttttctaagtttgaaaatatatacaaaagagtgacaaaaaaatgttgaaaagcaaaattttctcatcagtaaaggcagtcatttacattgtactgtgatgaaaaagaaaagcctggcttattcaaataagcagccaaagctcttatttcctagtcatcagttatctttgcgtgctttgaagttggagttctctttcatgtttgtattgtttttatttgtttgtaagtataatgtgggaaccaaaaagagtgaaaatgggacactctggtaagttatctctaccactttaggggacaggaagcagctgacaagctttagcactacattttcatggtygtttcccaagaatggccataaattacatccttcaagtcagtcccaactagtgggaattcatatgaaaaattacttgctggttctcaagcttcttgcacgtccctcttgacattttgtcataggaaaactgggggtggatggattgtaaaatatttctcaacattacaaaacattttaaagctgataccagacctacactcatatctgctgattacaaataattctaagctattctggtatgccctgagcatctgtcttatatgcaaaataagtggcctcttctgttttcccctgtcttcttgaactgtctgtctcttttcaaaaactgtgtattcttcaaaattcctgcaatgcmgaatgaaaaacggaggccatccactacagtggaaaatgtagagcaactccaagaaaagaggctggaagaaaagacaggcttagagatgtctgacagacttgaagatggtttccattttcccattttgcaagaggggcaatggatcctctaacaacagagcctgagttagtatgttatcatgtattacctcgtttaatcccctcaatatctctatgagataggcactatttttatccctattttgtagctcagatacaggcttagaggtttagagaagtaaataacttgtcaaatgtgagtagtagggttgagatttgcacgaaaatgcgcctgacttcagggtctgacttaagcttaaactgccttgttttattgatcatattgatcactctatttctttctcctgaggactcgcaaagcaatgataataccattctgctcttgcatcatttgttgcacattcttgtttagaaagaaaatactaacaactattagagattttctgaacctagtaatttcattaacaagcattccccaagtctacagggcaaattttttgatactcacaatgttacttcttgtgaaaattttgaagtgatttctgaatcatcagagagatagagattaaagtgacactgttttaaaagttggtaattatcatacaattgcatgaaagctgatgtggtatttgtggtaaacttccgtattaggatgggtaagcctgtatggcagggttcttaacctgaactccagatccagcaaagggtccacaggtrgatttcagggggtctgtgaacttgtatgggaaaacatttcatctacattttcatgcacccttaaatgacatttggcactgccttccatgatgaatgtagaaacaaatcacagtgttagcaatacctgtgactttgtccctaatagaaatgatggatatttccattcgtatcagttgttgctgatatctcaaaatgttatttttcgtcatcattaatgtgaaatcataattaataagctcaagaccagattatattgaacatattaataaagaatgtaattactatatcacctatttattttaaaaaatgtttttctaacagtatatcaatatttataaatatatatatatatttttttattatactttaagttttagggtacatgtgcactttgtgcaggttagttacatatgtatacatgtgccatatttcatcatagttgattttatttgtaatgacatatattttatatatatttaaaagtattattatgagaaatagttcaaaggctgtgcacaaatggtttacagcacaaaaggggtgaaagatccagctctataatataaacttcatggtagccctagtggagaatacccttgcttaacaactggctgttttcagagtcccctgggggccctgcagtgactccaggagtagagaaaggctgtaaatgctagaacaagataattgtcaggtactaccaagaagccctacccagccttcccaattagaagacaggagtcccccaatcccaaccactttcaggtcctagtttctgcccaaccccattacctgttcttcttactcaattttaatgaaagcagctctactggcagcaacttcattgtgaccccagtgctctggcaagctgggcctgtgtcagcaggccacaggggtggatgagagccaagacttttgtgattgcctctacccwcattttcctgtggaaacacagctcagaaggactatgctggagggttgatcagcttggttatgtatttgctttgcggaaaccttaagttgtcctyttatgtgtcactttctctcatttcatttttttaatcctttattttccaacaggcaggttctggtcacacctacccaggtggcaccaggtgtgtgcatgtttttccaaaagttacaatgcagcatagacactggaaaatgaagatgaaaaaacacagtggtgttagattacttcatatacttcaacaccatgcctgctttttcctttttttaattgcttgttttatattctttatttagttttttccagtctgaatatctcttagctgagtttcttatcccaattaatcattttatacatacactggtttcttttccaagtctctttgtaaagcaagaatcaatatgaggtgtcagtgtctaaagctttcacacttagcaacttaacattttaaaaaatgaaaatatataatactacaatttcatttaaattaactattctgaagctcctccatcaaatattaggaaagacccttttaaagtttaatacatttttaaaattctaggtatgaaaattctgtttacataatagtctttaagttgctgtctcacctaaataagacacagaggcagtgtttatgaatatgattgccgagtgagattgagacaaatttcaacctacattgattgtcctatttggcaggagaccaacgagctgccacataatgtacgcaccagaagactggctatgttctttggccatcagcggatgtccatggttgctgcctataattgcagtgtttttcccattctgcaaatttctcattaatcaggttactttagctatttggccaaattttcctcgaagaaaatgaaatacaatcaatccctgattcttttctgattattagagacactgctctccttcataaggaacaataatcaaagtagaatttatatttggcttcataatgcaatatgtgagtttttccaacagatttgccctcttaattgctttggtctggcaaactttaaaaggaacttgccttacgtggatggcagtatgaggttgtccagaactgaaccgggtggttggcaatctgaacaaagcttctgtgctttattgattgccagggagactcgggggctaaatggcaagccaaaagacaaggattcagaatatataactgtactagtttgctagcactgcctcaacaaagtaccacaagctggggggcttaaacaacagaaatttactgcctcatgcttctggaggctaraactccaaaatcaaggcgtcagaaggattggttccttccaaagtctgtaagggaggatctgttccctgcctctgtcctagcttctggtaacctcaggccgtccttggcttgcagatggtgttctccttatgtttccatatcatctctctgtgtgtgtctgtctctgtgtccaaatttccccatttcataagaacatagtcatatttaatcacttagggcttactccaatgaaatcatcttagcttgatcatcaacaaagatcttatttttaaataaggtcacattcacagatactaagattaggacttcagtgtcctttgaggggacacaattcaacccataacactatctatcttgaaaaatcaccagagaggataatttatagccattggtaaaatttatgcaaatcatacaatttcccttcagtcaatgcatttattctgggtgccatatttagatgataggctgccaaaagtaatgcaccgtgaatattctttttctttatattataaaagctattcaattactcctggattttccaggaactatggttctctagttccttataaatctcaatggtatttttctgaatcttactgctttccttttatttataaatactagactctcccactttaagcaaatgtctaaagactggggtaaaagatctcttttgtgagcaaagtgcatgtctagggccctgttatttaagaaatttaagatcatcaatttcaaacattcaaagcctatactgctggttcatatttttcactatccagaacagtaatcttcacaatggttagctgtgttctctaaaagtcgcagataattgttatcacatttaaaatcaagcacccatcacaactccccagttctttcttttaggaaaacctaaagaaaccttggatgaccttaagactctatggaaaagctggaaaaacactgacccagaaaacaaatgtgtaacaagtcacattttttccattacttaagggaaattgtggtgcgaatttttttcttaatctctctgctaagtgtaaatatgtgactcacccgaactacctcattcttagaccataaatattaggagtgatgacttataaggggctcatgttcatgtgtggtaagtaaatacttgtctgcacatattaatttaacaagaaaatggcattttcctaagtagcataacatcagaaacagtagagaatttaatataagtaaaaagcagtgttatattttaagaaaattactatgatgaaagaattcatttttttcaaagagtaatataataatattaggctttaatacctaagaacatgcatgctagatctggttccaatccaaaaaagttctatgaaacttcaaataccatgtgaaggttaacttttaaaaatacatttcttcagagcaaatttctattcctagtccatgcgaaaccacagggtggtgctccagctggactggtttcctcaattcaagttatccttgtccagtttccttcttagggcactgctacatgaaaacctgatgtgttctgtgttcttgcagcaaactcctactgtgtcctatcttggctcaggcaggacaaaatgaagctctccatctctaggaggtggcttgcttcagagccttctctgtccaaaacaagagttttttccatattgtttctctctaggcttttgaaattagaggggaaacactatggataatagcttcagaaaatatgaaaagctcacctattacagcagatgggactgaagtatcagtccatatctaaggcaggtgaattggtgcatttgaagcattccaagtcagtaggacagccagaaatatgaaatgaaaagcactagttttccttagcaatgaaattttgactcctrtgactttgctaatgctgtgttctgctttcctttctgcctattctatttgtacaaccttctgtgccttcctcagatggctttccaaaacatctgtgggcaatattcccttcactgaacagcaatggtactttaartgcaaaacaaaacagcatttacctttkgcaatttatagttcctrggttatttcatgtgccttgtggttatctcaggagccctttattaatctccgaactgtaggcaagaaggtggtcttgttgtcatggtaataacttcagtacttagcacatggaacgcagcatttattgtaaaatacttttccaatcaaatggttgcagcagttttagaagtcataacagtaagggtagcatgcagttcatgaattccttcatcaggaggaaaagactgacctgatttataaaggaaaaggaagcataataaaagtggaattctgttaacctaaccatattagttctctttgcttagagttagggggtgtccaatcttttccaagaaaactttgtatattctggcagtgccctctggtggatgatttactatgatccactaccattcagttcctggacattacatttcacctgaaagatttctaccttttgttaccacttagcatttttccccccatctcaagatgaatagtgttttctttcaaagtttcttgaatatctacatctacaatctacaacaaatgccactggattgtggtttgtaaggaatatctaaggtgaattcyagcaaagtgaatatcagtttctaccacttattactttcaaagtcattaaattgctaatatgggtgcaatttggctgttgcgtggaaacacttggcttgggtatgtttatgtaaatggttcaaagctgtggactgtgtatctggcaagctgcttctaagaaacaaaggagaaataggcatgttttccatttaaaagacatgtggttcttattgacttaccgagattggtttttgtttttgctttgttttattttcaaagtcagttttccactctaagattaagtgtgttcattatagaaaacgtagaaaatacagaggaaaaaaatcacccatagtcacaacaaaaccaagactgattttggatgtagcctacggaggtagaatgctcccctggggtagattttagaaacaggctgtagtggaccaaaggggagcatggcattaagtttccacaagctgttttctctatttataaagtacaataacaatattgcatgtattatgtactttcattttctgtctcaaattaggtatggagattgcataataataatagcagccatttatttagcacagaatttcaaagcctaaccctagagctgccctttgcctcctggagaacagcagttcagcccacactcaattcttccctataacctcccacatctctgccaggatttattcttgtaatagtaataactgytgtttaacaggtcctcattacacaagagaatgcagcgattaatatgcagcctgtttgaattccaattctggcttttccacctaatagctgagagatcttggatgagtaattaaagtctctgcttcagtctccttctttgtaaaataaaggccctgccacacaaggttttttggagaaaactaagtccctagaacagatctgggaacataaatgttagttatcattgttaacatattacgatgatatattagacatgatactaagttccttattacgccatttactcctcataacaatcctatgagttagatattctttatccctgtttcaggtaatgaaaatgaaacagagagctccaatgacttgcccaaatcacacggcaagttacaatgttgagcctagatatgagcctacatttgacggtctataaagtttcagctcgccatcttgttttggctctgataggttagctattattttgcttgtttgtttaatttgtattgaagtataaaatatatttaatatataaaaatgcatattacacagtttacactgtgtaaatattcccaaatgaaaaactcctgagatatcatcactgcatctttaccagatcccatccaaaggtgactactaagctcccttctaatatcatagctgtggtccaaaagtgagcagtcttggccttgtacctactctccctccccgtcctttcccccagtagccttcaggggggttcacagaccaaagtagcatagtaggagaaccactgtctataccctgcatatgcaaatgcattcatctcagtgggttgtaactctcaggaaggaaggattctaaggccatagagcgcaaaggaaagtatgacatgatcgattagtratgtctatcatagtcacgaaacgaggatggtggagatctgtaggctggtcctagacaccatttatgaacagaaacaacttttctttaaagtattttattttctaccrtttctaaatccagtatccatgtgaattggcatgttggcataatcatgctgttggctatttagtacaaataggctaaatattaacctaagaatcatctatgtgcatgtaactttctgcatttgtccaatagatcttttgagagaaattactggaagtggaattcctttcattaaagtctccaccctcttctatagaagtagcacttttcccctccagtatgcaacacaggtcacattctgccatgaactagtattgttaatgaacatctttctccccatcagaactgcaaagcccttgagtactaattctgtcttgtgctttcatgtatcatccacctcccctcccaccagtgcctagcactggtgttttctttgttcatagtagatgtggatacatttttttggctttaaatataaagatacattttactattaatattttaaaatatgttaagaattaagtatcagaattcagtctatataaggaaagcctgagatgaagtgataaaaaatagaygaaaaagtcttgatttttcagaaagaacaaataagcaaataaacacagccctgtttttctcagtcactattagatattgaacattaagagttaaaggactgcaggctgggcgcggtggctcacgcctgtaatcccagcactttgggaaaccgaggcgggcggattacgaggtcaggagattgagaccatccttgctaatacagtgaaaccccgtctctactaaagaatacaaaaaattagccgggcgtggtggcgggcgcctgtagtcccagctactcgggaggctgaggcaggagaatggcatgaacccaggaggcggaggttgcagtgagccgagacggcgccactgcagtccagcctgggtgacagagctagactctgtctcaaaaaaaaaaaaaaaaaaaaaamaaaaaaaaaaaacagagttaaaggactgcaaatgaatttaatgaaactattgcccaaatgattgatgttcatgtacagaccaaaatttcagtgctaaatagacatgttaataatgatgctggaatatacgagtatttaaaaatctccaaattcctggggaattagtagttgtaataaaagtgacttcttctcattcacttcatgactccttaatgtctctgcacttgcttggtatcagcggcttatttaacaagtcactgcacataacttgtattccttaataattaatacacttaaagtttcctatgcttacatggatagaaatgttttcccagtgtcttaagtttgattcttgcaacactcatctctgtgttctttcagaaacaggaggctcactgtagctgaccagcactggcatggtccttcatttgctgtttgttttttaggtcatttcccccccgcatttctaccttctttattcgcaccttctttattcacaccttcttgttttattccaattaacattcccaatcttccttttgaaaatcccagaagtccccatcatggccagtctgcctagccttctgggtgtcttctgactttattacttatagttcacttgtaatttgttttgttttggatccacctacatacagccttgtattttggatgttttctctctctggcttttttctctcaggtcacgttatctaagaatatattccactcactccctgggctataaggatataattacactggtcagaaagactccctggctttggtttgcagaatatgaccttacataaatattatatatcaaaatgattaaaatctaggtctgcaaatgaacatcatttcaaatttgcagtgttttcttgcgtctaaccactctgtaagtggagattcgagatttggacactcttccatgttattctgggagaatctgatatatgttttacatgtttcatgtacatggattaatattatccattaagactcacagatgtgctgtccaattcctgagacttatttttgattgtatagaactggtaggattcctttgaattttaaataaacatacattttcccaagtagtaaacaactccatggtctctctctttttggttcaacatctaaatacataaatttcttataatctaccttttagtttgctcagctctgatccttaattgaacattctgggttaatattgtgtttgwtgttgaatgttcctaaacaagttgtcacrttttgaaacaagtgttctagattagtgggcataatttcagatacatgttctctatgtatatgtattttaaaacaaagtttcaatttccttgctgccctcggtattcttaaaaataaatatacttatgtagaactacagttagaaagtgattccagtttttctctatctttattcagattgttttgtactgaattaagtaaaaatttttcccccaaatacccatctcatttggcttgtaaagactgttttagtgaaagaatgttacaaaatgtttttttgctgaaagcarattttacaacagaaatgatgttcatttgcaaacctggattttaatcatttagatttctaatattaatgtaaggtcatataattctgcaaaccaaggccaaggagtctttctggtcaccagtataattatcagtttcatccaatgtttactaggggttggtgaattcattttgttaaaatgagatctggcatgaacctttactccaggcttaactgaaataaacatagccttaaatttttttttttttttttggcttcactgaattagatttagaagctggacacaatcaaaagctttagaatgtcaaagagaaggcgtttttgaaggagatgtaggctttccttttaagaatatttgaataaaacctaaataaaaatgaaaccaaagagagggattgttaatgtaatatttccaagttgatgtgcttaaggctaatctgcatgcgtttgtactgctctccaatccaatgcaaaggccaaatcgctgaaagtaaacaggacttgggaagctgcctgctcaggaattcaaagactagctttcattctgcgcttaactcacagttgtcagtttagatgggtcccatgctctgtgcctgggagagagtgattcactttacatgctttggttctaatgcaaatgcaaagagtcatattgcaccttacactatagtacagtaaattgaatagcctgacctttcaaattgacagtcccagatttgatttccaatagggcagcatgactagctgtgagagcataggttagctactcaagccatgtaaacctcagtttcctcatctgtgaaaagggaataaaataccgaccttattttgcaaggacattgtatggaaagaatgtatagagtgactatgtaatttatcatgcaaatcagaagttttgagagtgaaaagggcattattaaaaattatgctgggatgatgtctgtaaaatatggctatcccagaccagccaggaatataatataaaataacataatacagtattactataaattattacattaaatgtaaaatacatatcatgtttaccataagataaggagcctggcatattgtagcacttggtttcagttccttcattttttattttgaaacatttaaagtttatttatcacttttgtgtattatggcatttgataatcacaacagtcttgtaaggcatttcattttatcaagtgttaagactcaaaaagcgttactacttttcttgagattctaaagagaataacagagctaggagaaatctagttttatctttccaagcatagtgttttgcttttccctgtaccacacatttctcccaaagggcttgtaaacacattatctatgcaattatgggttcatgtgtctggtgcaaatttctcaatcaaccaccgtaggcatggaaagcaactgtaactgtactttttcttaaaatgaactaatttctatcttaatttttattctgtgttctgatatgaaagttgaaatagtccattttacgtgaattcagcctaaaacttcagatttttgttagtgggtttacggccaattcagccaccgtggggttctgctgttgcttctttactccctggtgtgaaatctaagatacaagggcttacgcctagcactggaagtcttcatcatttggtcaggcacagctgcccctctgtgctgccatccactgaggcacctgagcacacctgctgttgaaatccccttgtcagattgcagcacgtgcacaggtcccgtgactgatggcacacctgcgacactctcagagccagggagctagcatcggacacaccccgggccccatttgcagagtggctctgccaccctgtttgagatccatctgcctggccatcccatgagtggtccttattgttcctccttaatcaaaggggatttggtgagatctctcatggccctgacaggctgtgaaggagaagttccccttgttccaacttcttcamagctaaccagggattgctctgtctctctcttcttctttaattccaggtcactggctcagcctaagagggagggggtataagtccacaccaaaatttatctcccttgcttttctaactgtcctctcttcctagtccagaaagagtgtttatctcaggcctctgagaatggggttgtttgggaactgggggagcagagggttcttgttagactccaattgttaatgccaagacattggtctgttaaaacgtaggaatggctatctgtgatttctctttgcatctgtgctctggtttaccttccctgtggggagtggagatcaaggtctaatagaaagagaaggaatggaaaaaagaaaagaaaatttttctgttaaaaaagacttaagtaaatgcttctccacattattgctcccactcatttcacaaccttctgtcattttgttctagttctgtttctcacagcattgtgcatgtaaaccatatttggtacactactaaatagtagctggatatatcattagatttgtgtgattcacagtgttatcttcagaccaaatgatgactgataaatgttcataatgggcctgtctccatgaattgtatgtgattcagaaccatttgataatagcttgaaagcctagattgactctctgcattgccacccctccctattctcttaagcccactccattcacgctgtcatccacaccactcggccaccaatttcacactgccaaatccagttcccagttctcatcgtgtttatttgcaacatttgaaacaagtgatcaatcccttttccatgaaaaaccttctttgcacagtttccagaattctaaactttcctggttttcctcctacttcaactttccaattaccgtccctcatttttacctcatcagcccaactgtttaaagtgccccagagttcagggtactcctatagctatgctgccttcaagtgacctcatccaatcttgtggctttaaatagcatctttatactgacaaatttgcaaatttgtatctctttcctgaatttctgccctcaacaccagactcttgcactccatggtcactgagcatctccattgcatgtttaaaagatattaccaagttatcttgcacaaaactggctttcaatccctaccctccaacctgcttttcctgcagtctttctttatctcaggaaatggaacttcattcttccaatttcttggcccacraaccttggagtcatccttcactcctcttttcctctcatactccacacccttcttcacctcctcactcacctcttcttcttccacttgccctactttgtgctctccattccagccacactggtggcctcctgttccttaaacaggccaagtgcatgcctgcctcagaacctctacacttgccctttcttctgcctggaacattctgtccccagatacatggatggctcacttcgtcacctgctttgggtctttgcctagatgacatcttgttagtgaaaccttctttggtcaccttccttaaaataagataccaatcaaatccctccaactcctctttcttctccctgctttacttttcttcatagcacttaccaccatataacatactatttatttatttggtttttgttttagtatctgtttgcctgtactaaaatctaaggaccatgaagcttgagggaagagatttcatctgtttacatctctaggacctacaggagcctgccacattgtagctgctcaatcaatattgaacaaaatgaatgaactcagggccagtagttactcaacaaccagctcattgccatgcacatagtaggtattagttaatatttgtttcatgaatgaatacaatggcttaaatctatgagcagttgtcttgaactctaaaactcacagaaaataatatgtatgtattattacatatgtgtgtttatataatatatacattatataaacacacatgtgtgtatatattatatgtacatacacacgtgtgtgtgtatattatatgtacatatatgaatgtgtatatgtatattttaatttatattatccacagtttttgtctttgttctgaggttttctagggaaaatctcattaattaccgtcgaattttcttttagtgtgcttaagcaaaagcctggtacctgtacagggtagatgtgtttggtaatagttactaacactaacctattacattaacctacacaaccagcccccatcctccagcagagcttcagacagcatgtaccaaagatcactaagccaaatcctttggacttgaaagaagggttctggaaagtcacttttattctttttgtctccaaatgtactcctccctgtggtgcgatttgcttttctacctcacgctgtgaagaaatgggtttggaacagctagaagaaagctggctaagttgtgtgcttttgccagtatatgtatcaagacttgtgccagttatttcaaagtgagaatataacagatgatgatagtttcagaaagtatgtataaagatatttcaggggttttttttaggyggtttaactacctaaaatatcttatgagggagactggtgttacatttttatttcttctctcctaccccccytctctcttctctttcttgagacccaaagtattattattatccagataaatgctagaaaaatcaaaagcaaaataaagaagaggccaattgataagtcgccaccaaacaatccaaaattgatgcttaaattacagtgcatgagccatatcaaccatgtagctatattaggatcatgtgtataataaataagcaaaacaatctttgatgagcttttaaaattagtttatttccaaacagagagaacaaaataaatgaggtataaagtgaaattttcctataaaatactccagtgtgctacatggaaacattgacctgtacccatgtttgtatagctgttagattttggttttgtctgacaatttactaagaaatttactcttagagttgctagcaagagaatattcctgtggcatttgtgttgaaatgaacataagattggcaaagtgaatctgaagtggaatcttctaatttgaataaggtaatgactcttggattattaaggctaaaagataraatatgtaaatatttgagcctgtgaaataatttttaacacatttattaatggagaataatcaatattttgtgattaaatatatatgtattaatcagatatgtgttcttgcacattctttaaagttaagcgaatatgagtaacttgaagaagttagaaacaaaccaaataaaactaatagtaaaatgttaaaygcttgtcaattgagttctacttctagacctacagtgtcaatgatggtaagataaattcctctttgtatcacacactttaaaatgctgaaatatatataacacatggctgagccaaaataaatgtgaaaaaatattgaagacgcaagaataatagctggataagggagctctagaacattactggaacagtaagctggaacagacttctaatttcagccttgaaatggaacgagcttgtaagtcatcacttccattcttacaaaaagaaaaagctaaataaactgaataacaatcacttttcttggaccagtcagaatattaaagttcccagggaatctatcatactttgaaacctggaaagagacagacaaatacagaaaatcataggcaagatcagttcacctgaacagaagctgatgggactgtgaaatgttctctaatattaaaaataggcaacattcaagaacagacgggtaatataagcagaaagatagaaactttaaaaaatcaaaatcaaaaggatattatgctagaaataagaaataaacaaaactaacagaaaggaagaatgtgtttcatggccttatcagtagcttggacacagctgaggaaggaatcagtgagctttaaggtatgccaataggtaaaaacccatctctactaaaaatacaaaaaattagctgggcgtggtggcaggcacctgtagtcccaactactcaggaggctgaggcaggagaatagcttgaacttgggaggtggaggttgcagtgagccgagactgctccactgcactgcagcctgggtgacagagtgagaatccatctcaaaatagaaaaaaaaaaaaaagacacatcaataggaacctcccaaaataaaatgtgaagggaaaaaagaatgaaaaatataaaaatgaacactctccacactgggtatctaagaactgtaggatagtgtcaaaagatgtacacatagttggaataccataaaaagaaagagaaagaagcaaaataaatatttgaaataataacttagaatattccaaaactaatggcaactaccaaatcacacatctaaaagctcagagaacaccaagtagagtaaataccaaaaaagctacacgtacacataggaaaatcatagaaaactccaaaacaaaacaaagactaaaaacatattgaaagcagctggcatggggggaagatctttcttatagagaagcaagtataagaattacatagcagactcatcagaacccaagcaagaagagagtggagcgaaatattttaagttctgaaagaaaaaaaaattacctagaattatgtatccagtgaaattatcctttaaaagtaaagaagaaatgaagatttttctcaggcaaacaaaaattgacagaattcatcggtagcagagctgccctacaagaaatgttaaaaaaattattcatggagaaaaaaacattacataggccagaaactcagatttacataaaaagggaaaaaayratagagaaagaataaataacgtaaaataaaatcttttgtttcttattttttaaatgatttaattataactgttattcaaatgataatagtaatgatgtattgggtgattatagcatatggataaggaatatgaatgacagtaatgtaagagatgagagagaagagttgggagtatctgtgagggccctcttcctggtttccgggtagctgtctttttgctaacccccaaatgggagaaaaagagtgagagaactctcaggggtgccttttataagggcattaatcccagtcatgagggtttcatcctcatgatctattgtctccgaaaggctccacctcctaatattatcaacttaggggttaggattttcatatattagttttggagagacacaaacattcagttcataacaccttttaaaaaagaaagcagacagaagttccattagagaattctaccaaacatttaagaaagattgagacaattttctacagaaataaaagcagtgaacactttgtataaggccagcattagcctagaagcagaaccagatgaacatagtatacttgaggggtgaaaaactggatttttctcctagtaaggtcataaacaaggcaaggatatcccctctttccacttctatacaacatttcaccagaagacctaactagtgtaatmagacaggaaaaggaaataaagatacgcagattgggaaggaagaaatgcaactgtctttgttcacaaatgatatgattttctatgtagaaaatccccccaaatttgcacaaaacccctggaattaataagtaattatatcaaataacagtatacaagtttaatgtataaaagttaattgcttttctatatactagcaatgaacagatggaatttgacattaaaaacactgtaccatttaaaacagcacaaagaaaattaaatgcttatgtataaatctaacaaaataygtaccagatctatgcgagaagcattataaaactctgatctaataaagaagatctaaataaatggagagatactgcatgttcacagattggaagactcaatattgttaagatgcctgttcttcccaacttaacctatagattcaatccaattcaagtaaaatcccagcaactgattttgtagatatcaacaatctgtttctaaaatttatatggaaaggtaaaaaaacctagagtagccaacacaatattaaagaggaagaatgagttccatcactaacactaccagacttcaaggcttatttataaggctgtaggacagcatggtattcatgaacaaatagacagatagttcgatgaaacagaataaagagctcagaggtagacctacacaaataaagtcaactgatattttaccaaggagcaaaggcaagtaaatgtagaaagaatagctttttaaaaacaaatttatgttgtaaaaagcaagcgcccacaggcaaaaaaaaaaaaaaaaaaaaaaagtctagacacaggtgaacaactttcacaaaaattaatcaaaatggatcatatacctaaatgtaaaatgcaaaactgtaaggtttctagattatagtataggagaaaatctaggtaagcttcagtttcatgaagaccttttagaagtgacagcaaawgaaagatccatgaaaataaaaaaaggttgataattggactttattaaaatttaaaacttctgttacgttaaagacactgtgaatagaatgaaaagatgagccacagagttagaaagttattcacaaagcaaataacacatatgtgcaaaaggacttacatcccaagtatacaaagaagtattaaaacaacaataagaaaaaaataaactaatttaaaaatgggtagagtatgccaaagtctctactggaaaaaagtagacaatatgcaaaagctcatggttaatgtaaatagaaattctaagaaagacctctaaagaaatgctagatattaaaatgtctataaaagaaatgaagaatgcctttaaatgcctttttcctcagtctctttgctaatgagtctgggcacagccaaaggaaaaaaatctctgagctcaaggatatgtcaatagaaactggtaaaactgaaaagcaaagagaaaagacactgaaaaatataggacagaatatccaagaactgtggtacaactrtggtacaaatgtatgttattttccatgcaacatacatggagaggcaataccagaaggagaggaaataggaaataagagaagtatttgaaaaaataatggctgagaatttcccccaatgtcagacaccagaccacacattcaggaagcacagagaacacaagcaggataaatgcgaaagaatgacagccaggtatatcatattcaaacttctcctcagaaattatgcaagcaagaaaagagtgaaatgaaatatctgaagcattttgacaaaaagaaaatccaccgacctagaattctataccctgaaaaattactcttcaaaagtgaaggataaattaagactttcttgggcaacaaaaattgaaggaatttgctgccaataaacctgccttgaaaaaaaaatgatacgatacattcttcagagaaggagaatgatacatctcagaaactggattgtacttaaagaaaggaagagcattacagaaaaaggtaattttaaaggtaaaattaaaactttaatttttcttactcttaatttatctaacaaataacagtttgttcaatgtagtaaaggaaacaatgtatttataattgctcatgtataagttgaatgaatgacaacgaagatacaatggacaggagggaggaattaggattattttattattataaggtattactctacccataaactggcgtagtgttatttgcaagtggacttggattagttgtaaattcatatttttttgcaaactccagggcaagtactaaacgaagtaaaaaaagaagtaaaatcgatataataaaaaaggagagaaaatagaatsaaataaaatgctcaggtaaaaccaaaaaaggtagaaaaaagtaaaagacaaaaaatagaaacaaagaagaaaggcaatgaatagaaaacataacaaatatgatagatattaatttcatatatcagtaatcattttaaatatcaatgatctaaatacatcaattaaaagagactgtcagatgcatccaatataaaatatattttaaatataaagacacatatagattaaaagtaaagsgatagacaaatgtgataatgtcaataaaaagaaaactggaatagctatattaatatcagacagaacaaacttcagagaaaggaaaattataatggattaaaaggaacattacatgatgataaaagggttaattatccaagaagtcttagtaatatttaatatatatgggcctaaaaagagaggcccatatattaaaatgtgtgaggtaaaacctgatggaactttaaggagaaatagacgaatccgccattatagttggagacttcaacaccttgctatcagaaatggagagatccagcaggtagaaaatcagtaaggacatagttcaactcaatagcaccataaataaactagatataattgacatctataggctacttcatccaatgacagcaaaatrcacattttttcttcttcagcttacacagaacattcataagatagaccacgttctaggtcataaaaaacacctcaaaaatttaacagaatacaaatcatagaaagcatgttctcagaccacaatggaattaagctagaaatcaacaacagaaagattgttggaaaaatcccaacatacttgaagactcaacaacacacttctaaataacatatgggtgaaagaaaaactcttgagaaatttaaaataatttgaactaaatgaaagtaaaaatacaacttatcaaaatttgtgtcatacagcaaaagcagtgattaaataaaaatttgtagcattgaattcatgtattaaaagggaataaagatctaaaatcaataaaataagcttccacctatttctaggaaactagaartagaagagtgaattaaacacaaaataaacagaagataagaaataataaaaactagaacagaaatcaatgtaactgaaaatagaatatctatagaaaaattaacaaaactaaacattaattatttgaaaagatcaataaaattgacaagcctttagccaggccaagaaaaagaagatgcaaattactaacagcagaaatgacagaggggatagatatcacgacagagcccatgracattgaaaggataataaaggaatactatatgggcaaatatttcagcccacaaattttagaacctagatgaaataaacaaattccctgaaagacacaatctaccaaactcacacaagaagaaatagacaacgagaacaggcatatacctattaaagaagttaaatcaataatcaataacctcccaaaacagaaagttccatgcccagatgggttcactagtgagttctatcatttaagcaaaaaatcttagaactctctgtaatttcttccagaaaatagaagcaaagggaatacgtcctaactcattctatgaggccagtattatcctaataccaaaagcaggcaaaggtattacagggaaaggaaactatagaccaataaggcacatgaacataaatgcaaaaatcttcaataaaatattcacaaattgaatccaacaatgtataaaaaggtgtatatgccatgaccaagtggaatttattccaaatatgcaagaccggttgacattcaaaaattaactaatgaaatttatcaaatcaaggctgaagaatgaaaaatcacatgatcataccagctcacacagaaaaagcatttgacaaaatcttaacaccctaatgggtgataaaaactttcagcaaactagggatagaggagaactttctcaacttgataaggaacattttacaagaaacttatagctaaccttacacttaatggtgagaaagcaagtgctttctctctaaggtcagtaacaaagcaagaatgactcctttgaccagtcctttttgacatcataatgcttgtcttagcttatggaataagacaaaaaaaggaaaatacaaattgggaagaaaaaaatataactgtctttgttcacaaattatgtgatcgtctatgtagaaaattttaaaggaatagacaaaaaactcccagatcagataagcaattacggaaagattacaggatacaggycaatcactttcctatataycaacaatgaacaagtggaacaaatgttgaaatttaaaacattctaccatttatgttagcacaagatgaaatatttagccacaaatctaacaatmtgtgcgagacctatgtgcaagacctctatggggaaaactacaaaattctgataagagaaattagagaaaaactaagtaaatggtgaaatatttcatgttcatgtatagaaagaatcagtattgtcaagatgtcagttcttcccaatttggtctacagattcaatacaattgaaataaaaatttcagcaaattgtatcgtggatatcaacaaattgattctaaagtttatatggaggctgggcatggtgactcatgcctgtaatcccagcattttgggcagctgaggtgggcrgatcacttgagatcaggagtttcaaaccatcctggccaacatggtgaaactccatctctaccaaaatacaaaaattagggcatggtggtgcatgcttataatcccagctacttgggaggctgaggcaggaggattgcttgaacccaggaggtggaggttgcaatgagtcaagatcacrccactgcactccagcctgggcaacagagcaagactccatctaaaaatatatataataaaagaaaaataaaaagtttatatggaaaggcaaaagatccagaatagataacacaatattaagtgagaaggacattcagaggactgacttcaagttttataaagctacagtaatcagaagactgtataatatcggtgaaaaaatagataaatagaccaatggaacagaatagagaaatcagaaatcgacccacacaaataatgtcagctttggtaaagaagcaaagataatagagtggagaaaatatagtctttttaacaaatgatgttggaacaactgggcatccacatgcaaaaagaagaaaagaaaaagaaaaaaatgaacctggatatagatattatgccagtcacaaaaattaactcaaaatgagacacagaactacatgtaaatggtaaaactatgaaactcctggaaggtaacataggagaaaatctgtgtgaccttgggtatggtggtgacttttttatacaacacaaagtaatgatgcatgaaagaaataatttctaaacaaattattaaaattaagaacttctctgtgaaaaaaacactgtctagagaatcataagacaagccacagactgggagaaaatattggccaaagacataattgataaaggactgtgatctaaaatatgcaaagaacttctaaaactcaacaatgaaaaaaagtcaactaaaaaaatgggtaaaacatctgaaaagacacctcaccataaaagatatacagatgtcaaataaacatatggaaagattctcaacatcatgtatcatttaggaattgcaaatgaaaacaacagtgggatacaactacacattattagaatgtgcaaaatccaaaacactgacaacaccaaatgctggtgaggatgtggagcaaaaaaaaaaaaaaaaaacctctcagtcattgctggtggggatcaaaagtggtgtagctactttggaagacagtttggcagtttcttactaaaagctaaaggtactcttgctgtatgattcaggaatcaaattccttgatgtttacccaaatagtctgaaaatgtatgtccctacaaaaacctgcccgtggatatttgtagaacttttattcataattgccaaatcttggaagcaactaagtttttcttcagtaaatgaatggataaacaaactgtggtacatcagacgatggaatgttattcagcactaaacagaaaggagctctcaagccatgaaaaaacgtgcaggaaacttaaatgcatattactaagtgaaagaaggcaatctgaaaaggcttcacactacatgatccaactatatgacattctggaaaaggcagcactatggtgacagtaaaacgatcagagattgttaagatttagggggaagagagggatgaataggcagaacacagagaacttttagacagtgaaactgttctacatgatactataatagttacatgtacatatatatatatatatatatatatatawctccacaggatatacaaccccaagagtgaaccatagtaaaaactatggactttggtaataataatgtatcaatgtagattcatcattgttaaaaaaaaaaaaaaagttaccacactagtgtgggatatgaataatgggggaggctgtgtgttggggggcagggcgggggcagggagggcagggagtatatggaaactctgtgtgctttctgatcaattttgctatgaacttaaaattgctgtaaaaaatcacgtctcatttataaaatatgggccaaagatctaacagacaccccatcaaagaagatacacggatagcaaataatcacatgaaaatattcccaatatcatgtgtaattagagaattacaagttaaaacaacaagacaccaatacacctattagaatgactaaaatccaaagccaaaaacctgacaaagctatattctaatgctgagaaggatgtagaacaacaggagctctcacwcgttactgatgggaatgcaaaatggtacagccagtttggaaaacagtttggcagtttcttacaaagctaaacaaagtcttaccataatccagccatcacacatctaaatctttacccaactgatttgatgacttatgtctacacagttacctgcatgcacatctttattgccaaaacataattgccaaaaactgggagcaaccatgatgttcttcatttagttactgggtaagcaaackgtggtatatctatacaatagaatattcagcaataaaaggaaataagtgatcaatccaggcaatggcatggatgaaccttaaatgtgcattgcaaagtaaaagaagctaatttaaataggtcacatactgtatatttccaattattattggacacatttagtaatggtaggagtgaaagggaaacctttcagtgctactttctttccctttgtagtactggaaatgattcctaaataagccttttgtttccagtcttaccttcatcctcctagttcatcttggcaatgaaacagcagtgacctttataaaacaaaaagatgttcatgtcatattttggtttataacactttaatggcttcccagcatcctaaacataattggaaatttcttaggctggcttataagcttttcataatgggggtgcttttccagctcaaacacccataattccttccactgacacccttatttcaccaggccctggttctccatatgtttaaggcttcctgtcttcttatggggtgtaaaggtagccataggagtggtgtttggtctgcaaatggagacaccctactgttagaggttttccccctggactagaatccgtgggcacagcctatttaggaattgcaaatgaactgtatgtgtccatatggacaggaaaccagatcagtctagagaaaaggacatgatgaagagagtaacttgtaagatcctaggatctgtataaggaggtcatccagcgaggtttatgccagatggcataaacctctgcttctctgggatacttagtcactctgagtcacttttatgtccacaataaagtccaaatgttttcggttgtcaatttcttatgtgccctagtaacataagtgtaggaaaaaaatttaggcattaacatcataagtatttctttctccaagaaaaagtaaaaattgaaaatctaaattttatatccaaatcccttggcaacttaacaaaatgcttaataccttacaaataattctgtttaagcatgatgacttggaatgaaatataagttattaaattaaaaacactgacttgggaaatttagtaatttatttattaacaatcacttttaaaattaacataaataatatttttcaacttatataaaactggtttgaaatcttggacacaaaacccttttgatttattaaccttcaagactgaaacaaaaagataaagccaaattagttgattaccatattccaaatttattttctcttgtttttactttcaatttaaattcttcagcaaaatagtgtcatttagttatacaagttaattttctatagaaaattaagatttttcttgattttgcattatttttaagcattccaatatctctactgcttttcaaacatgttaggaattaaaagcaatgattctgccatttttcccctcatcgtgtgtcagcctaaaaccaaattaccaggatcagattaacctttaccttaccatttccaagttaaaaaaaaaagtcaattttccggacttgagatgcactgaagctagactcccaggctagattttcaaaaacaaaagtgtttccctaataattcttggagattacaccacttagccttaaaaaatgatttgtacagagaactgatgtgttctcaatgatatttttgtgagaatgcaagactggtcaaaattttcaggcttaagcaaacacagtaatttaaaagcaatccctagacccccatctggaactaatttacttctcattttaacttctggcattacaaagcatgcattttatatagcattcattttaaatttccattaaattgctcaattttattttttataaagccaaatggttttttttttcaatgtcaatttattttgaccttcacagggaatagaaaaagaggacaggtgaaataaggggtaagagaaagggttccttcagaaataatcactatatgaagagatatttgtcccctggcttcatctgttaacttttttagtttagctaaaacatctgaggagtttaggtggaggagaacataaaaagcaagagatgccaccatgagatgaatctgaaaatagaattataagttaagtcctcttctacttaaactatctacctggaccatgttaaccatgcccactgcatgccaccacccaccagaaagtggcactctggcaaggatcactccctacagcttcaggctttgatgtccactgcttatggggcagtgcctagcacagtacctggggcatgataaacattcaataattgtgtatgtatgatagataggcagatgaatggcaggataaaggatggatgaatggatggatggcaattctctacattatgttttcattaatgtcttatgttcaacatgttcaagtccaacatcatttttaatttgttttcccattatattccccattatattctcaaagaataatgctacccccagacttttatttcatgtggagtctttgcactaatccctctccctcactgtccatttataatcaatgaatggtccccaagatgatcagatcaaattgagccattctcctacccagaacccctgtatgctcaaaaacttcagagtaaaatccaagctccttagtgtgacataggagctactttatagtctgggctctaaagaacctcacaacctgaccccctaccaacatagctccccctacatgccactctacccaccctgaaccacatgtgattcctaactgaactagctctcttgtgtcttggccccttctctctgcttgaaatgctcttcctaaaatagtgagcttcaatcttctaagactcagcttatggcttagctttaatataaagtcatttctaatatcatgcctaggcatcctctcagtcktgctttctttggtgctttgcacagtggtcaataaatatttattgactaaatgaatgtgtgtgaaagtcacatgtgtggagaaagagagatagatttgataggagatcaaaatggataagcatttgaaaattattgcattcagttatcagcaaatatatctgaaatctagtttttgtgtacacatctttgctctgagccccccttttttaaagatctgacatttcaaatcacataattttctgagggtttttttttttttgacatcttatttccaatccagctcatttccattcccttccagaacagctcttcagtacagaaatagtttttcatctcctttgactaagggctccaatattccaaactggcataatcttggtctcagccatcaccaacagctgtgaaagcgaagcttcaactagctgtcatggtccccatgtggctttctaggccgggactcactcggtcctgggatctcatacttcacatctccttctgargcacaatgacccatatttcttggaggagaccagaacggtcacagaaaagagagtaaggactgctgtaaaaaagaacatgaacttgagggttggtgatagaagacccaggaacaaggtatgaagaactaaaagtgttggacccaggggacgaggaattggaaaattcgatttggaggcttgatttgacaggaggttgctcgaggtgcaggtgagggagggaagaagaaggagctgaattgcctcttatttagggagacccactgcgttgttgtccctaagctggaagacaaaccattataaggctgacacaccatacacattactcctattttatctgctagagtttttccagaaaacacaaactttgctccctgtgaggcacttgagtgagtccagctcacctcaatctggcctcccttttacccagtccttgcagtaagaattctagacatcataacaggacttcaattggatactattcaaaattacccacatatctttatatttttcctgggacatgcaaaggtgcaaacttacaacactttatgaatagaaactgtatcttattttctttgctgacttcctcactgcctaaaatggttcctggtatgctaatttttattgttaatgactgaggaaactcataagaaaacatttgcttttagcatactgcttcatcgcctacatcttcagatacttgttttcctcatctacagcattcttaaagacgttttcaagaaaaaaacaaaaatcttctttatctaaaagttttcttcttgcttcacgaaattcatgttctctttctgtgttgccatggtttctggtcatggatattttctccactaaggaagaataaatctaatcacaagcaaaatattcccttctcaaagcatgcttctccataagatgtacgctcacgttaaaaaaaatcaaacatgtagaattatatcgtatacatagaaatattaaaatacagtggaaaagtattgtatattggaaaaattacgggttttaaggtaaacagagttgggttcatatcagttttatcacttaaccgctttgtaaattagacaagtttattcacttttctgctttggtttcttatctgtatagtgggaacattaatttctacttttaagagtttttatgaaaattaaattagcttaaagtcagtatttaatatatacttaagcttccttttgatatttaaccttcaagaaatcccagtagtgtttttatttaagatacagctaaaacttacctaatggcattttctaaaagcatatacactttaatccaacaactaatatrattaataaatggatatttagttccacaaaattaattcattcagtaataaactatctccacaaatctagggtagagtcttctctatttttgtgaataatgctcatttttacttctctgaagtcttttgaccacttaagagttggagttaaatttagggctgatagtggtgtgaggtcaggggtagcaattcctctggcctaggagagtaagagtgatgggtcttgcctttctcaatcaggtttgcaatatagattgaccagactggcatccgaccagagaagtagtcaatatattttcaagaaatgaaagttccactttaaagaacatgtctttcaagtaacaaaaacatactagagtacaggcccaagcacaatagcaatagtggagccacatagcttaaagaaattttcattgttttctcattcatttctcaaatacctattgggcacatatgtatcaagcgctatgccagccatgggacataaagatgaacaaggcttaatctctgacttcagatcattcaccatttctaagacatacaagaatataaataaatgtttacaaggtaattgtacacattatataacagagaagacacaaaagacaatttcatgtcacagatgagtgattaatggcttggaaaggccaaggaagactttaaagaggaggtgatgcttctttagataccgcaggtagaaatgctatctgggccgggcgcggtggctcatgcctgtaatcccagcactttgggaggctgaagcgggcggatcacaaggtcaggagatcaagaccgtcctggctaacacggtgaaactctgtctctactaaaaatacaaaaaaattagccgggtgtggcgggttgcgcctgtagtcccagctgctggggaggctgaggcaggagaatggcatgaacccgggaggcagagcttgcagtgagccgagattgcgccactccagcctgggcgacagagcgagactctgtctcaaaaaaaaaaaaaaaaaaaagaaagagaaaaagaaatgctatctggatatgagttagtacattttaaatatgtgtttcttttcccctttctttgacttagttccattctgggttaccagcttaaaatactgacaagctattagtttatttgggcttttaagggcgctatgctaaactaacatcagcttgcaagtatttatggaacactccaaatatgtaatgatccctgcactatatttaaaataatagcaataaaccctgtaagaaatgtacagtcaagtaaattaagatggtgaagcaaaatggtatcatgaggataattacattgtctatgtatgtgtkttagcacatcacgtgtgttagaattaagggaatagtgttggtgctccacacctaggcaataaaagaggataataaatgttcagaagtttatgtctaaaatatcagattttaatagacatttcaggtttcattttcaccagggtttttagtcttttcttttgtaacaaaagaaggttgagactagacgatgcatttttttcaaatggaagaatgtttatatatgtaaaaatgtatgtgtgtaaatatatatatatatatatatatatatatatatatatatatggtatatacaacattctccatggaatttttcaaattaagggtttagacaatagaggaatacattagtaagactcttaagctccctggtagcaaagccctcatctgtaaaaagagaatgtagatcctgaggctaggaaagagtaggctcacattttaggaagaaatgtaaacaacttgagcttcagtttcttcaccaatatacatacattgtattcatatccgtatccatatattccacactataaggaagtgaagagtaaagatacatgtgtaaatatttactgtaatgcctaactgaatagagcatacactaaatgaagatgaataattataacactactgcattacttttaaactttttccattataatttttaaaatattatttaaattgaggtcatgcttaatgaaatgagaaaacagttcccatgttgtattaaatcctctcattcttctcttttccattattttttaaacacttgctttatttattatgacattttaactatagatcataaaaaccaaactgaaaacaatttagtgttgattttacaacctttctgggcttggtaatgtatgtcattgcctcctgaattttgctggtcaaggtaagatcaagtagttaaactgtaagtactataatgaaatgaaaatggaggagaaatgaagagagctactctatctcctggaggcatctcaaccttgaaaagcttcatacttaggatactacgtaagtttattataatttattcatgtagtttttaagctttaacatttctaacttttttattataaataaacataggaaaaataattcagataacaagtggtaaatatacatatcacaacccataatggactaaagttgtgctagtattacccacatttaccttctctttatataacatagatttttgtttttcacaaaatatttgaaaccgtttgtgacagaattgtcccaaagttggcaaacttttgtagaagtcccttgaaaagtattttaaagttacgtgattatacaacttataggtaactatgtatttttttgtgaaggtactgcaggttacagaatgaaaatgatataaatcacttaatatacatccatagtaagttttcattattatatgaatgttgtactgttgtagagtatatattaaatatcaagggtctttatagggtatgttactaggattatagacaaaaattcaaaaggcattcatgatgtgaaggttatgagtaatattccttgaagcacttttaattggagcagaaattcttttccyaaccaaaaaaaaatctgtcctggccattttaaacacttttagttacatttttccaatgcaatcaactcaccacagtcccataaatacataatactttttccagctggaaaaaaaatttccagcatttttccataataaatacttattgttgtatgctacaaagttttggagcggatttgttatatagcaatagctgtatgcctggggacctatagaaaagaacaatcacaactgtgtaggaggttacatatgcttaagtatcttagaaaaaaattgcattatatacattgttaatcaagttacttcatgaattctataaagaaaagtaatgacatatttttcaagtatgatactgaaaggtagcatttgaaagttttgcctgaatctctcttgaatatgactcttaaataaggaatagcatgtgtgttagtttacatttaccttgaagagttcatttctyrctgaagctgatttattgtacagatcatacctaattaattttcattttaaaatattattctgaaactaaatctggcactcctgatgcctgcttctygataatgatgtcaggaattattttgagtaaccagcatagattggttaatttttagaaataacgtgactattttaatgtagtggttttaccttttagctcttacttatgartggaatatcatgccactgaatgattacattaagtgacttttaaaaatattttattggattaaatgtttctttaccaaattttccattttgttagaaaccaattttcattaataatcataaaattcatactaccagtaatactaaaacagaaccacagatgatgaagaattagccaagtaggttgtaaattaggcaaaaggaggaaaacagtcttccctacattagccattggacatgtttggcttgtttaatggaaaggcaggggttgttaaggcaatgggaagaaaataaaatatttcagaaggcagagactcaacagtaactactaatcaaatatgtcaaaccttaaaacttctggagcaacaaggccttaaatcaataccaccattttacttcaaaagacaaactttgctcaagatagttgggatggagagggaagggagtcaaaaggaaattaggtcaatctttatagtacccattttcattaattatagttaaattagattattaatgtattaataatgtaataaatttattaaaaattaataagtttyaatatttattatataaatttaataaattatacaactgggataaaattttattatttaaatttaataaattaactattttgaatatatatttatttaaatttaatamattaaacaactgttttgaatatatatatatttatataataatatatataacttttttgagtttttgagcattcatacacatatatatgctcaaaaactctagcactctagagttcttttgcctcttccactctacagcttcagaaagtattgctgcataactgcacaggcactaaccaaggttcttaactgacatccaggcatttacaaatgattcaattatgttcagtatacttggttttgaaagctgatggactgtctaatacattttttaaakattttgagaaatgattcaaatttaaatggttttggaattgaagaactgtaaacttcgctcatgtaaaaaattaagctcattttttcatcatggcagataattaagttttctaggttgcagcctttagtgttaaaactacatagtctggccgggygcggtggctcacgcctgtaattccagcactttgggaggccgaggtgggcagatcacgaggtcaggagattgagaccaccctggccaacatggtgaaatcccgtctctactaaaaatacaaaaattagcttggtgtggtggcacgcgcctgcaatcccagctactcgggaggctgtggcaggagaattgcttgaacccgraaggtggagattgcagtgagccgagatcataccactgcactccagcctgggcaacagagggagagtgtcaaaaaaacgaaaamaaaaaacraaaaaaaaaacaactacgtagtctaacaaaagatggaactctttaaatcgtgcaagctgttaggtgtttattaatgttgctaattgtacaaaagaaaaaatatgtttactgcttactgcttcctgtatgtaaaaataaaagtttcagtctcaagagaatgacaatgacagactctgaagactgcagataaaaccacaagtacagtcactgtgggaagtattacagggtcagtggccttgctactttaggcactgcaaatattttggctcgaattcagcctcacactctgtaattacaaagaacattggtagtttccatctccggcccctggtgaagaagccacgttgtgctctgttttgcgaagtcctcatgcaatttacactgccatctcccatataaaactttacaggaggaaggttatacctctgtttttcctaaaagtgagactaggcaaagactgacagtgaccttccactaactagttttatttcttcaaggagtatcctttggctgctacattcagggcatttcagtaaaaataaaaatacacattataatgggtattttaaaactgtaaaatatgatagacaatgaatctttcattaaggtcagtgggatccctgggaggccatcaggggtctatggagggctcatgagcctgctaaattatatgccaaatgtgtgtatgtatattttttcaggaaaaggatccaatgctttcattccattttttaagtgcctgtgacatcccgctccaatttttttttttaatttaaaaccactgttttcaactatactacaagtgtaagaaaatgtttggcatatgtcttatcaatttataaggacaatagagtccacatatttccatgcttttctccagcccatcttccagttaaatattatccagatggcctaggacttaaattcagtttgatacaatggataagttacagacttcctggattcagatccttagcaggccactaactaactagataagcttaattaaatgagttaaccccacagtgcctcagtttcctcatctgaaaaatgggaattaacatcgtacctgcctcataaagatgacgtgaggattgaggagatcatgcaagcaaactgcgtagcatcgttccagaacctgactctgactgtattctatcagtgctacttttgatgagttttcacagatctctaataaaaatccttaattttgaatatctacttttttaaaatgcaaatgacctgctagtgagctttcattacactaaaaattatcacatttcaaacttgcctttgccaatccttatcaatattcaaacttcggatacctgtattttgaccttttatatctaaattcatcattttactaaaaattttatatataagcattttcacattatacttttgtttgttttgtttttaaccttgtgactaaagcaacaaatctaattgttgactaatgcacaataaacccattcaaatattacaatggttttttggccataatatgaaattggaaaattacttgaataaacataaaaaaatttatttgttttatatatcaaggaaatataaagcatttatagggttgtgtggagcatttcgctttccttaaaaagataggtgtgctaagcaaattaacaaattattttttgaaatgttgctcttttcttccacagctcttgtagtgagatttctgaccaaacggttcatctgggaatatgatcccaccctcggtaggtcaaattttgtttccttctcctcttcaataaaaayttatggycccaaagaaagaataatrttttctgttgcaacatttttaagctccttttagctgatgtggaagtgcttttcaaatcatgcaaagaagccctctatgaggctagatgtgtgtttcatgctgtctgtgcttagaaccctgcaggattttaatgcatagatgaagaaattaggtcaagcctcagccatgaggaaaggaagtgggtacaacacacttccctcacataagaaaaatgcagtatcattctaatgggagagagaggataaaacggacatggaaaatttggtgcgtaatagaatggtatcctgagaagagtaacagaaaaataaaactactgaatatggattttagggaaaaataaaatatgtttctctcttttcttctctccaatacatcygactaaagcctgttacagagagagaaggagagaagaagcagcaaaatatgatgtctgtggatcttaaaaatagtaataatgttgatgtataaaatgtaggcaaacactcttcctggtttttttttttaatttctttgttttgttttatttttgtcactccaagattttcagtttaaaagggataaagacttctttcattgtttttattcattcattctacaaatgtttatcaagcgccttctgtgtgtcaaagtgttctgggtgctaaagataaatcagtatacagaaagagaaggccttggcttttttgagtgcacagtctaggaaagagagaagagtcaataaacaagcaaatatatgtgagatagcgataagttctgtgaaggaaaacaataaggaagggaatagagaatgatcttatggtttacttagtatttgactaatagttctgaaatttattttagtaagaagtacaaggtgaaaacccaacatttttgtctaaatcgttgaccaattttcctcctgttatttattaaatactctctacctttctccactacttccaatgcaatcttttcatatgttgaattgtttacaccaggacaccattctagatttgcttttcacaccaaacagaagcagcacactttttcgttaattgtatgctgtacagaacattttgatactttgtagagaacgtctttcctcattacttttttacagaattattttggctactctgttcagttgatttttccagatcaagtttagaaactctgtaataatatgacatgattttgattagaattgtactagaactataaattactttgagaagatccacatctttatgttattccaccttttaatctaggagaatagcatgtttctacatttattatttattcttctgtttttgcttttaaataggtcagagttttcacatccaaatttttcaacatatttttaaatgtagccacactaattttaagatgatatatttggatctaaaaatgcacccgatttttttaaaaaattattctttattattttacccaccaaagtgaatacttattcttctcttatatttttattacttacataagttttacatagattatctgagaatcttaatgattaatgggagtttaattttaaaaatacaaattttttattgctgtatccatatatctcaatgaaagatgaagcttataaaaaatggtctcataaaatgaactctccctgaatgtgttccagtacctaatcttattattcttaattagtcttagtttaaccattttctcttttgttttattcatctgaaaaaaaaactgctattaatagtaatctgcctgcatcagttatgtatagtgcgggcttccttcagtaagaataatgaaactgtattgagtgaccttgtacagtacttctcaaagaggatggcagctgctaagcaacaagcactttcatcagacttcaggagtaatggatacatgactcattcccaggtgagggcttcattaattctctcacactggaggctggatttgtgtgtctatatgtgtgtgcaagaggtcacttttgttccagcatagaggggttctccatccatttgattcaagggaaattagcatttcctgagtttaacttcatactaccttggggaagacaggattctttgttgaatacatggctactgcattagtccattctcacaatgctataaagaaatacctgagactgagtagtttataaagaaaagaggtttaattggctcatggttctgcaggctgtacaggaagcgtggaagcattggcttctggggaggcctcaaggagattttactcacggcagaagggaaagtgggagcaggcatcttacgtggcatgaccatgactgagggtggggggggcatgccagacactttaaaacaaccagatcccactagaactcactattgtgatgacagcaccacgaaggaaggtgttaaaccatgagaaaccacctcatgctccaatcccctcccaccaggccycacctctaacatttgggatgacaaatgaacatgagatttgggtggagacacagatccaaacyatatcagctactttgactaaaagtttcaaaaccaccaccaaaagagataactacattaaaaagccaagtagcttatatacaagaagcagtcttgaattctgaagtcagtgctttcctgagaaacatggggcagtttttttttaaacctggaacagaattgttactccacgagaagctgaagactatgaacatcattctacatattaactcaattagaatatttactgctttgaaataattcaaygaagaaaatgcttgctrctatagtagcaagtgactcctaaacttttcggtttcagactcacttttttaaatttgatttttatggagaaagcctatcctaataattcaattagggatgcaggcaagggaaggaaaygggggagggggaactaaacctacgctccacttgcacttcataaaagaaagaaattgctttaacatccgagtgtttcgaaggatacaatgtaaaaaaaatcagttccttacattgaacaattttagytttrttttaattttccttattatactgtggatcggtgaaatctttgtgggtggccagcacacagatgtctatgaaccacatttgaaaaccaccactgaagctcataagatgtgcgagttggaccatctaaccatgaaaaccccctgatggtggtggcagcaattatctgattgtagaacaacaggatccatgttctgaatggatcccaaccaagaattgaatccctatctccaagagtcatattaccctctaagaatgctggtcaccacagagaatatagatagaggcttagaatgtgtgtgcctgtgactgtgtgtgtgtgtgtgtgtgtgtgtgtgtgtgcgcgtgtgtgatggaggcatttggagaggaagagagagactgtatttcagcctctatcactactgcgactgttaccttggaggcactgtgtttgaatctgcttagttttctaagcagatgaggatgggaatgaggagacgttagacccactagttctttggttctgtgattggttcttcttgcctgccttacaactcctgctgcttggaatcgttcatacgaaaatagatacacccagaacaaattatcttaaccagattctaaagcagaagtgcttagccaactcatagaattatttaattatttaatattggcactgcaaggagcttagagattgtcatttgacaaataaggaaacaggtaccaagaagtaaatttaatcaaaattacatgtccagttgtggttagactaggagtagaactcaactcagtacaatttccattgtggcataaatcaacataactaactgctgctgttactgtgctggctaagtgtccatactaaagtgttgaaattcgcaaaaaaaaaaaaagctaaatcartamaaagattaaccacatgcaatatccctttgagcaccaactcctctttgactacataaaatatrcttctagttattaaactactrgtgagtgcagattttaaattatacatctctcacagtgaaattgaagtgtaacttttaatgcctcattccattttgaaactcatatttttcttacagtatactatattttggttcayttggaactatctcctaaataatcatccccccacccttcaccaaaaaaggctcaatttattatttttgtttagtatgaacgaaatcaaaagcaaatccaccaaacaaacacatacacattttcttttatgtattaagatgcatagtggagtctaatttcaaaaactacttagtacatttttttagagttaactctggaaaagttagcacgtagatgcacaacactttaccttttcgggcaatacttccattgttttacacgtagagaaaatgggcttctaatgagagagagaagcttaaagaaaaaaaaatgcttaaaatggtatgaacccagtattcaccttagacaaaatcacgctaccacacgctgctatgtctggggcagacattctctcatttcctgcattttatcctttttgtttcagttaacaaatagccaaagaatcacacaacttcatataatttttattatattccatttccctcctactgtggcattctgtaattgaaatacataccctatttatcatggaagcaacacagaaaaatgtccctgtctctcagacaacttttagtgcaaagagatggaatagagcccagaactctgttttccagtctctggggctgatgccagtcttttcaaaagggaagtcggtacaaaggacactaaagaacagcagagggagaagccaaagggcatggctccccagcatgcgtgatgcagaatgggctgctcttcctcacgctgcagcactgaagatgaaaaaagaaaatcgttgggagaacacttggagacaagtggctgctgtaaatagtattttagagcattaaatcatacaaaactataatctccaatttaacataaaagagtagggggatggaatattctgaaattgcgaatcactgtgcatacaccatgtatagattacatattctaggagaatgacaataacataaaatacacttattaaaatattgaacataatctaatttttaaattttactttttggaaaatacttgagcaatgtgccgtgcttatggcaatgatcactacacagtactgatgaaagtagaaggcaaggatatggctggcgaagctgcattctacagtttgtattttggacaggagattatatttacagtaaagtaacagaaaacagcggtcaaaaaaggactgcaaaatagttgatgaaatgaaagtcagaaacatgaggtagatagaaaaaataattacaaaaccaccggcttacaggctacccccatgacaacagaaacttctgagtttattgtgttggttggttggttggttggttggttaatgatttgggtagtttgggtacaaagaattgagttaataatcatattaatcataccgctctgtttcatggtgttatgctattattagtgtgtgggaggccttatattattcctctttcttttccctttcatcccttattttgacacccactgccttcctctttcctttaagtgcagagtctaatgtgtttgaaactaagcatggtatttacaagcctgaactccaaagctggtcttccctgactcaaatctcgcctctaccatttattatctgtgtgaccttgggcaagttatttaatcttgttacagctcagtttcctcttgtaaaatggagctaatagcaatatatacttcattggatatttgtgaggattaatgagttaacataagtgtttagaacagttgttcaaatagaagcagtatgcgctagctattattatatatttacttaggaaaaatagtgttctgtgtatatatattttaaatttaaataacttttatatatttatatatatacacttctaatcattataaccaaatctggtatttttaagatccatgcatttttccatatttacttctagtcttctacacggtattctttactatgccacatttaactaatctccccaatgataaacacctaagttgcctctaatatgagctactgctaacatcactggggaaaacatacctttaaattggtggttctcaaactttagcatgcaccgtaatcacctgggggacttgtgagaacacagattgcccataggtctggggtggagcctgagaatttgcatttctaacaagttcctaggtgagccagatgttactggttcaggcactacactttgagacccagtgctgtaagaacctggaccaggttttttctagtgcatgtacctgagagggagattgctgaatcataaggtacgcccacaccgaacactagtgaattgctcttcaaaatgatgtaccacagtctacactctcattgtcggtgtagagaagctgcctgtaacctagtcaggcattatattacctagctttataactttataatttttgccaatcttatggtcataaaatcatcttataagcttctctctggtaagtaagcaggtagaacatcatttgatatatgtttttgctaattgggcatcctcctatgtgaatttcttctttgtatactttggccgtatttctttcctgttcacttatctttttaatttctaaaatttctttcatactttagatattaatcaactttttgcttatcatgtttcaaatatgttctccagtctttagcctatttaatattgcacaaaattcttaattttaatgtagtcaacccttttattttttatctcattttttttggtctgtgcatgagcttttatattttcttacttttaatttttttaacttcaggtttcactcttcaaatctagatgagtttagatctctaattcatccagatttacttttaatatatgccctagaagcccaactttattttgtgcatttagtggccaattcttttcttattggttctaatccaaatgctactgattgaaccattcattatttccctaagtgacttgtggtgccacctcagtcatatactaagttcctatataaatatgagtctattgttaaggccttggtaaatttgtgcattctgatattagtaccacactgtttggagtaatgttatatagtattatataattttaaataagtttcttgagcrtctcaaaaagtccagctggacatttcatttgaattgcattaaattctagattgattttgtggaaaactgacatgtttttaaagatgttgtttctccattttcctaggattttcttatgtattcaagtcttcattttctgttacaaacttctaaaattttctattctagaaaatttttgtttttgtttttggagggttttgaatggttttgttcatttttattacttcctaaatattatttattttactactattggaagtagtttcctgttttctcttacctttcctacatggcttttgctgatacagaagaatgctagtgatactgtatttttctgcagaacttatgagtttgaaattattgcttataaacttcgtattattttatttttatttcagcagaatgtacaatttcttcttttaatgccaagttttaattgcattgtctctcttaatttaatggcagtattgtcagatctttatagctctgccctctttttatatcttttcaaacaccatgctttggttttgttttctttttcatgatgttttttcttttatttcttttcttatattrtcttgaatttattctgtttcttctcttctaatttattgagttgaatacctagttcactttttctagatttttaagagttataacatcttctggaatcagacaagtacattagttcacataaacttgcttctggccttttcccccatcttcaccctgatatactgatagaatcatctagaattgtaatgccaggattgatgttgatgtagtgttattgttttgatggacgtcttgaattcagtttcactggcaaaaagtcctacatcagtctgagtcatatctttttgtaggtgatgtgctttattctctaaatccctttagacttcttcctcattgatatccttaaattttgtcataataggtttagatatagagctttttcctcatgcgtcctgctagttcctttgatcttaaatctttcattgttccctcacgttgagaaattctcagtcattacaacctcaataatttccactcctctatgtattttattctctcctttgaggctcattttataaaggatactaagatttcttgttctattatccataccttttattaaattttacttttacatgttcctttgttttacttacttacacttactgacacttctgggagagttcctcaacctaactctcatcaggtcartcattcattcattcggttctttatttctgttgttctagttttcatacagagaagcaccagttggcacttatttttgacccgtggtttccattttatgtgaagaggggcatactcagggccacccagtcttcttgcacctgctaacttctccttcccctcacatagcttggtgaccactctgctgttgatccaccaacctccagctggtactgagcatctgccatttttctgctttgaagaggcagcataagcaagaggactccatatagttccacctcccctccatgctgcccagccctcccctactttggattactgttcctcaccaaccagccagtactggggtctgaccaccttttactacccctagagtttctcgtagttttacatcatttggcaagaaccattcacttcctggtaatatctcttacatttccagagctgaggtttgaaaggaaattagtagcttctgttggtatgttatcttgttagaaacagcagtttccaaaaactcgatttttagaaggaccaaggcagaatgcattttgtgaaaatcaccttctcaatttacattgttgaggtctcattatagaaggaaaagagcaccagggagctggcttttcagaaaaataaaatggaatcttcagaggaaaggatagggccaggcacggtggctgaggcctgtaatctcagcactttgggaggccaaggcaggcggatcacttaaggtcaggagttcaagtccagcctggccaacatggtgaaaccttgtctccactaaaaatacaaaaattagctgggtgttgtggaaggcacctgtaatcccagctacttgggaggctgagacaagagaatcacttgaaacccgggtttcagtgagctgatattgcaccactgcactccagcctgtgcaacagagctagaccctgtcaaaaaaaaaaaaaaaaggaaagtatagggtagcaaagatgcaaagagattccccctattctacattctgaaagtcggtgacacccatgttagaacttggtatgtccaggagctaagaatgaagattctacatttttgcacatctctcctctctttcctagactacacagttccttatgctgtaaaatcaggaatacttctcccatgcccattttcagttttaaggatcaaattaaatcttgcatttatttatctttttgtcttttttatttgctcattcccttagaatcaacctaccgacaccaagcaaccatcgatgatgaagttgtttccatggagatactagacactgctggtcaggtgaataaagagttcagctaaaatatttttctggatcaaataaaactgagaaatctatgctatgaacaaaaataaggcacttttcttcaactaacttttgcatgcctaaaacctttttctctaattaactagccattttatatattaacatatttgtaaatatctgtatattcatccttatataaactgcccagtgtttcaagggggttttgaaaatactataatattcacatatcatctaggttagactctctcacctatattttgtggcatagcaagatattaataagttttcatggtcaaatgtgttttgaaatgctcaaatgaagttaaacaggtgtctttactgaaagaattctcagagcctctaacaggcttgtgtgtgagtctttaagaaagagatttagtatatattgtattctaaactcacatgatgtcatataagtttgtttcagaatacttcattttagatgtctttcttgtaatatttggtattaggtcggtcacttctgagattaaaaaggrttcatagataggtttagtttccaggtacagaaatgaccactggctgggcacggtggctcacacctgtaatcccagcactttgggaggccaaggctggcagatcacaaggacaggagatcgagaccatcctggctaacatggtgaaatcccgtctctactaaaaatacaaaaaattagccaggcatggtggtgggcgcctgtagtcccagctgctggggaggctgaggcaggagaacggtgtgaacccgggaggcggagcttgcagcgagccaagatcgcgccactgcactccagcctgggcgacagagtgagactccgtctcagtaaaaaaaaaaaaaaaaaaaaaaaaaaaaaagaaaaaaatggccactggaatgacagaaagctaaagttttccatggtactttatcaattacctgtgacccccaaaaagacttgaatcaaagtgtttaaacccagaaaggttcttgaaatgaattacccacttttccacttttccatctcatcaccacctacttattctctgaccttcacagagcactgattccgaagagaggcagcagggaggtgcatgcctccagaagtcatttgaacccgggaaagcaatgttttttcaaatcatgcttgccactttgctatgaaggagtgataacccactttgagaatcccttcaatagagtttctgtcattggtactacacgacattttgggggctctgagataggaaaagaaaaaaaaagccaaatcctttagcatagagttggattctctaaatagtttgtcacagtttttctggagtctaattgtctataatctgaagaaagagaaaattaaaacaaacaacaaaccaaaaaaataataaataaaccaaaatgcatcttgctaaattttgactctaattctgatacttaaaaggtggaataggggctacttgtctgttagaaaattgctaagtccttaattgtgatgaaaagtctcaaaagtgatgtgctcaactaagattataatttctttttagtttttatgattacagatttaatgatatggcaagaaaaaarttaaaagcagaaatttaaaatctattaaattagaaaatattcagttccctgaaatatgttgagatggataagtcatgactgtatttaaaattatttagaaagtttgtacaattagagtaccacgacattttaatgactttggatataaagaatagtaattaaggcattactgtcagcattaccagcatccatatattttgattatttccaggtctcttgacggccatttttctttgccaacaggaagataccattcagagggaggggcacatgcgatggggggaaggctttgtgctggtctacgacattactgaccgaggaagttttgaggaagtgctgccacttaagaacatcctagatgagatcaaaaagcccaagaatgtgactctcatcttggttggaaacaaagctgacttggaccactccaggcaggttagcacagaagaaggagagaagctggccacagaattggcttgtgctttttacgagtgctctgcctgcactggagaagggaayatcacagagatattctatgaattgtgtcgagaggtgcgtcgccggaggatggtgcagggcaagacgaggcgacgcagctccaccacgcatgtcaagcaagccattaacaagatgctcaccaaaatcagtagttaggcagcccagctgaggtggaccaactaattggaaacactcttccccttctgttcccctttcaaaaataaaacaaaatattgcattctttgtttggattctgagaaatgtctgggcttcccattgtttctggcctctaataggttgggaagttttagcgtgttttatgcaatttcagtgctaacaatttcttcctttcctgcttgaataagatacactctaatggcatttgaacatgtaatcaccagagattctgaaatgactggtttatgttaagctatttttaggcatcttcaccttgctttaagtaggttgaagtttttgcaaaggcatttaaaaattcaatttcttgtcagatactacaaataattttcttaaaagtctaagatagcagaaaatacagtaaaaacacaggagaagaagctgagctattggaacaggaaatagaaggaactctagtttctgtttgaagtgaggattttctgaattatctaatatcatctaggttttctttaaaattttattttgttcttcagttcaagcatcttctcactaatgtttttcactataacagagaattcatttcaatttgagttggttctctcaatgatctattgatcattacaccctaactctccttccttggctcaaacaatattttccctataacaaaggcaataggacacaaaattcacatcctgctgggccttttttcatcaagtcagggtgatataaaaacattggaagtcttttcaccaaaccctgactttattgaatgctagtagaagatgtagaattagagacatctgatttgtttatcaccttagcasaaaaaccacagtccaaaagacaagcaaattaagaakkgagcttaaccatgcctccattgggaagtctagactttgagccaggtacagtaagaaaaattakcctctgattcattaagtttgccacatgacttattttgatattttggatacattaactcacttaggagaattcagaaaagaatgggtgattaaagttcattacagctgaataaatgtgtctaaarcagactcttgtattctgaaagtacagtctacaactgataaaaccttatgattcttttctcccccattatgcccctatatatatcaagatttgggtactttattttagtagaaaatatatatcttttacatatgtatgtatttataaatgcatagatatatgtataaaaatttgtaagcgttagcggcattaattcaccaatgcatttggacaacttgatgtaactgactttattttatgtgactataataaaaagcataattttctcattctgtcatatttgggtaatctttcttgtgataacatgaaacatttataatttgaagggagactcaaggggacaactgaattgcaaaattgacaaatcagtgagcctgatataaaaaaattagctcctgttgattaaactagctgcttttggagtctttaggtgctattttaggtactttatgtattatcaaatcttcacaatcactctgtgcaagactagtactgtaagcacaattgtagagataaatatattgagtcacaagggggaaaatgtagtaaagccaattttgcatagctatttagtgtgtagaaccaggatttgaacccaaagagtcaaaaagttggattccagacctcgcatttttaaccattatatacttcttatccttgagctgtagtggggaagatactgaagcagataattcactttaactatgtttttgttcactcactacaaatctttatacatgttggacaagtaacttgatacaaattagtctatttgatggtgtctgatctgagccttaaagtatacacgagagttatccaagaaagaaatatggtaaagatattctaggcaaaggaaatagcatggaatcaaaatatagagacatgaacagtgatattaagtgtggtcatgtaaaggagtttagacgggcaggagggaagaaagaaagtcaaaaattcctattcctgcaagcaactacctactaaagaatcaaattggtaaacttagctatgattcattttcaataaagtctttttagacaatgtaggggacatggaagcagataaaaattatttttgaaattttgttatcttctagaattagtcactttgattctctcatatctatacttggaaatatagttcaaccaattcctattaaaagtaagctaataaggaagcataatgaaatacgtggatgtcattcttgagtcaaaaaactaagttaaacacagagtcaccaacaccagaaactaccctagatatgtgaatacaaatccagacattaaaaaccaaacaaccactggcataagtttcaaccactaattacagaagagcatgagactgtataaatataaattggtgatttctctcatgccccaggcttctcctcaaatataagattataaataagttaatactattagttgtttagaagctgagcttcatttttatgaatgccgaggaagaaaggttcactttgtaaaaagtagagacagtgttttattttctgtattaaaagcataacatcacttggccattatggagtaacagggaccagatttactcttacatattaaacaaccagaaaaaacgtcagataaaatatgcagaacaatggttttcagatattgaacaacaagcaatacagtgcattgatccctaaaaggagggaaagaaatgatgtaaaccctatgaatgcttcagcttactgccaagtgacaggttccaagaagcaatacagttaaaaataaaaaggaaagaaagagagagaaagaaatgaaagaaagagaaaaaaagaaagaagaaagaaagaggaaggaaagaaggaaggaaggagaaagaaaaaaagaaaaaagaaagaaaagagaaagaagaaagaaagaaaagagaaagagagaaaggaaggaaagagaaaaagaaagaaaagaaagaaaaacaagaaagaaaagaaagaaaggaaagcctgggcatggtggctcatgcctgtaatcccagcgctttgggaggacaaggcaggtgaatcacttgagcccaagagttcaagactagcctaggcaacatgacaaaaccccgtctctactagaaacacaaaaattagctgggcatggtggtgcatacctgtaatcccagctactgctgaggctgaggcaggagaatcgcttgagcccaggaggctgagattgcagttagcccagatcatgccactacactccagcctgggtgacagagtgagactctgtcaaacaaacaaacaacaacaacaacaacaaaacaccgcagaacttggttgtctcattgagttgaatagacaaaaatcagaactgggggaggtcaagtttataagaatctgtgggaaagaatgtctgaaaaaaggaaacttaacagagagaaaattccgcagatgtacaaaagagttcctttcagtgtttggcttagtatggatcacatggtaagaggatgctacccatggatgaagcaagaagtgcagaaaagcagtaggtcaaattttggggggatcataaataaggctgagaatagtttgtactattgaaaataccatgtaatatagaagtaataaacaggatcttagacactgtgtttatacacaggacattaggacattgtgtgaattgtgagtctaaattagcgccagaccaggatgctaagtaactgctctaacacagcataaaaggcagcctgaaattgatcgaattgagtccaagtaacttgattttgggctggaaaaaaatccaacacactatacaaaaacagtaaaatcttgtgcccgataagataaaaagtacagtggctggcatccagtcaaaaattactatgccaaagaagcaggaaaatataatccataaatagaataaaaatcaatcaatcaatagaaacagacaaaaacatgacaaatgctagcattagcaaacaaaaaaattaatacggccattatatgtatatgctccatatgttcaagaaggtagggaaagatacaaacatagtgagtgaagacagaaataaaagttataaacaagacccaaatgtaatctctagagatagaaaatacaatatctgaaataataatacactgtgtagcatttacatcagattagactctgaaaaattgaccagcttgatgacatagtgatagaaataatccaaatgaagaaaagagaggaaaaaagactaaagagataaaaatgaacacatcatcagtgatttctgggataaaaccaagcagtctaacacttatgtatataactggactcccagaagtagtgaagaggatggtgggaccaaaaaaaaatgaacaaataatagctgaaaaaatccatattataaactctcaaatccaagaaactcaaaagaccctaaggagtaaaaaacaaaaacaatatcatgatacatcaaaatcaagttgctacaaaactatgataaagagaaaatattaaaagtagccagtgggggccgggcacaatggctcatgcctgtaatcccagccctttgggatgccaatgtgggaagattacctgagatcaggagtttgagactagcctgaccaacatggtgaaaccctgtctctactaaaaacacaaaaaagtagccagacatgatggtgggcatctctaatcccagctactcgggaggctgaggcaggagaatcacttggacctgggaggcagaggctgcagggagctaagaccacaccactgcactccaacctgggtgacagagtgagactccatctcaaagaaaaaaaagaaaagaaaaaaaaaaaagcagacaatggggaaaatagacacattaagtacagcaaaacaaagacaagaatgacagccaactttactttcaaaactaggcaagccggaagtcattggaatgaaatatttaaaatagaaggaaaagaaatgtcaacttactattctattccaagtgaaaagatatttcaataataaaggtaaaataatgataaaagatctgggagaatttatcaccagccagtctgtaatgccagaaaggttaaagaaggacatttttagggcaaaatatataataacattaacaccaaggaagggtgggaatagattttaagtttctgaaactatatgtaaaatatcataatattattttgagataggcagtgataataagttaaatgcatatgttgtaaagtttagggcagccacttaaaactaaaacaaagagatgtatctaaaaagccaatagtgtatataaaatggaatcataagaaatactcaattattctaataaaaaaatcaggaaaagataaagaaaaaagaacagattggattaaaagaagagaattcaattacatctttgaatttactaaatatgagttgtctaaaaactctaattaaaaatcatagattttctaattggataaagagagaacaacctacattctgtccacaagaaattcttattaaacaaaaagatacaatacattaaaaatacaacagtctgaaatatatactaaacaaacactacttaaagaaagtcagagtagccatattaatattggacaagatagatgtcagagcaaggaaattaacaggaaccaaaagaaacctttcctaaagataaagaggtcaactgaaaaagacataacacttctaaatgtatgcacctataacacagctttaaaacacataaagaaaatgatagaaatgaaattgtaaataaacaaatatataattataattgaatatttcaagtcttctctcagtaattgatagaacaaatagattttaagaaatagtaaagctatagaacacataaacaaaactatcaatcaaactgatgtgatatttacagaacattccactgaacaaaaacagagtacatttttttcaggtgtacacatttatcaagccagatcatgctggacaataagtttaaataaagttaaaataatttatatcttaaagaatgttctctgactttaaaagaattaaagtacctgtagtcaacaaaatgataattgggaaataaccaaatgttgagaaattaaataacgtataaataattcatgaatcacagaagaaatcaattgggaactcagaaaattttttgaacaaaatgaatgtagaaacaccaaatatcaaaatttgtgggacccagccaaagctgtgctagaataaaattaattacactaacatcttatattagagaagaaaaaaagtccagtacaaatcaacatattatactgatatcagcattactctaacaccaaagcaagaaaagccatattatttttaaaaaactgcaggctgatatttctcttgaacatgaacacaaaaatctttatcaaagttttagcagatgaatgcacacacacacacacacacacacacacacacacacacattcacacacatatcataacatatcatgaccaagagagtttataccaggaattgcaagattaattcaatattcaaaaattaatcaatgtaactcacaattctaacagattaaaatataacaaatatataataatctcaattgattcataaaaataatttgatgaattcaataccaattcctgatcttaaaactcaaaaaacaaaaaaatctctcagcaaactgaaaatagaagagatctccctgactccaaaaaagtgtatcttcaaaattcctacatcatacttacagataaaagactaaaaactttccccctaagaaagggaacaaggatataagctctcaccacttctattcaacattattcagaggttctagacagcacaacaaatcaagggaatggagaagtaaattgtcttatttgcagaagacatgatcatctatacagataatgcctaagggatctttaaagaaaaactactagaactaataaatgagtttagcaaaattagttgtataaaggtagtaccccaaaatcaattgcatttctacatactagcagcatacaattataaaattattttaaaaatctatttacaataatacccatatacatatactatttaggaataaattttacaaaatatgtacaagatctgtaccctggaaactatgaaacattgtctagagaaattaaagttctaaatccatggagagacatatcatgcccatggttaggatgattcaacattgttaagatatcagctctccccattttgatttttacattcaataaaccccaagttaaaatcccagcaggctattttgtaaaagtaacaaactaattctaaaacaaatatttaaattcaaaggatctagaatagataaaac

SEQ ID NO: 97799 - DNA, 31737 bp, Homo sapiens
tttaaaaatatgagagaaaatctccaggcccttggactaagtgaaaagttcttacacttgccagtgaaaacacaatccataacagtaaaaatggataaatttgacctcattaaaattaaaaatatttgctctgtgagaaactctgatgggggaattgaaagacaaattacaaattggaagatggtatttgaaaatcctatacccaacaagggatttgtacctcaaaaatgtaaagaactctcaaaacttgagattaaaaaggcaaccaattcaattagaaaatgaacaagaaatacgtgtaaacatttcactgacgaggatatgtagattacaagcacacaaaaatatattcaccataatcatccattagggaaatgcaaattaaaaccacaatgagaaatcaccacacacctatgataatgattaaaaaaaaacatagtgtaacactaaatgattgcacagatataggagaagctggatcacttgtgcattgtgagtgggagtgtaaaatggaacagccactgtggaaaaccatttggccagttttcctaaaaataaacatggatttaccatgcaacctagcaattgcacttttgggtgttcatccagtgaagtgaaaacttgtgtccacaagtgtttatagcagctttattcatactagccccaaactggaaactatccaaatttcctataatgagtgaatagttacacaaactgtggtacttttataccatgaaaatactgctcagccgtaaaaggaaatgaagttattgatacctacaacaactggtatgaacctcaaggaaattatgctaaaggaaaaaagccaattacaaatgtacgtatgattccgtttacataatattctttttaaaattttttattttaagttcaggggtacgtgtgcaggtttgttacataggtagacgggggtttgttgtacacattatttcatcacccaggtataaagcctaatatccatgagtaatttttcctgatcttctccctcttcccaccctccattctccaataggcctcagtgcgtgttgtttccctctgtgcatccatgtgttctcatcactgagctcccacttataagtgagaatatacagtatttggttttctgtttctgcattagtttgctaaggataagggcctccagctccatctatgtccctgcaaaggacatgatctccttttttaaggcttttttatgttctttgttatggcttcatagtattccatggtgtatatgtaccacattttgtttatctagtctatcatccatttatttaatatttttaaaattaaaaaatttatagagagggtgaacaatttagtggtcaccaggtgttagggatgggtgtgaggaggtgggtgtggctacagaagggtagaacaagtaagcctcacagagatggcagagttctgtatcttcattgtggtggtagttagaagaagcttcacatgcaataaaattgcatagaattacacacacacacacagacacacacacacacacacacacgagtgcatatgtaactggagaaataggagcaggctctgtgaattgtatcaatgtcagtttcctgggttgatattatacatatttatgcaagatggtgacattggcggagagagagtgaacatttcaattttctgtaaacctataagtatttcaaagtgtaaatttaaataaatttgttattcaaaaattcataagaaggatgcatagcaacttcaacatagtggcaatcagataaatatttcttcaaagctgcaatataggtgacttgactcagcaggcagagctgtttccccttttcctgtactcccctctcaagccattcctccttttcttcctttgtaggcatctctcacttcatcttttctaaatactgaggtttcctagtatgtgggcctttctcattaattctgctggtatttattgacagtatactatgttttcagtcagtgctctagtctctgggatacagcagtgaataagacaaggtccctgaccttatagagctcacagtcttgtggagacgtggataacaaacagaaaaaataatacatgggaaatatgtcaagggatgttacatgctagaaataaagcaaaatgatgaaatagaggcactattttaaatataatggttaaaaaagacctctctgagaaattgacatatgagcagagatctgaataaagaaagaaatgaatcaggtatgattatttaaaggaagaacatttctgcaaagagaatgatccctaaaatgggaacctgtttctcattaaaagattagcaagaggggcatgatctggaatggaggaaacaagggctaagcgttaccagatgagtctggaggatctagcaagtggctagatcatgagtatgttagaattatagtgctacatgacaaattaccccaaaatttagtagcccataacaatagatatttcttatctcccacagtttctatgggtcaatcaggagcggcatagctgggtggttcctgctcacatcttccatgaggttacagtcatgctgtcagccagagctgtcatcatctggagctgaaaccttcatttccaggatggtccactcagacagcttttggtcctcaccacatggaccactccacagggggcttgagtgtccttatgacatggtgccctgcttcccacagaatgaatgatctaagagaaatcaagagaaaagacacaatgtctaacaaccttggaagcgacatgccatcatttctgccatattctattggccacacagaacaatcttgatacaatgtgatcagggttgaataccagaatcactggaggctgtcttggaagatggctactacaataagccaatttgcagatataggtgaaaatagaattctattttattttaagtggatgaaagatccctagaggtctgaaaacgaaggaaagatgtgattatgagtatgctttttagtctgttatgagaataaaggttaaatcagactattatggaaatagaaaacatataaagagaatgctatgaaagtccagcagaggcacaatgatggtaggctagggtgctaaccaaggaggaggtaagaagctgtcagcaggttattcaccgaaagtggagctaacaggatttccccatgcttggccaacttctctttctccattccttctgggtgaatccatccacttacatagtttaaaccagtgtttctaaaacctcaaagtttacctgcagagctttttaaaacatagatttccaggtccaacctcagggagagattctgatgtaggaggtttggcctgagactttgcatttatttctaaggagttcctgggtgatggtagtctgctggtacacaggccacactttgggtgtcctggtttaaattactatccatagtctgatgatatgtaaattcaggcttatatatttcactatctttcagaaatcatctccaacaaacgacaccattttttttcaaactcaggactagacacgtccaaacgtatgtccttatttctcctaatacatctatttcttcttttgtattctctatctcacttgggggtacccccaaggacccaatcattctagcaaaaaaatccagaagtcattcctgattccacagtcctcctcatcctcatccttcacatcccaccaattaccagggcatgccaatttcacctaaatatttctcaaatctgaccatttctgtctatctcattatgagtgttcaagcctaaacagtctcctaatagattttattcacatcaaatccaaccacatcagtttgccagagtaaactaagtgaaatgcaaaacaatcatgtccatcctttactttcaacagttccccatcactgataggatctaggccgagttcgttattaacatggcataagaggtccgtggtgatctgaacactgtgcctgccctgctctaggtatatttctcattcacatgtaacttccactttacattccaacaatcttgagctgcttgcttataataccctgcatatcccacatcattttgggaggccagggccgtgttgctgctcatgtttctcctctacctcgagtgccttctctttcactcccaacccttcgctcatcaactactcaaaacctactctccctcttaactgagcgcagtggtcacttcctccaaaaagccttccttgatgtccttacatgtactctcaaaacacaccatgtattttttcttttcctatgctgacaaaaaaaaaattaaatttgtctgcttctgtcttccccattacatcttttagctacttgaggtctaggactgtgtcttgtttatttctgtacctttccgtggctccttgcatatgaccaggaattaagtatattttgataattggagtccttttagaactttctaaaattatgaatgctctctcatcccccaataaatacattaatctataatacaaatctgtaaaatatgtattgattttacagatttttctgggaaggggtgctcccataccctccgatatacactgggctctggagggaaaaaaaaagccaggtttgcctagtgaggtgttccctaataacatgagaaatgagtggtggaatagagaccatgcatttaccatttttcatttttaaatatttcttgttacaattaatgtattctgcctgtgttattttaattgtctcctaggtacaacataagttccacagggcagcagagatgtcgcctgcggtctattgctgcacaagggaactagaacagtacttgaaagaaaagaggtgctcgataaatgttatggaatgaataaatgtatcccctcttgagggtgcagagctatagaatgtgtaagttactgccttctgtgtaaattagggtttgctttgtttttacaataaagttatgtacattgtttcaagggctgtattctgtctatgctattttaaaatttatagaataaagtggtattaggcttttagtatttttgctcattttaattatatactattttccttttcatatttttctaggctaatctcttctcacgtgaaatgactcccttgattattccgatttcattgactctaagtagaaggcaaaccctgtggtatcaatttacaaagggaaatgaagaagatgcagtacatttaggtgaaaacaaaataaacgtcagtttctccaaatttgtgtgcttagtcagatctaaatatattgatgtagtgtaaatactgaatattgaaatattaacctaaataagcatttattattggtaacagctacgggaatatacagcatgaatgtgacttggctgcttaaaaactgttcctcagatggtttaaacatggcctccgagacttgttcccatttaaattacttcataaaccatttcctcaaatatggtacaaagtctattttggcacttgttaagttgtcacaaattctgagttggaagactatgaattaatgaagttttacttccttttgtaatttctttcctaggtttcatcaaagacagtactttcgcttgcttgtttgtttcatttgaagaaaaatcagccaaaactattacaaacaatatttgactgtttgtagtgcaatacaaagctacgtcttgaaattataaccaacaaaactccaaaaatctgtttaaggacacatttttaaatttaggaccgtagtatatgcagttaacaatcatcatttcttagcactctacattcactgccagcaaactttcaacgtatctggttgataatgaagctggcggggacccagtgggaacagaagtgagtggtacaaagtaaagccgatgtgaatttattgctactggtttcaggctccttacctccataggcttatgcactgcaatgacctgattatcagaaataccctcacaattattcataatacccatagctataggctccacactcttgcgtgtacattcatgcatctccacgtcacacgggctgtcatgctcgcacatgtgccattaattgacaagaatgctgctcaagttggctgatcaagagataggcagtgcaaaggaacaggatttgagacagcccagggtttcctcttcaagtaggtctaaaacatttttttttctcattgacttccttcctgttctaactgccagtactcagaagtcagagttgagagacagaggcaccccggacagagacgtgaagcactgaatgtaagttcaaatacctcgggctggggaggcttcaggtgggcacagagcaaagtcggaaacctctagacggggctaccgccctcgacagtttattatttttttagaggggcagttcttctttaaaacaaactttatgataagaaattgctaaggaggctgcagagaaggggaagttagaggagggaagggtagcagtgactcaggggaggaggcttaaaaaaggagggtacagggtgcgctgcagcccaggaagtgcaatcctgaatattctcagaagggctctgagaacacgcaccgggagtgcctggaggggtttcctgcaaagtaggagcaggcacctggccaggcttggaagaaaaagactgtagatccaaaatgatacggtctgtgctggtggatggtgggttgtgctggggtggagatatgtggtttcctgtttttaagcagacaatgtaaaaagactggttgaaagagaaaaaaaaatggttcaaagcygtcaaatattaaactgtcttccactaaataattttctggtgatataagagaaatgcataatgaaatcctcccttagagtgcaggggctttatccctcaaagaggaagtatggtatagcacattgttatgtactcatgagtcatacagtgatagaatttctaccactgacaaaggctgtgtattaaattcctgcagtcggatgggcagatctttgctgttgttgtcaaaaataataatagggctgggcgtggtggctcacgcctgcaatcccagcactttgggaggccgaggcgggtagatcacctgaggtcaggagttcaagaccggcttgaccaacatggtgaaaccccatctctactgaaaatacaaaattagctgggtgtggtggtgcatccctgtaatcccagttatttgggaggctgaggcaggagaatcacttgaacccaggaggcaggggttgcagtgagccaagatcacgccattgcactccagcatgggcaacaagagcgaaactctggctcaaaaaataaaaatattaataatgataatagccctttaggtatgagataactaacagcaaacatggaaaacaccaaataacgtattaagagacaggtttgagaaaaattcaagggggcccagctaggacagctgatcagtgggccttcaaaatgtcaaggtctgaatttcagccaccattaggagaagtgctttaggtatgacctgaaatactttcttcccttttagaggacttcccagccagcatgtttcataaacataatctgtaattaaactctagacctatggtaacttgaggtgtgtgtctggcaagccctgggcagttcttcattcagagtggggaaaggcagactgctctcacccggagggctcatggtcaccacttcacatggagacctagagcccctggagtcagggttggcctggccatcttcactgcagggatggtcaggcacaggagatcaagaggaccatggcacctgttggtccggagagacagggggcagaggtccagtccctagcmggcatcgtgaatcttgcyattggctttgtgttttyttaatttgtaagaatatattccctcccaaagcagatatagcacaagcttagtaacaagagcatcttactcttttgtgagatgtgtgaaattctaagagacagttctttctccatccatgcttcacagatgcaaaacctgaggactaactatgctgtcactgaacagaaactggcaagcatttttcaggcctcgactggaatttggtccttccttgctttggagagcatgagtttgtcccctagggaagtwagctctgagcaacattaaggttctgttttcagtagacactcagcaccacaaagtcattctgagggaaagatacgggtctgagctgatttgggagagcacagtacatgacaaacatcagctagcaggaaaagagaagccctggggagtcgaaattatgcagatagaaaaggagaaccaacattcattgagtgccttctatgtgtcaggcctggtgataaaaactttcaaattttgttcctgagaagaatgcagaagtgttcaataatttgactaaaattacatactgatacaaaaaggatcaatagccacaatgcctctgaattgcaattcacagggcatggtggtgcgtgcctgtrgtcctacctactcaggaggctcacgtgatcctcccgcctcaacctcccgagtagctgggactataggcgcgcatcaccacgctggctaattttaccatttttagtagagacggggtttctccatgttgccagggctggtcttgaattcctgggctcaagcaatccgcctgccttggcctcccaaagtcctgggattaaaggcgtgagccaccatgcatggcctattattayttttttgagacaagtctcactctgtcacccgagctgaagtgcaggggcgtgaacgcagctcactgcagcctcgacctcctgaggctcaggtgatctcccacattctttaggaagaatcacatggaagaaattttctccaattccatattttgagagttcttattcctggtttgtgttattgctgcccgggatcctgtattcaaggctacactggcatacccagagatgagtctcatgttgcccctgaaacgtcagcaacatttatctgtgcaataagcacatcctgaatcatcctgtgttgtgttactctctggtgtccacagccaaagagtgaattttaccgctggtaaaaattcacttgggctttcttaaagagcctaataatcttagcacaaacggtcataaaaaaaattctctctcaattctgtctaacttttcatgctaatttaaaacttttgtgaatatattgagatactgaaggcaatggcttccttaatgcacagttttctttgagaattatttaaaataatatttgtgaaggtacttggtggcatgacktcacacgttgggcactcagcaaagctcacgggatctctttgagttctctctctttgtgcatatgaatgtgggttagaaaaacacactaaaaaatgcacaggcaagaaataataaattgtttctctcacaaagacaaatggtaagaaattacgtttctagtaatttgtgcccttctctggattgattacaatatttattgtctcttacaaaataatcttgtctttggtttttctcatccagttttgaagttttcgtagtccttcatggggctgaggtggtagaaagcagcaccgcaaagtggggagtatggattcctccatgtcaccagggacaggggcggtggggagagggtggaatcccgaaccaagaaggcttctggtgtcctgagagacaaatttgcaatcccgtaatacaccaaattgccaggcaagcagcacagcacattcaaatccttgactagctctgaaatgtcaacagtgttttagagatggcctgactctccagacctgcactagacccacagcccgatttgggggaagtcagacatatcctagtcagcagggaaagtggaggtagcaggagttacagagaatgctgatgctcacataggaacttctctgatagaaatcccctacttctggtatttccacttttctctctctcttccctctctctctttctcccttctccctcctctctctctcctctttctctctccctctttcccctcttccttctctctctctcatcgctatctcttctacctaatacattaatatccatggcctgtgtgtctagatgcataatccagcacaattttgcagatccagctttgggccgtgagttaagtctctgtggtattttgctccagagccagagggaattctcttcattagctgtgcctgtgttcactgacatttctcatcattcgcagagtgacctctggcttcaatgaagacagggagcaataaataaaacctaaaattaaattgtttacatgaaagtttttaaaagaaatataatatagtctcattttaaggttgattcagtttttaaacaatcctttcaattccccagaacttcttatctctttaatactcctcaaagacaaaaatctatttttaaggaggaaggagtggggacatagctcccatccaggggaaagtatttggtgtggaaacagttacctagcttcagtgaagctttgcaacaaagcagaccacactggggcagggaaggaagaagaggaagggaacaaatattcacggaacatctattcttgaccagtatagtcctrtaatttttcatgtgttttctccaatctttcaaccccgtaaaaaagaatatccccattttagtggtgataaaactgaggctcagtgaaattagcaacttrattgagtcctgtcataatgcagagcctggttttgaatccctggtccatctgactcaatctatgttctatgagacatgaaagtcacctttctctgaattacccaggtaatttgtttaatctaaactcaggagttctaccttttcttgtcctcagttcatttagagctgcattaatgaaacagatgatgctctatcctgacatgggtgtaaatttttaagtgtaattcactttcaaagtcttggaaatttcactgaatttgcaagcaaaaacattgatgtgtgctatgtcatatgcatgctgtgagtaaccatcctaatttaattcgacattttaattgagcctgagaagattaagtccccatctcagcacatctaatgcttgccagtgctttgctgagtagcaaacatgaggatgtgaggcctccaatgtgaaagttaatctgtatgcgcatctgtgaagcagaaaatacagaaaactagagtagcaagcctgtgtgaaaaaatgatatgtgctttggggcctaataaatggggtccrcattaacctggttaaacatataactgttcattctccatttcatttttcctgtgcaaaggaccaaagtcaaaaataagcaaaactcagctctgccctttgtagaataggggatgagcagctgaggaaggtgaggaaagcccatccagaagattctatgctgatgggctgagtcctccccaatctcccttttacttcctcttttcttttctcatttcacaagcttctttaaattagggagcatttgagtcattaaattaagaaggggcctcagagatcctctcatgccacggcttctttttgcagaggatgaaactggggcccagtgaggttaagcaacttgcaggaggtaacgcaggaaccgagttgcgctgaaacatcgttatctgacacttccctgctttgttaaagctgtctctgcagagcttgcaaagaagcatttacctctgcttgtgcacctccaggtagattcccaagatgactaacaaactctaattttattataacttcttaaagatgactgaagcaataaagcatagtgcctaaaagtcagacaacctgggcgcagacattaattctgcctaccacgtggtatgtcttcttaggcaagttacttaacgtgaactttagtttcctggtctggaaaagagaatgatgatgccaacaaagttactgtaagaactaaatgagataatcctctagaaagcacttagcactacatgtgataactattataatttgtattaataatatcaatattatcaataggaaaatcagttgtcctttagatgatgggattggaaaacagtctgtagaattttcataaaattcctattctcatttcaacacacatccataaaataggaggataaaaagagaaaattgttgtttgtggttaaatatgcacacagataatttgagaaatcattgtcaaactgtatatgccatttatggctggggcttcgggagaaactgaggttacccagaaataacgttaaaaatgcagtacaatgcttaataatattgtattgtacttgagttttgctgaagagtagattttaggtgctcttgccacacacaaaaaaaagtgggtgagatgatggatatgttaatttgcttgactatagtaaccttttcactatctatgtatcccagacatattttacatcttaaatatatacaataaatactttttaagaaattgattcataggaggtatttatgtattcccgatatcaatctcttgttaatacatgcattgcgaatgtctcatttttagaatccagaccattactcttttcactgtctatagggtgatattaggaaaggaattttaaatgcttgtgtaattgaaatatttaatattttcttctatgtcttagtttttgcacttgtaaaatgtaattgtgcctacctcacaacattgcgatgactgaatgaaataatgcatgccaagcacttatcccgtactaactgagtttttggctcacaagtgttcagtaacaatttgctattactattatggtaccctttattatgcaaagacctgttcagtgaaagaaaaataattttatgtctgggagaaaaataagtaaaataaaataaaataaaatatgcagcatctgttggggattcacatacattttattttttaatttttaaatttccttttaaagatgaattttattgcatatatttaaggtatacaacataatgtttagggacacacatcgatagtaaaaatgttagtgaagcaaatcaacatatccatcatctcacgtagttaccctttttttgtttctgtgccaagagcagctaatgtctactcacttagcatggggattcacatacattttaaataacaaaacacagacagatattctctcatattcacaggtgaaataaggtaactgaatggtaacttagctgacccatgactgcaggtcaggagaaatatgcggaggccttagaaaagtaatcatctaaagatgatgtgctctaatccctcatcccccaagatgaggaaactcagatccgcagtggttgcaacattcagttaacaggggaaaagctagttagtaggaaagccagaacccaaacccaggcatgcataacaaggccyagttcaatgaagagatcattatccaaaatcaaacggaatgaccacggaattctcctaagggtctacttcctgcacccatgtgcacctgggcttctctgccaggctttgtggtcatgcgccctcagacacaggtgtcacctgatatcttctgcttcaatatattcaacactttgagcaggtggacatgactctcagcttgagactaagttgtgtcaatgatctggtggagctccaggaaaaagcaagcttctgcccaggcacctgtaatcccagcactttgggaggccaaggcgggtggatctcttgagctcaggtgttcaagaccagcctgggcaaaatggggaaaccctatctcaaccataactacaaaaaattagccaggcaggtggcatgtgcccgtagtcccagctactcagaaggctgagrcaagacaattgcttgagtccaggaggcagaggttgtagtgagccaagatagagccactgtactccagcctgggtgacagagtaaaactatgcctcaaaaaaagaaggaaagaagaaaggaaggaaggaaggaaggaaagaagaaaggaaggaaggaaggaaggaaagaagggagagagagagagaaagaaagaagggagagagagagacaaagaaagaaagggagaaagagagaaagagagagaaagagaaagagagagagagagagagagagcaagcaaaagcaaaaaagcaaccttcctctgtaacactccactctctgcttcatgcttccatagttttgaggttatgttcctaatctggagatcttgaacccaaataagtctataaaggacttcaggggtccacaaacccctggatcatatgcacaatgtcatgggtttatctgttttttttttccttgagataattaccataatgtttatcagatttttaaaaaagagacctgtaatctccaaaaaaaataagaaatcaaccaaaccaggtgggcccttttggtatagttagattgcccaacttccagcctcttctctactctgaagagtaatttaaacatcagtatggctgaagtacagtgtcttgtaaacagtgggtgctcaccaaataatcatgaccctaattttactttaaaaggctttctctgagaactgctcttccagtcctttatttgttgtattattactctttctaatcagctttctagaatgagctagtttgggatcacctggtctcatatctctttttcttatgctataattaaaccaaatgattttaatgtggccctgaatttcccccttttgactgcaacaaaattttgtacagaaatcccacagtatcctccactctttaatgtctaggtaaatttgtgtctctttttatgaaacaattgttatatctgtttgcaatgaatcgagaaaatgtagaacataagcctcagatttactratgagaagatcaagacctatatgttagataaatggacrtgccaatggtcatactgttagaaggtggcaaatcttgtcctatacctaatccctctctcgctctctttctctttctctctctttctcttttcaacattgagatttgagcctgcatagttgcaatttcctggaggttattgaaatcatcttgagccagtgactggatgtaatgttaccatctgatggccaggtttcattcaatcaggcgacttgttagaaccaagtgatacagttcagaaaggcctgaccatgggggctgggatgtcttcctctatgaaccgttgttccgatgctcggtcagcaggtttgttatgtggcccccatcctccggggatcaccagggttctgggtaygcccctgtctcatctgattagtcttatctggcttgctcttcatttgccccttaatgaatgtcattaaattwcccacaacctacaacatctacacgctgcctccttcatttttttccaaccagttcattcactttccctgagtgttgtttggaatacgaattgcattagtcactatgtttattctgctgtgctctagagtctcatctttgagtggtgctgtttcttctgctaaagcaagagttgccataggaacaggcctacatgttttcttcctgtacaggaagtgaacctgggcattgcaatgctgttttcwgagttggtcaaggctagctcataatgtttggctgcttatttagatggaagagaattgatgagccaagggatattatttctttgtttctcttttttttttttttttttggttccattaaaattgctctcatttggctttacttccaaattatttttcttcctcttgccaataatagtgacattgaaactcaaaactagaactgattttggccagagatatcttcactcctgggagactttattaaggtttgcagaaccactcaggatgtgatgtgacagacattttcttatagttgtgtcacttaggagcaatgaaggctttaaccacaggcagggaaaagagttaccctcaagatagaattaaggaaatcagaaaacaatctccttgcccaaatatctccccggcagccatctcatgtggctgtcagccacagggcctgaaattcttcccagagggacttcttcctcttggttagtatactgcctctcatccagctgtgtgaacctgggcaattctcttaactctggatctcaatatcctcaatgattacatgaaccccagtggttcatttcagctctgaaaagctgtgactatacatcctctaaaaggaataatttttgaatctactattcagtcattaacccttaacaggtaaataacttgcctagatttctcctcaatgttttaacacaaaacaagtaaatgtagataataagagatgaaggaagactccagggtatgcccaggtggggccttataaggtcaatggaaacctaggaaggggagaaggggagagactgaaagggaagtggatccagaaaagggaaatggatggacaaatgctaagggcaaatttgtacttacgattttgtctggaggaatttaaactgtcctttgctatttttgtggcatttaaaaagaatagaatatctttagatataaaaccttatatatcaatcaaggaaattgtataaagtgccagaactatgcaagtgttttagggggaattcaagaaaaacagcaaacctagtacccacccttgaggggtgattagcagtgttgggtgtgaaccatgcaggcacctgaggcaggtatcataaaggtcaacggttcgtcatgagtcatctttgaggcattgctggagttcagggacagattccattgatggggaggagccaaccatttctctggcaagtactccacctctctcttctctctcctgcctctctccaccattatcactcagactgtgcatgctgcaagctttgacgctagccaggctggctggatttggaggactgtgataactcctacagctttttgactgggcttttgcttcatttgttcaggagtctttgtgccatgttgcttcactcgtagtacgttattcacatatgagtgatttctttcttgtcagttttgttcagtgaatagaagatactacaatggtacagagaaattcaggcaggtcagagaaattactagaatacatkagattattatttcatagaatttaatgagattgaattaggaaaacaatcaggaaagtgactgatgatcagagaagtccatgagggtaaggaggctgctaayagcagccccactaacatcttttatattcatgacttgttgactaacgggctgtcattctgtctcccagaaatagatcagaatgactgaaaaagccccasagccacatgtggaggaggatgaygatgatgagctggacagcaagctcaattataagcctccaccacagaagtccctgaaagagctgcaggaaatggacaaagatgatgagagtctaattaagtacaagaaaacgctgctgggagatggtcctgtggtgacaggtatgtgtgtacagagaacagggtgggtggaagatcgctgagagggaagaagacattttggctgctcaggagcagcagcaaagggaagaggaccaactgcttccaggaaaaagtgagcgaggcacaatttatatatgctgattaaagttatgaactgtataattaagtcttcttaagagataagatgcaagtcagcagtgagataggcacacataacacacagaggggatttagaaagaattccaggctaccacttagaattgtatttctctctctccattttctctctttctcagtccttacctaaccgttcatctcttccacatacaccgcggcagaacaagacatggcccagagatataaatggacagtgcccaattagcagagtacctgacccatagccattcaggaaatgttggatgtcaataattagatggacctacaagtgcctaaagcagaaataactttgctgtaatttacaaggccatcaagaccaagcatagcaaacctgccacatccatttctatttctactccagatagaaagatcacttttattttcatactctctgtctcccacttgaaatgcacacacccactatacacatgtctcttcttggtacttacattccctttcgatcctgcagatccgaaagcccccaatgtcgttgtcacccggctcaccctggtttgtgagagtgccccgggaccaatcaccatggaccttactggtatgtagacacatctgtactgttcaaagggggcctaagatatcacaaagaaaacttggtctctgtctcctgttccaacagaagaaaactggtgaatcagagagatatatatgctaggaccagttaacaaatcattgctcttagagtgcacagtatttaccatgtttcatgaaaagcccaatctttatctctatttaattgaagagagtgcaggcatacacatttgatatatttacagatttttgtctccacatgatagtaagagaattgttatttatgcaataaagactgctgatggaaatattaagaaacaaattgtgtgcttctgaagttataaggtttatacagtctaaacatcaaagtattgatcttctatccactacaaaacttactggaaggtgagaagcaatccggaattatactagaaattccactgctatagattgaattgttttagcttgaaactctgattcttgttaaataaacaacgtctcctactaaaggcgtacaaattaagatgttattttctttcaccttattgtaactaagggtcaagcctttccctgagacttagggcttgaggaggagagagactgggaagggggttattgtggaggaaatgggcatcagaggggatatgagaggagaagcacggagccaggagattggggccttcaaaggcaagtttttagtggraaaaaaaaatagttaccaaatgaaaaaattggactcttgtgagacagacaaagcacaagtctagaacagttggcttagttagcagcagagtagttcccctctcacaggacacagccagtctttaccttatatgggcttttttgtcagagggaggaaatcagaggctgagaaggcacacttcctgttcaactgaaatcattagagcaggcacacacacacattcagctaccccgacatgctgacatctctccaggagagaaactcacgctctctcaccagaactcagagtcttcctaatattaccaggtacagctgccagtttgcaagataaggtctgaattagcgctaaagaaatctgttctcttcagcaggacctggtagtattgcaaggaaaacttggtctctgtcccctttcccagcagaggaaaaccaaattgggttttctgtcactaacaagctgctatgcatgaagaaaagcatagagagtgattacctccttaatcagggtacaggaatttgggacagatcctggttttatggaacctgaagcttttataacttyagtgatattccttaagaaaaatagtatgaaattgcaaatgaaratacaagagtaaacacaaaggtgaacattttcttaaagtgataaaatgaataaaaacaagtagaattttaaaagctagaaaatgccacaaacatcaccaaatctataaaaacaaatagctgacactcctaaatactatttttcttatatgttttatttgaggggtaaggggcatattctttaataacctcttcatttgaccagtaatataattctcaatgagagaataaatggaccaaaaaaagatttatcttcacaactcattatttgtaatgtcttgtgtatttttagcattgtcatcaaacttgggggcagggaaactctcatgtttttcataacagagctgtaagatttcaggcattacgtgtgtgtgtgtgtgtgtgtgtgtgtgtgtgtgtgcaaggactaaactcaaatactctgtgaattgagggccctgtgaaccatgttgccctcgtgggcccaacaaatttttccgggacttaaaagtcatttattaacttgtgtatctgcttttgaggataaactctctctaaatcttcttctacaggagatctggaagccctcaaaaaggaaaccattgtgttaaaggaaggttctgaatatagagtcaaaattcacttcaaagtaagtatcctgccttgtgtgtttttgtaaagtttaaatcttttctttaatcagtgactacatttcttgcatgatcatgttgaggtactttttgtttgtttctcccctagtacccccaagctrrgtctggaatgtcctcttcccagccctgagggctacctgttgagacccacgtttgcctcctgtcttttcctagccaggacttcttaaactcttcattatctcttaagccaatgggatccctctgtgaactccaaacacatcctcgaggcacacactgctttgtgttgtaccacctgtgtcatttcttcttcatagaatataagcacctcaatctagggtgaaattgtacatctctcctttccaatatttcacacaaaactttgtaaatagcatatagttcatgaatatatattgaaaagtggacaaacargtgaatcaaccaataggaaaagaaaatgggacagggcctcagctctaattgctcaaggattatataaatccaggaagtgtgatctttgctaaagaactggaaattacaattatagttgtggaacaggtaaccaggaaagaggaaactaaataagaaataaactgacatctaatatatcccaatgagccatatatcccaatgagcagccaaaatcacaagaaaaataactttgactttgaaaacaaataagttagaaatgcagtgtttgcacttcgtggtttatgtttgctttggtggcctctcattcccacttagcctcagtctccagggcctgggctccaccaaggaagactccatctgctctctctatttgcacactgggaacttttttccccaaggtacaggatatgattcagggtttatggatgacctccctaccccatacaaatataactgaaaataatttcatcctggaaatatttgttgatgcctactctataatggacactgagctagggttcacttacttgtttcctgtcatattatttattattggagcacctgaaggtttggtaaggcattatatcaaaatatgcctagaatgggttgcacatcagtttcatttttaatcattgatgctattgcattaatttgtctatttggtaaaccaggtttcctcaaatgaaatgtgacaggtaaattttgacgtgactaagatgcaaaggaaagctctggaacaggggcttctcctctggatggggaggtggaggaggaatgtggtatgtgggtctgtgtggacaggtttacacattaggatgatgcaggaggaggccacagaaaggggcttttgagtactctctaattcagaggtttgatggctctctgggtaacctacgtaaagttgaaccatcctgtggcttgtcccagcatggtgctacaattagaagaaatgccagatcaaagtcaaaaatccttgaaaaacaacttaaatcttcactgaagtctcttgaaaaatgtccaagaaagtttgcatttataacacaagtaacacatgttaagtcctctttcacaatctctgttagttgcactcaatgttctttttctcctcccaaacttcttagcactttctaaaaacctgacctacgattgttattttaggttcttcccaactttttttctgcctcccaaggaaatgtggtatctctgacttccacagctctcactttgattcataacaccaaggcttcttccccctggagtgggagacacaatagggatggggatgtgggcagaagaagaggattctatgaatattcatagttttatttcacccaccccaaatgtatttatattaaatggacccactgaagagcgctggtgagatggtagactctttgtcttgaagtccttattgctacaccaatataattcttcttcttaggtctttctcccactaggtgaaagggataagcttcgggacatctagaaaggtgcatttattttccctattcctatgagctacatttgagactcacagtattagaaagcctgggctttatcacagtctctttgatgatgctaattttttttctgacagcttttcataggtttatactacagatttaccctgtgacagtcaagaatctaagctggcagagttcactgctctgccacctccctgccaacaaaacaaaagatarcactggttgattggttgaactattgtgtccaacacaaaaggacagccataattattgttgaagaaaaattatttgaagatgctttaattcttcacattggtgaacagataaccaagctcttcggctaatgatgcaatgtccactttaatttgtttgtatagacataacgactgtgtaaaattaacagacaacccaggtcagtcccaggtgaaatgaatcatggaaaaacaaagttcttgggctgtccacattttcattctgcgttactgaattttctttgaaaggcttgggaaaatagcaagatctcagacaacgtctgaaaatgacagacatccaacatacttgccagatacaagtgaatttcacccattatttcagttatattgcagtcacagccatcttctagacatgaattttcactttcctccttgttgtttgttttttatatggtaagtggatcatctctgaggttgtggtttttagatatttacataatgtgctctattggtatcttcataacttttcctaagacaaggatggtctcttggtcagcagtattggagagggaaagctcaaggccattcttgggaccattgagaaaggagaaatacaatgaagaatattgggccaatgttttaatgaaccactcctctctcccaaaacggtaaaaatcaaaatgttcgataattaaaccagtttggcaatgttgcattttatgatttcccctctctaatctttgcctcacagccatgctaaataattatagaaacaccaattctgaactaaatctttagttttttcattgtcagagacgattcagctaggcaggatcagcatgaaagatgagaaaaaatgaaagaccctcttaatctgaacatcttggttccttcccacctgcaggtgaacagggatattgtgtcaggcctgaaatacgttcagcacacytacaggactggggtgaaaggtaagggaacccacatttccacactgtcccaaactgcttctcattgrtactttaacttctggttattagcaacttttagctatagactcagatgagaatacaataaaagctgtggatgccggctctaggaaaaggcacaaatacacctctgatatagacattgacaaggccaatgctcaggggacctcgtttagactgcatcagctgctaaccttcagcagtcagctttttggattcaatattatcactcgtaaaggagaagagtaaccaagataagtttaaaggaaataaagtatataaaaatactctacaaagtaaacaaccaaaaaaggcagttcacaggtacaaaacccaagtgtcagagaaaaccaagaaagaaaaaacttgcccagtgccatgtgtatctggggtgggagtaggtgggggtggcattggagggaagggggaggcaatgctcaatttcctaacaaagaaatagaaaaaaaaatattttctaggattgaaaaagcctgtctaattaaaataacacaacaacattacttaatctgcaattcttcttgwcatgccttgggaccctgccttcaattttctttcattaatataggcagggagaaatgagaggcgggaaggtgatggaggcactttacagttcctttctacctaagggtctgtcccctccagaggcaagaaacaacaaagcatgtctcagtttccaccaaattaataagcaagataggggagaaattgtctgataaatctggatgacatagaggaccagtcaatttctcaaatcccagagaagaccattgacctgaaagatattgattggcctttccgatacctagtctcatgaaaaaaaagtttaatttcctattttcctttgggcataaagcccgtatcacctcacttagacaaaaggacagtgacatgtctgcaactgttttttcaaacttattagcaacacttagccaactatatgccacctatctgcctatgtatacttttcaatgcccaactattcttaatatatattccagttaaccacctataaataaacttgattggctattttcaccatttgtcctagttcttcacttttttttttaccaacttactgctgttgttgttccatccagttattctatccatgaattctcatcaccatctgttactttatctcccccaactgatatgttcatagaatgacagtttgtagatagaagatccttaaagtccatcatatacacaaagaaatggaggctcaaaaatgttatatgacttaggccattgcaggactgagatcagaactgaggtctcaatttgtctgagttttttaaaatggtgtaatctgctatatctccataaaaamaacaacaacaacaaaaaaaaaaaaaaaacaggcttaatccccattgatttaggccactggttccccaactttacctcagaatcaactttgtagttttttaaaaacactgatccctgggacccacagaaggttactgaaccatagcctttggaagtaggacaaaggaaactatattattaaaaggcactccaacttaaaaaatgttttaaagaataatttttttaaaaagatgcctcagggccaggtgcggtggctcacacctgtaatcccagtactttgggaggccgaggcgggtggatcacctgaggttggtagttcgagaccagcctgaccaacatggagaaaccccgtctctactaaaaatacaaaattagccaagcatggtggcgcatgcctgtaatcccagctgctcgggaggttgaggcaggagaatcactggaacctgggaggtggaggttgtggtgagccgagattgtgcttccgcactccagcctggacaacaagagcaaaactccatcttaaaaaaaaaaaaagacgcctcaggtaaatctaatgtttatttaggcttggaaaccattgctcttgactttaatcactgtrggctgtagtccagattctccagtttgcagtgtgtgtttttcctctatcaggctcttaccctaatgaactcttctttcttcttagtggataaagcaacatttatggttggcagctatkgacctcggcctgaggagtatgagttcctcactccagttgaggaggctcccaagggcatgctggcscgaggcacgtaccacaacaagtccttcttcaccgacgatgacaagcaagaccacctcagctgggagtggaacctgtcgattaagaaggagtggacagaatgaatgcatccacccctttccccacccttgccacctggaagaattctctcaggcgtgttcagcaccctgtccctcctccctgtccacagctgggtccctcttcaacactgccacatttccttattgatgcatcttttcccaccctgtcactcaacgtggtccctagaacaagaggcttaaaaccgggctttcacccaacctgctccctctgatcctccatcagggccagatcttccacgtctccatctcagtacacaatcatttaatatttccctgtcttacccctattcaagcaaytagaggccagaaaatgggcaaattatcactaacaggtctttgactcaggttccagtagttcattytaatgcctagattcttttgtggttgttgctggcccaatgagtccctagtcacatcccctgccagagggagttcttcttttgtgagagacmctgtaaacgacacaagagaacaagaataaaacaataactgtgtgtgttctggctgagaccttcatttccctgctttcttgctttgaacaaatatgataactggatggttcacattcatgagttccctcagaggggatggggatgaggaaaacacactggaggagatatttacatctttgggaacaaattggtcccctattacactataataggcaatgcacattcagaatacagccagtgggaaatctacattttacttatttagttagctatttttaatttcgacttttatattagatatagagggtacatgtgcaggttcgttacatgggtatattgcatccaggtagtgagcctagtactaaatagatagtttttcaaaaaatgccccactccctcccttacccctcaggtagtccacagtgtctactgtttctatgttcatgtctatgtgtgttcagtgtttagctcccacttataactgagaacatatggaagttggttttctgtttctgcattgctttgcttaggattatggcctccagcttcatccatattgctgcaaaggacatgattttacttttttattatgaccatatagtatatcatggtatatatgcaccacatattttatccaatccaccattaatgggcaactacattaattccgtgtctttgctattgtgaatggcacaacaatgaacatacatgtgcatgtctgtttggtacaacaatctactttcctttggatatatacatagtaatggggttgctgaatcaaatggtagctctgtttcaagttttttgagaaatcttcaaactggtcactctccatacgttcgtaaaaatattatgccttggaatgctaacgttactcctaaaaattggagtactctccttggccttactgtagagataaaaggtatagatgtcctcattacttagagttgctttccacagtggctgaactacgtaactgcttaagctacatccccatgaataatgtataagcattcccttttctctgcagtctcaccagtgtctgttgttttttgattttttaataatgtccattctgactagtgtgagattgtatctcattttggctttgatttgcatttctctgataattagtaacgttgagcattttttgtaggcttattggcctcttgtgtgtcttcttttcagaagtatctgtttatgctctttgcccattttctattggggttatttgttttttgcttcttgatttgtttaagtttcttatggattctgaatattagacctttgttggatgcatagtttgcatatgctttctcccattttgtagattgtctgttatcaatagttccttttgctctgaagaacctctttaattaggtcccacttgtcaatttttgtttttgttgcaattgcttttgaggacttagccaaaaattacttgtcaagattaatgtcaaaaagagtatttcctaggttttcttctaggacttttatggtttgaggtcttaaatctttaattcatcttgagttaactttttatatggtgaaagatgagggtgcagtttcattcttctgcatatggctagccagctatcacagcaccatttattgagtagggaatcctttccccattgattggttttgttaactttgtcgaagatcagatggttgtaggtatatgactttatttctgggttctctattctgttccattggtctatgtgtttgcttttgtaccagtaccatgctattttggttactgtagccttgtagtatagtttgaagttgggtaatgtgacgcctctgtttttgttctttttgattaggattgctttagctagtcagactcttttttggttccatataaattttagaatagtttcttttctaattctgtgaagaatgacgttggtagttagataggaatagcactgaatctgttaatttctttgggcagtatggccattttgaagatactgattcttcctacccatgagcatggagtgttttttcatttgtgtcacctctgatttctttcaaaagtgttttgtatttctccttgtagagatattttacctccttggttatctgtattcctaggcatttcattttatttgtagctattgtaaatgaaattgtgttcttgattttactctcagcctggacattattgctgtatagaaatgccactaatttttgtacacttatttttttcctgataccttactgaaatcattcatcagttccagtagccttttggcagagtcttcagagctttctaggcatacaatcatattgtcaacaaggagaaatagtttgactttttcttttcctgtttagatgccttttatgtcttcctcttgcctaattgccctggctagggcttcctaatttcttttgtaatattttcacatgaaaattctcctaagcttaaaactacatatcccaatgcctgtggaaatctcatcttggacttcctcagacacttgtgagcaaaatcaaacttcatctcattcttctgcttaagacttttcagtggttcccatcacctacagaataaaattgatgctcccgcgcttagtgtatcatataaagcctgctgtgagctggtcccaacatgcctttctgtccacatgtatcacttccttccttttcatcattctcaattactagtaattctgtcacacattatatttgcatatctgtgctttggttcttttttttttttttttttttttttgagacggagtctcgctctgtcgcccaggctggagtgcagtggtgctatttcggctcactgcaagctctgcctcccgggttcaggccatcctcctgcctcagcctcccgagtagctgggactacaggcgcccgccaccacacctggctaattttttgtatttttagtagagatggggtttcaccatgttagccaggatggtctcaatctcctgacctcgtgatccacctgcctcagcctcccaaagttctgggattacaggtatgagccaccacgcccggcctgtgctttggttctttacatgaaactccctttctaccttgtgttgcctggcaaaatcttacttacccagaactctgctccggcatcctccgcaggaagaacactttcattgaaccctagcattgtccctaatacccttaatatgtattgtcatagcaccctatgaatttttctatatcactttccatcttatatttaaataatctttttacttgcccatctctcccactgataatctaagctggcagaggctggatcagatcataattatctttctattcttagcgctaggatcaatgcctggcatagcatatttacattttttatttaaataaactgacctgactttcttctggttggatatgttctgagtccctattactaaccttggtcttttatctcagaagttgaaggctcccctggagccagctgcaaagttcccaaagccctaacaaccccacagccaatcagctacagagtaggctgccctgagtcggcctccccaacacaaagtccagggttggagcaggagcaggagagggacaatggaagctgccccgtccaggttcatgttcctcttatttctcctcacgtgtgagctggctgcagaagttgctgcagaagttgagaaatcctcaggtaaaagaaaaatgtagttgggtggctatagtgtgaaagtgttattaggagaaggaaagggagcatggtggttctctgggtacttttcctccacacctagaaagctttccaggaaatcctggataagatgcattttgcctggtagagagtagggaagtctggcagtatccttcagagacagaccatcagtagggtcaccttccatatgttagtaaaaatattatgccttggaatgccaacagtactcctataaattgtgctcttcttgcccttagtatagagataaaaggtatagatgccctcattatttagagctgcttcttcttgcctcagtaccctgacatcttctgcttctctctctagatggtcctggtgctgcccaggaacccacgtggctcacagatgtcccagctgccatggaattcattgctgccactgaggtggctgtcataggcttcttccaggttagttccctacttgcaattcccccaagagccagaaatgttctaccttaagggaaccacagcagccacctgctgctggcagatggcactgcattagaagtgggggtaaagggagacagccacccagtttgatttcatcttgtccattgggacctcttattttcaagacattcccagtctctaaattatatctttctcatacttacttcaagagttctgagcctgtgggctgcatctcctcatctatggatgctttgaagctcaagtcagtatctgcagaaagaatgccttcatggaaccccaccattgtcctaaacacatttggtctatactctcatagcaccctatgaataggcaggggccagagtgaacccaatttatatcatccagcaacactgtttacaggatgccaaacatcctggacattagtcagtgcacagccttttaaagcctttcccccaaatatggtagactctccttctttctctttgccttgtctgaaatgttggaaaatgatggcattttgtatattcaaggtgttaacctccatcttccagattagcttcttgactaagaaaggcagccataaatgagactgcctcattccagcattttcatctttctctggtggtagcatctggaaatcctcacagctgatcaagcccctactctctcatagcagaccttcttgtctgtttccatttctcagttacaactcctgattaccctgtcagttctgcgtacacagttggaaatcactgcaatgagatgcaagtcagggagaaagacagggacaacatttttcaggaatgagaaatctgagctgtagacaaaaacaccgtcagaaagatggggaaggggcaagagcatggaattggaggagtgtgcaataacttaaacagccgccagatgccatcattttatcctccagcaattccatctgaaggagcagaataagagaggaggcctcaattaactattgttcatggcctctagaagagtagataccagctccctctgcttgaccccagatgcaagacgggtatgttagtttcttctcatgctgccaataaagacatacccaaaactggataatttataaaggaaagagttttaattgaatcacagttcagcatagcttggaaggcctgaggaaatttacaatcatggcagaaggaacctcttcacaggatggcaggagagagaatgagcacaagcaggggaatgccagacgcttaaaaaaccatcagatcttgtgactcatgcactatcacgagaacagcatgggggaaactgcccccatgatcccattactgccacctggtcccacccttgacatgtggggattatggggattacatttaaagatgagattttaggtaaggacacagccaaaccatatcaactggccatcttcttttctccttgcacatctcctccttcagcctggggacttgcagggtagaacatgtttgttcctgttaatttcctggagctgctatggataaaggtcccgtgagagcagggaaaatgatgccagcgtctatggaaggcctggaatcactgttcgcaagtggcttctctgctgcctcctgcaggcctgggctgcagagttgaatgcgtgaacagcatcttcatgtgcaaagctcaggtttatctacagtggcaagagagggactgtccttccataacctgcataaacttttgttaaaacttctaagctttcattttaattgttttatttttcttctttttttcttttttggcccttttgatggcgtctatttcatatttttgcattttttcctttcatccacaaatgtaaccaaagccaaaactcaagaggaagagccggtgggaggaaaagccagtttatttgaagatccagtaaaccaagaagacagcggactagcatcctaaagtacatcttggccggg

SEQ ID NO: 97800 - DNA, 43159 bp, Homo sapiens
tctcctgaccttgtgatccacccacctcggcctcccaaagtgctgggattacaggcgtgagccactgcgcccggccacattcagttcttatcaaagaaataacccagacttaatcttgaatgatacgattatgcccaatattaagtaaaaaatataagaaaaggttatcttaaatagatcttaggcaaaataccagctgatgaaggcatctgatgccttcatctgttcagtcatctccaaaaacagtaaaaataaccactttttgttgggcaatatgaaatttttaaaggagtagaataccaaatgatagaaacagactgcctgaattgagaattttgattttttaaagtgtgtttctttctaaattgctgttccttaatttgattaatttaattcatgtattatgattaaatctgaggcagatgagcttacaagtattgaaataattactaattaatcacaaatgtgaagttatgcatgatgtaaaaaatacaaacattctaattaaaggctttgcaacacatgccttgtctgtttttatttagactcctatagtgtctctgaagaaaagaatacagatatttgaaaaaatatgatttggtgctcttaatatctcttatatcgtcacttacctcacttaaatagtcagatattgctggagaaaaattcacaagcatgctgacaggtctcactttaaattcataaccataaatctcaaatgagccctcaagtctgcctgaccattttagttacttctctacaatccttccatttttatgtccctagtctccaaaatgactgttactattttacttttcctcttctctcttcaaagcctcaagacacacattcagcctcctcctctgcccccttatcctccaccctcctctgctctcagcagataacctggcctcatattacacttctaaaacaaaagcaacttcataccaagctttcccttctacatcccaaagcagcagtcataccttcccacaggcccatccttccttccttccctcctattatcaggatgaagagcctctgctcctgccaacagcactgactccacatgcagtttccctcccatccctctcactactccaagtcaggctgtttcctgcatccctagtttgtcccttttagctggatcacctccatcattctacagtctgccctagtaaccttccatcttacaacaaatactccactgaccctacataatcctccaactgcaactccattctctgctccctttacagcaagacttctggggaagtatgtctgtacttaccaactccatgacctcacctcccagtgtcttttcaaccctctctaatctggcttctatcctcacccagctgaaactgctcctccaggatttctcccatgattcctcagtgctaattccagtgatcatcttgttcatctcagcagcatttgacaaagtgaaccgcttcatacttttagcagttttttaatcccttggcttttccttatttacatcctacctcactgactgttctttctcagtccttcttgctcactctttctctgctatttaatttctaaatgtgagagtgcctcagggctcaagtctataataattttatatactacatattttacttatttgtctcttctcaccaaaatataacttccaaaatgacagaggtttttccactttttaaaaaaacattgaaataaactcaatcttttaaaaaatataaaagtactgtacaaagatcttttatttttcagaactgttttgagagtaaatagccaacatgatacccaatggccctgattacatcagtgtgtaattcctataaagacattctcctgcataaaacctcaaaacaattatccaaattaggaaattaacactgatacattactaccacctagtcatcagattccactcaatttcatcgattgtcccaataagaccttcataacaaaagcatctaattcagaatcatattgtatttggttgtcatgttttttaagtctctttgaatctggattatttcctcagttgtttctttctggactttttatgaccttgccacttttgaagaccacagactagttatgttatagaatgtacctaaggtttttctggtgttctctcgattccattaagttatgcatctttggtaggaataccacagaagtgatgttctcactgcatcctttcaggtggcattcagtttttgcagttttgatttgccccattattgatgatgttcacttggatcacttgattaaggtgaggcctgcaagccatcttcactgtaaagtatttggggaggaggtgccttgagactactgctcatcaaattttcagtttgtttgtttatttatttagaggcaggatttcactctgtcgcctaggctggagtgcagtggcgcgatctcagctcactgcaacctctgcctcccaggctcatgcaatcctcccgcgtcagcctcctgagtagctgggactactcgcacgcgttaccatgcctggctaatttttgtatttttagtagagatggggttttgccatgttgcccaggcttgtctggaactcctgagctcaagcaatctgcctgccttggcctcccaggtgctggattacaggtgtgaaccaccgtgcctggtcatgcatttatttattatatcagtatggacccatggcttctattttattcaaatcataaggagttatagtccattactattatttattttgatgttcacactgtcctcgatttggccagtgagcccctgcaagttgtcttctgtgccatttcgacatatttccatcattcttcaagcactttcttgttttctggcacaagatattctaaggctcaccttgttccttccttgcttccaaaaatggaaaaggcatttctccaaggagccctgattcctcaaagtgcataatagtattaaaaaaacaggatctgggcactagggtatcactgtttccaggccctatcagtgaacagagctggaagatatatgtatttacactatatttatctctatatctatctatttatattgaaaatcatgaatccacaccaatatctccaattctaatctcacaccacaggattcactctagttttcttctttcgcatgttttaactctcttctctgacagtaagtaacttagcatccattatactcattatccttaaaatgtatccttagtacatttacgtatttgatgggtttgcctgtatgtaaccaattccccaactctgcccaagtgctctccactcaggctctgacatccctcagtgggttgcttccttccccaacacctggacaccctccttaccatgatacatctctgattttataatatgctgaaccactgtcctgataggaagaatagaaatttttcactcattccacttctgtattctaaacacctagaagagtgactggaacatggtacatgctcaatcaatatcagttgatcgaataaatctcttgctgattatttagtatgttccctccaaactgaacattctaagctttttgtttttgagacggagtctcgctctgtcacccaggctggactgcagtggcgcgatctcagctcactgcaacgtccgcctcctgggttcaagcgattctcctgcctcagcctcccgagtagttgggactacaggtactcgccaccacgcctagctcatttttgtatttttagtagagagggggtttcaccatgtcaggagatcgatctcctgacctcgtaatccgcccgccttggcctcccaaagtgctgggattacaggcgcgagccaccgcgcccagcctttttttttttttttttttttttttaattaactcttcaaggccacatgattccagtacaaccgcttgcggggttccaagccacttcttggctatgtaaatgcagcacatagactagccatgtgagggcagcagagggccactacataggtgcaacctttggcttcaaaattcttggaccattctgacgtgattaaactaaaaacgaatgagtttatgcatatcgagataccctgaggtgtacaaaggatgagtcaaggtagcggagagagagttgaagagtgacagctgagaaacagagataggacatgtccaagaagtgccaggataacccaacaacacaggctgattgaggaaactgccagagattagacaaagtagactgaagagggaaagcaatgtttgttggagattttgctttagtttttgataaatatttcttagtcataccaattgttttaaatataattacgcccccaaaccaaatttctactcttattctggcaacagaataaaaatcaatatcaatgtttgatcattttcaaagaaactcagttcctatcttggttgaaatgcagtgacatccatatgacaattgagctcttcatgtggcactaatataactaagccctgagcacatcccttgcacttctatttagtgaagtcttttaaaaagtattttctttacagttgttaagtggaattactaaaaattacaatcagcagtattttctactcttttagcttattttttaaaatatttatctccatgcttttcaatattacacctatattgcttcttcttgatttttccattttaagatactgacttcctactatggaagttaaagattaagctctatttcctcctcctccatccccatcaagcatagtacccttctccaaagcccatccttctaaatgtaattctttttttgagggggaggggggatcaatactcagtttttttttgttttgttttttttttttttttgagacggagtcttgctctgtcacccaggctggagtgcagtggtgcgatctcggctcaaggcaagctccgcctcccgggttcacgccattcttctgcctcagcctcccaagcagctgggactacaggcgcccaccaccacgctcggctaatttttttgtatttttagtagagacgggttttcaccgtgttagccaggatggtctcgatctcctgacctcgtgatccgcccaccttggcctcccaaagtgctgggattacaggcgtgagccaccgcgcccggccaatactcagtatttatgtaacaataaatacaattactttcctttcttgcacaagattttgttttccctagaattaatagctgcataattcttacagccgcttagttttctgtgtacctgtcatgagttaaactccaaactctcggtcaaatctcctcttgattcaacgccagctggaattttgtcaatcccatccttctgaagcagtgtctcccaaagatttctgaccgaatctaatctagatgcgttgccgtctatgcctatacacagctattgttcccggagctctttcagtatcatcttgggatcttactattttctgtgtttgttatttattgtatttcctgcatttcataatttcctccttcttggcttattccctcattttggtggatcagatctacaggatcttcctggaggtactgagaaaggtaagataggtactattttttgtgtgtagtgatttagcacatctgaaactctattctattcacacactagattggtagttggatgagtattgaagactaaatcggaagtaattttccctcagagttttgaagacagtgccgtatggcttcctagattctaactgagcaatctgaagccactctgattctatagtctgtataacctggaagggtgtgggatctctttttcctcgatgttcagaaaattcacaatgatatgccttgacgtggatgctttaatatttgtgctgggtgcttagtaggatctttcagtgtggaaactcatctccttaacatctggacaactttctgaagtcatttattatttcctgcctttcattttttttttggtttggaactcctgaactggtcctgtgatgtgactgcagccgccaggcgcgtgcgcagtgtacactgcgtgcgcatacgcgagcccgttgcgcctgcgcgcggtgcsgccgtcgcccytcttttmgcggcgttctccacctgcgcgggcctgaatggccttcaggagcacagtcggcctgaggagttgayggttactcaccgccgtgagcccaagtaactcgccctccttcggctagaaaccctccgcctgggcccgcgcgacaggagcgcggtctctgaggggagcggcgaccccgccagccccggtctctttccctggcggcggcggcttcttccgtgggacaatatgttcaagagaatggccgaatttgggcctgactccggcgggagagtaaaggtcagtgcccggaccgcccctcttccrgggtggctctcccgccycggttcctccctgcgcggcgcggggagggcccactgggtttcctttcgcgccttttctcctcgggtttgaaccgtggtttcaggttggagagcgagtcagagccattgagcgaaaaaccggcgttcattgggccccaacttcctcgcgtcactgccaactcccayccccrccaaaaaacaaacagataaatggtggcttggggaaacccggacgtggctgccaaggaaacgggcgactccgagggctgggaaagctcagcttggtgcacattcgctgccaatctaggttattggtgaagcggtgacgccaccctcctggtgtgaggataacaataactgtarcaaacagtcgctgagcgcttacccgcagtatttccaagtgcgrtaactgagacaccgaggcatacgaaagctaagaaaatttgctggagttcatggtgttcacaaagcctcaaagcaagagcataacactgtgcctggcacatggggaacattcagyaaatgtcaacttcttttgtttttgatgaaattaccatagaccctagcgtaatgtttgacattgtaatatttatttccctcacacagcccctggcacgttaatttttttttttttttgagacgaagtgtctgtcttgttgcccaggctggagcgcaatggcacgatctcggctcactgcaacctcggcctcccaaagtgctgggattacaggcgtgagccaccgcgcccagccgtggttcattctttttaaagaaaaatttcctttcctttataaataaaaatcagaaggggtacaaatagttgtttttatcaggagccagtgggtcctgccttaaaaattaacgtgcagggccgggcaaggtggctcacgcctgtaatcccagcactttggaaggccgaggagggtggatcacctgagatcagaagttcaagaccaggctggtcaacatggtgaaaccccgtctctactaaatatacaaaaattagccgggcgtggtggcgggcacctgtaatcccagctactagaggggctgaggcaggaaaatcgcttgaacccgagaggcggaagttgcagtgagctgagatcgtgccactgcactctagcctgggcgacagagcaagacaatgtttctttaaaaaaaaaatagcaataattagtaggttttaaaatacttatgtgtgtgtgtgtgtgtgtgtgtgtgtgttttgttttgtttttttttgagacggagttttgctcttgttgcccaggctggagtgcactagcgcaatctcggctctccgcaacctccacctcctggattcaagcgattctcctgcctccaagcgattctcctgcctcagcctcctgaatagctggaattacaggcatgcgccaccatgcccagctaattttgtatttttagtagagacgggggcttctccgtgttggtcaggctggtctcgaactcccgacctcgggtgatctgcccgcctcggcctcccaaagtgctgggattacaggcgtgagccaccgtgcctggccgcttttcttcatttttattgttgttggttacattcactcagcacttttcacatgtggtaaatcttgctcattgttcttcagatacatttctgtaactgagccattggtttcagattcatgtgcaacattcaatattttcacttcaattgaaattttttatctttccaacataatctgtcaatacgcactgcctttgcacttatcagatataagaaatatgtatgttaaactaaggacaaatgtagcaaacatgtcatcagccactatttaccaagcttcagtcatccaagtgactcttggccatttttgccatgtctgaattcaactgtaatatttattgtaacatttacatttaaatcagtttattttttaaaagcctctttctaagcgttaatgttttttaaattgtagggtgtttggttgtttttttttttttttttttttggagacagaggctcgctctgttgcccaggctggagtgcaatggtatgatctcggctcactgcaacctctgcctcccaggttcaagcaattctcctgcttcagcctcccaagtagctgggattacagatgcacaccaccaagcccagctaatttttgtatttttagtagagrtggggtttcaccatcttggccaggctggtcttgaacctctgacctcaggtgatccacccaccttggtgaaattgtaggttttaatttctagttacagttattactattttttaatactgattaaacacgtaagtaaaaaagtgaaaaatgtttgacctttattctacctctcacaaattactcctaatatttatactatactttgggaaacactgccacaggctaggtgataaggacattgccacaggtgatgccagtcagaattggccatttttatttcaatgcctagctttcaggtgtttaagwaaaggccttttgcatttcttttaacaacactctaaaagcgctttacatggtaatttaaataaaagcattttcaaagagggaacattgtaattattctggcgttttttgtgttaatatgaaaggatgtgtctgaaattgatttgagagaaatccatattataagcaaactatagattgttagcctgccattctttaaagcaagttttcagagctcttattctgcatatttagctaatggtacaatattcatttattttaaaattatttttcttttagggtgttactatcgttaaaccaatagtttacggtaatgttgctcggtattttggaaagaaaagagaagaagatgggcacactcatcagtggacagtatatgtgaaaccatatagaaatgaggtaggcactcgttttttctgtaactgttttacttaaagttgtctgtaatttgttttgcttaaagacaacctgtagttttttttttttttttttttttttttttgagatggagtcttgctctgtcgcccaggctggagtgcagtggcgcgatctcagctcactgcaagctccgcctcccgggttcacgccattctcctgcctcagcctcccgagtagctgggactacaggcgcccgccaccacgcccggctaattttttgtattttttggtagagacggggtttcaccatgttagccaggatggtctcaatctcctgacctcgtgatccacccgcctcggcctcccaaagtgctgggattacaggcgtgagccaccgcgcccggccgacaacctgtaattttttatagtaactttctgattataaaattggtccgttgtaggaatgttgtcaaaaagtttttgaaaaaatagagaactgtcatcttcatatgatactagaaatcaattttccaaaaatgtttcctaattaaaattaagataacaagaactatttatgctataaatacagtacaagtacatcttcctaacatcatatctaagttaacatagtatttaatcaggagtttcaggaataagcagctaatccttaaagtaataatgtggtaataagaatgtgaaagacagctctgctgtgtcatctgattgctagtaattttgtttcactgctgaatcttcaatgcctggaacatagccagtacatagtaggcatttaacagatatttattgagtgagtaaattattcctctatttaaaacccttcagagtctacccaaaaacttgcatgtgaatattgataccagtgttattcataatagccaaaaagtggaaacaattcatttgtctatcaactgatgaatggataaataaaatgtgatatatccatacaattgaatattatcaagcaataaaaagtaaagtactgataaagtaaagatgctactacatggatgaaacttgaaagcattatgctaagtaaaagaagccaaatataaaaaaggccaaatattatatgcttttatttatatgaaatgtccagaaggggcaaatccatagacaaagaaaatagataagtggttgctagtgggtgggggagaaagggtattgaggtaagtgctaatggatatggctttcttttgtgtgataaaaatgttctaaaattgtagtgattcttatgagactctgtraatataactaaaaaccattggctaggcaaaatggctcattcctgtaatctcagcactatgggaggcccaagcgggaggatcgcttgagcccaggagtttgagaccagactggcaacatagtaagactccatctctacagaaaaaaaaggtatcattatagtaagattccagtttattttttaaataataaagttagatatgaatgtagatataagtaatttaaaaattcctaaaagtaaattaaaaagttaataaacattactattgaatgtgacttattgctttgcatttttttattcttctataatgaattatatattttaaaagccacttttgccaacagaaacccttttatttgccataactaatgaatatgcttctgtacttttaaaataaagaaaatgaggagtttttgtattcaacaatcttagattgctttaaattagttgtccttagctttatgtaatataattttttgtttgtttgagatggagtttctctcttattgccctggctggaatgcaatggtgtgatctcagcttattgcaacctccgcctcctgggtttaagtgattctcctgcctcagcctcctgagtagctgggattacaggcgccgccaccatgcttggctaattttttgtatttttagtagagatggagtttccccatgttggccaggctggtctcaaactcctgacctcaggtgatccacctgccttggcctcccaaagtgctgggattacaggcgtgagccaccgtgcccggcgtatgtgatataattttgttctttgaaattgactatagatttgccttatatttctgtaatagtaccagatatgtactgttgttttaatggaaaaaaatcaaaattgatttagaatattatctatagaggtgtattaaaacaagatttgccaaaaaaaaagttaatttgggacrtgtatttctatayattacaaatcataaaagaattcaacacaggcttcctttttgtttttttaaaaaaagcaaaataggccaggtgcggtggctcacgcctgtaattccagcacactggtagggcgaggcaggtggatcacctgaggtcaagagttcgagaccagcctggccaacatggtgaaaccccrtctctactaaaaatacaaaaaattagccaggcatggtggcagccrcctgtaatcccagctactcaggaggctgaggcaggagaattgcttgaacctgggtcagggaagttgcagtgagccaagatcatgccactgcactccagcctgggcaacaaagcgagactccatctcaggaaaaaaaaaaaaaaagcaaaataacttcccaggtgtagttcatgttttttagaaaattagattccataaaatttgaagggaagtatgttttttataaaactaagtatatacgctcagtgtattttttttcctagttttcatttgtagatcataaaactaactaattccttatattttaggatatgtcagcatatgtgaagaaaatccagtttaaattacatgaaagctatggcaatcctttaagaggtacaatatagtcttttgattcacaatatccaaagttaaaaatggctaggaaactaaaccgataatttactatttttttctgtctttagttgttactaaacctccatatgaaattactgaaacaggatggggtgaattcgaaataatcatcaaaatatttttcattgaccctaatgaaagacctgtgagtagcattaatctttgtaaatataaaatagatttcttagtaaatgtgaacatgtaataatacttaatgaatagtgttcattcagatgtgttttatgtaaatttatggcacagtktatcttgccatgagttaagtttttcatttttaaatgtagcgcctttcaaaatccttttttttttcaagtatggaaaaaaacatataatatgaacatgtattggaaagaaaccatggaaatcagatgactactgcagcaaaaaaacttaaaactattattatcattcggttattagtaataaataagttgagcccatatgctgtgtaaaatagtttttatagtttttggtagttaaaccctaagaaacagtgtttttgcttttttaagctgtcatcagtactagcgcttcattttatatcttatttatgagtctttatttttatagccactggctttttcatcttttgatctcttcttatcagattgttgcttgataatgtaaaaaaaaaatccctccaggcttttgctttgatccttcagcaactttgttaggttgtgataccctcattttagagatcaggataccaaggctcagaggtcaagtcactgctcaaaaacactcagttaattatggtagagctagtttttgaacccagatatttgcattcatacctttttctagtattttttcttttgagtaaaaccactaggcctttttttttcttaagcctgtagggtcaaaactcagtaatggctctcacattccacatatgtggctggggtttaactccagtttcaaggctttcacattcatcaccattttatcttgttagaatcacatcagtcttttagcaccaaacatttacattttaattatcagattatattttttaaactgtgtatgtatttttaaaggagctgaatatcacctggaccagtatttcagcaaaccggttcctaactggctgcatcagaaacacctgaggtgcttgcttatttatttattaatttttgtgaggtgctttttaaaaattcaagctcctaggcctcaccttttggagagtctgattcagtaggtttggaatggggccagcaccccaggtgattttgatgcacaatgagaattgggacccaatgacgtagacttactcttttcttcctacgtaggaatttatttaggcaatatctcaaatgagaayctagtttgggcttgcatatctccaatatggagaattaacttatgtcactaagtaaaacatcctattcaaggttggggtagttttagttttaagaaagctgtacttcgttacgcttccctgaactttttactgattactattcctaccttagttttcttttctcatgagtaagcatccatagctcatttaaacatwttttgtgttttcatgtgatgaagtttttagatctcctaccatctgtgttgcccttcaggaaaacacactcatgttatattttgtttggcaataattttttttttcttttgagacagagttacactctgctgcccaggctggagtacagtggcataaacacaactcactgcagcctccacctcctggcctcaaacagtcctctgcctcagcctccccagtagatgggaccacagatgcatgccaccatgctgagttaattttttattttctgtagagataggggctcgccatgttgcccaggctgatctcaaactcctgggctcaagcattcctctcgccttgccctcccaaggtgctgggattacaggcatgagccaccatgaccggycaagaaattattaaatattatatctgctatttgtaagatattgtttaagggattgagaaggatacaaaaatgagacactgaccttaatgagaatagtttattagggaaaagagagcatagaatttagcagatgttgagagggagagagaagcagctcatatgttactagagtagaagctctttttaactttgtaagattgctgggttttcatttttattttgagaatatgctgccttacctccctgtctcctcatctgttaccccttatccccagttggaaaataaatctatgaaagaaatcattgtaccctgtaacctcattatgagacagctcttgaagtcactcttagaaaggtatataacctattgcactgctatagtgattaatctgttkaatagattcccatatagatttacataggcctgaattttattctctaaaaaatattatagggttttttagtattattaaactattgtactttttcaatagttagctcttacagaaaatgtccagtgaaggtttatttaaaatatctaagaaagacaasttggttggaagacaacttgtgatttacttctgctacccagtaacctattatacagatcaagccactataaaaagaatggttgtttctaaaagcaaaatgtcaaattgagttttcattcctagaaatagggatttctaggcaagtataggcagtttcattgttctaagaattttcaaacaccactcaaaattacagacatctgtcttgaaatgtttttattgcctatatccgcatgaatgcctctggaagtctgaataataaatttagggaaggacagttttacaatgtaattgtaagaatttcttaattgtaaaagtcagttgtgcacatggttttaagagaagatttttgaaataagtgtaagtcttctgtgttagttttctggtaccatraactgggtggattaaaacaacagaaatttattcccacagatctgaaggctagaagtctgaaatcaaggtgttggccatgttttttccaaagcctttaggggagcatctttccttgcctcttccagccccagatgttccttggcttttggcaacatatctctaatatcttcctccattgtcacatggccttatctttctccctggtctctgtgtcttcttctcttagaaggacaccagtcatattggattgtggtccaccctaatgacttcattgtaattacacctgcaaagaccctgtttccaaataatgtcacatccacaggtrmtgagaattagggcttcgtatcttttgcctgcatttatagtcccagttacttgggaggctgaggcaggagtatcatttgagatcaggaattcaagaccagcctgggcaacatagtaaaaccccatctcaaacaaaatataccttttgcagggaggtcacaattcagcccataacatctttatcccatctttgacctcttttccaagaaaactgctttttaacagttacctgttctcaattcctctagaaattactcactcctgtgcatctcatrtatttaaatccctaatactggatttctcagcttcagatagtatctttcagtgcctaatgattgattataggtgatcctttttcgtcctctttccaagtttctttttttcattttgccaaaggaattttttcagaaaggatgcctgagaaataaactttcagagatattgcccatctgaaatgtccttaktttttcttcatagttcattgttggggagaaaaattctaggcactaaaggtagatatgctttcttgtctatgaatggagagagaagagaaagtcaagaggcctagctaccccatagcattcttgactttgatacttgccagttctgagcttggagcactgtagggctcctgggagctctggctcacacctcttaggcagttttcttaagttttcaggttgtggtttttctctggtgtcattgtttattatccttcttggtagactcatctgctttctgtctgttccagaaatttgttaaattatttgctttaaataatttgatatgtaattcatgctctcttattttgctgttattttagtagaattctgtgcatttccctcctcccctttctacattcttagtgcatcatcttgagcctggaagatgtcctttaagtaggatatttccacttgctgagccatgtccagggaaatctgacattctgttaattgagctagattgtctttagggggagttgatggtgcttgtttaaattcagttgcaaggaattttatattttctgactttttcagtgtacccttccttgctccctatttcatgacttttttgaagagtaccattctcttacaattatgctagctaactttttagaaaattatttggggtctggttttcagaacttcaacatgaagtctgatgttttccgaactagattttattttgctgaaataatcacacattgtgctacaaagcttttcctttgatgtcttactatacctgtttttaggtatttgaagacatgttgctcttgccaaagtgaattattactgaccaactttttatttatttattatgtcatttatgtaataatcttatagatccccaaagaaattatcttgccctcactgaactttttcattccccacagtaaatttgtaaactctaatcttcaaagcagtcacaattaatccacttgtgtaagtaaaagaattcatgttttagtgatttctcagtttaatttctatagctttatcttgtgttatttttagtttcctctctagagattcttgaacagattcttaattaccctctaaagagtattcatgttaggtagatatgaatggatctaataggaaaataaaggtacagaaaatttgggtgatttgctgcaataagttgcagttgaaacargatcatgaatttgacatgtrtatacttattccagtctctatttcagttaaaaaaatgccagtatcttatgatgataaaaaccattgcacagatttgacatctgtttctatttcacaggtaaccctgtatcatttgctaaagctgtttcaatcagacaccaatgcaatgctggggaaaaagacagtggtttcagagttctatgatgaaatggtaagaagattttataatgatagttttaaaagcatttgaagttggagaactttgaagttattgggtttttgttcattttatcccattagatatttcaagacccaacagcaatgatgcaacaattattgacaacatctcgtcagctaacattaggagcctataagcatgaaacagaatgtaagtgccatgcattcataattctgaaaaataacgtattctgtaatagtgaaagggttgtatgattcgtgccttttacactttaaaaaaatgawataggtaagttttttaggtgttaaaaaacacagtttgtattacagtggaacatgtaaaaaggatgttttaaattgttcccaagtaggcctgctttcaagaagggtgaaagacagcctcttacattcgctgaagtactgtttgtctgttttattccctaattacatttaagtatagttttttattagtcttgcttagcctatcattttctgtttactagtctttgctaacaaaatctgtgtgaagaaccttgcaaaccataattatacttttatatactgtgaactagtttatcttatatttttgctgatgtcattttacatagtttcagattaatgctcaagtgttgactacctgaatgccacattgataatcggtcatgttgtattttctctctaagctgacatggtctcagaattctgtackcattaatctgtgcatctattctcagtcatttgcaattggcatttaatatgaaatctatytgacatccctgtgttaacactgatgttactgttcagtcatttctttgattattcattcattacaatatatagtgagtaccagttaatrccaaccattgttctaggtgctagctgctgaggttagagcagtgcctgaatcagacaaaaagccctatcgtcatgggtcctacattctagtgggaggaaaacaggtattaaataaacagaacaaggaagtataaggtagtgattaagtgctatagagacaaacaaagtggggcagggagcatctttggtgggacgagatggttggagttttagatactgatatcaaaatgtcagtcaggaaatgctttctgagcatttggagacctaaaggggtaaaggagtgatctaagggaaggatattatatgtagagggagcagtgaggacaaaggccctcaggtaagtacatggctgaaaaacagcaagaagtccagtgtgactagagtagagtgaacaagaggacgaggagtgggagatgagatcagagaagttaataggggactaggtcatatagggacttgtgggtaactatgagggcttcagattattaaactgagatwtgaagtcatttgtgagttttgagcaaaggaatgacatcagatttaacttctttaaaatgtttaattttgtgggtatattgtaggtatatatatttactgggtacatgggatattttgatacaggcatacaatgtctaaaaattacatccaggaaatgagatatcgatcacctcaagcatttaccctttttgttacaaataatccaaatatactcttttagttatttttaaatgtacaattacattattattgactatagtcaccctgttgtgctatcaaatgcttaatttattcattctttctattttttgtaccaataaccatcctttacccacctacccactacccttcctaccctctggtaaccgtcattctactctgttttctgtatctcatgagtttttttttttttttgagacagagccttgctctgttggcctggctggagggcagtggcatgatctcggctcactgcaacctctgtctcccaggctcaagtgattctcctccctcagcctccctagtagctgggattacaggtgtgtaccaccacacctggctaattttttttatatttttagtagagacagggtttcaccatgttggccaagctggtctcgaactcctgacctcagktaatccacccaccttggcctcccaaagtgctaggattataggcatgagccaccacacccagcctagttgttttaatttttagctcccacaaataagtgagaatatataatgtttatctttctgtgcctggcttacttcacttaatataatgaccttaagttccatccatgttgtttggaatgacaggatttcattccttttttatggctgaatagtactctcttgtgtatatgtaccatattttctttatccattcatctgttgatggacacttgggttgctttcaaatcttggctattgtgaatagtactgcaataacataaacatggaagtgcagatatctttttgatatactgacttattttcttttggatatatacctagcagtgggattgctggatcatatagctctattttttgttttttgaggaatctccaaactgttggccatagtggttttactaatttacattcccaccaacagtatataagggttcccttttctctgcatcctcgcctgcatttgttattgcctgtcttttcgataacagccattttaacaggcatgagatgacatctcattgtagttttaatttgcatttttctgatgatcagtgatgttgagcaccttttcgtatacctgtttgccatttgtatgtcatcttttgataaatgtctattcagatcttttgcccgttttaaaatcagattcttaaggagttgttcgagctccttatatattctgattattaattctttgacagatgggtagtttgcagatattttcttccattctgtgtgttgtctcttcactttgttgtttcctttgtggtacagaagttttttaacttgatgtgatcccgttaatccatttttgccttggttgcctgtgtttatagggtattacacaagaaatctttgtccagtccagtgtcctagagagtttccccaatgttttcttttagtagtttaatagtttgagatcttagatttaagtctttaatccattttaatttgatttttgtatatggcgagagataggagtctagtttcattcttctgcatatagatatccagatttcctggcactatttattgaagagaccatttttttcctcaagtatatattcttggcacctttgtcaaaaatgagttccctgtaagtgtgtggatttgtttctgggttctctagtctgttccgttggtttatgtgtctctttttctgcaartaccatgctgttgtggttactatagctctgtagtataatttgaagtcaggtgattcctccagttttgttcyttttgcggaggataacttaggctattctggatcttttgtggttccacataaaattttaggttttgttttttttttttctatttctgtgaagaatrtcatttgtattttsatagggattgcagtgaatctgtagattgctttgggaagtatgggcattttaacaatattgattttccagttcatgaacatggaatatctttccttttctgtgtgttctcttccgtttctttcattactgttttatatttctcattgtacatatctttcacttctttggttaattcctagttatttaatttgtagctgtggtaaatgagattactttctttttttttatttaattttttagtatttattgatcattcttgggtgtttctcggagagggggatttggcaggatcataggacaatagtggagggaaggtcagcagataaacatgtgaacaaaggtctctggttttcctaggcagagggccctgctgccttcccgcagtgtttgtgtccctgggtacttgagattagggagtatgctgccttcaagcatctgtttracaaagcacatcttgcgccgcccttaatccatttaacccttacacatgtttcagagagcacggggttgggggtaaggttatggattaacagcatcccaaggcagaagaatttttcttagtacacaacaaaatggagtctcctatgtctacttctttctacacagacacagtaacaatctgatctctctttcttttccccacatttcccccttttctattcgacaaaaccgccatcgtcatcatggcccgttctcaatgagctgttaggtacacctcccagacggggtggcggccgggcagaggggctcctcacttcccagacagggtggccgggcaggggcgccmcccacctcccagacagggcggcggccgggcgggggctgccccccacctcccggacggggcagctggccgggygggggctgccccccacctcccggagggggcggctgccgggcggagacgctcctcacttccctgacggggtggctgctgggcggaggggctcctcacttcccagacggggaggctgccgggcgtaggggctcctcacttctcagacggggcggccggtcagagaygctcctcacctcccagacggggtggcggcggggcagagacactcctcagtttccagatggggtcgcggccgggcagaggcgctcttcacatctcagatggggcggcggggcagaggcgctccccacatcccagaggatgggcggccggrcagagacgctcctcacttcctagacgggatgacggccgggaagaggcgctcctcacttcccagactgggcggctggkcagaggggctcctcacatcccagacgatgggcggccaggcagagacgctcctcacttcctagayggggtggcggccgggcagaggctgtaatctyggcactttgggaggccaaggcaggcggctgggagatggaggttgtagcgagcagagatcacgccactgcactccagcctgggcaacattgagcactgagtgagcgagactccgtctgcaatcccggcacctcgggaggccaaggctggcagatcactcgcggtcaggagctggagaccagcccagccaacacggcgaaaccccgtctccaccaaaaaatacaaaaactggtsaggcgtggtggtgcgcgcctgcartcccaggcactcggcaggctgaggcaggagaatcaggcagggaggttgcagtgagccgagatggcggcagtacagtccagcctgggctcggcatcagagggagaccgcgcagagagggagggggagggggagacttctttcttgatttcattttcagattgttcactgttggcatacagagatgctactgatttttttgtatgttgattttgtatcctgcagttttactgaatttgtttatcaactcttaatagcttttttggtggagtctttaggtttttccaaatataatatcatctacaggctgggtgtggtggctcacgcctgtaatcccagcactttgggaggccaaggcagatggatcacctgaggtcaggagttcaagaccagcctggccaacatggcgaaacccttctctgctaaaactataaaaattaaccgagcatggtggcatgtgcctgtaatcccagctactcgtgtggcagaggcaggagaattgcttgaacctgggaggcggaggttgcaatgagccgagattgtgtcactgcactccagcctaggcaacagagtgagactctctctcaraataaataaataaataaataatgataatatcatctacaaacaaggctaatttgacttctgctgaattttatcagatcctttttcagcatcaattgaaatgatcatatggtttttgtccatcattctgtcgatatgaggtatcacattgatttgctcatgttgagcgattcttacatccctgggataaatcccgcttggtcacgatgaatgatctttttaaggtgttgttgaattctttttgctagtgttttgttatggatttttgcatcagtgttcatcagggatattggcctgtggttttctttttttgatgtacctttggttttggtgtctaggtaatactggcctcatagaatgagtttggaagtattattttctcaattttttggaatagtttgagtagggttggtattagttcttcttcaaatgtttggtaaaattcaacagtgaagccattgggtcctgggcttttctttgctgggagactttttactacagcttcaatcttgttgcttgttactggtctgttcaggttttggatttcttcatgattcaatcttggtaggttgtatgtgtctaggaatttatccatttcttctagattttctaatttattggcatataattgctcatagtggccactaatgatcctttgaatttctgcactgtcagttttaatgtctcctttttcatcctttgagttttctcttttttcttaatctggctaaaaatttgtcagttttgtttatcttttcagaaaaccaacttcttgtttcattgagcttgtattttttcttcatttcaattttatttatttttactctgatcttttttcctctactaactttgggtttggtttgctcttgcttttctcattttttacaatacatcgttagatattttatttgaagtttttcctctatttkgctacagacatttaaagctacacatttccctctgagtactgcttttgctgtgttgtttccattatctgtttcaataaatttttcagtttccatctgtccttccttccttcctttcctccttccctcctttctttctttctaacttttttggagctggggatctcgctgtgtttaccaggctggtcttgaactcttgtcctcaagcgatcctcccacctcagcctcccaaagtgctgggattataggtgtgagcctctgcacctgacccaatttttcaattcttaatctcttcattgacccactggtcattcagaagcatattgtttaaattccatgtgtttgtatagtttccagaattcctcttgttattgatttctaattttattccattgtagtcagagaagatacttcacattacttgcttttttaaaaaaaaatgttttatgacttgttttgtggcctaacatatggtctttatccttgagaatgatccatgaggtcaggagaagaatgtgtattctgtagccatttgatgaaatgttctgtaaatacctattaggtccatttggcctattttgcagattaagtccartggtatttttttgttgattttctgtctggatgatctgttcagtgctgaaagttggatgttgrcgatgccaggtattgttgtattggggtctatctctcttaaactctaataatatttgctttatgtatctgactgctccactgttgggtgcatatatgtttacaattgttatatcctcttgctgaattgactcctttattattatataatgaccctgtctctttttatagtttttgttgtgcaatmtgtttgtctgatgtcagtattgctactcctgctcttttttgattttgcatgcaatatctttttttttcatttgcatgcaatatctttttccatccctttattttcagtctacgtgtgtctttataggtgaagtgtgtttcctggaggcagtacatcactgggtcttgttttttcatccattcagccactctgtgtcttttgattggagactttagtccatttacattcactgatattgatatttacattcattagtattgataagtaaggacttccaccattttatttttctgattgtttgatggtcttctctttcttctttccttccttcctgttttccttttagtgaaggtgattttttctggtggtatattttaatttctttttatttttgtgtttctcttttatgtttctaggtttgagcttaccatgaagcttgcaaataatatcctataacccgttgttttaaactgatgacagcttaacactgattgcataaacaagcaagcaaaaagaaagcaataaacactttatattttaacttcatctccccacttttaactttktgttgtttctatttatatcttattgctatctatgtcttgaaaaattgtagttattatttttgatcggttcatcttttcatatttctacctaagacttgtgtagtttacaaactgcaattacaatgtaataatattctttgtttttctgtttacttgccagtgagttttgtatcttcaratgatttcacattacttattaacatgcttttctttcagattgaagaactcttcagcatttcttgtagggcagctctggtgttgatgaaatctctcagcttttgtttgggaaagcatttctccatgttcgaaggctattttcaccagatgtactattctaggacaaaaggctttttttccttcagcactttaaatgtcatgccactttctactggcctataaagtttccactgaaaagtccactaccagatgtattagagctccattgtatgttacttgtttttgtgtttatttcctcttgttgtttttaggatcctttctttatccttgagatttatgagtttgattataaactgccttgaggtagtcttctgtgtgttaaatctccttggtgttctataaccttcttgtacttgaatattgatatttttccctgaatttgggaagttctctattattatccctttgaataaactttctactcctctctctctctatctcctctttaattaaggtcaataactcttagattctacccctaccctgcctttttattttgagacaggtcctgactttgtcacccaggctggagtgcagtggcatgatcttggctcactgcaacctccaccttccgggttcaagcaatcctctcacctcagcctcctgagtagctgggacccacaggcacatgccaccactatgcccagctataattttttttttttttttttttttttttttttttggtggagatgrggttttgccatgttgcccaggctagtctcgaactcctgggctcaagcagtcctccctccttggcctcccaaagtgctgggatcataggtgtgagctgctgcacctggcctggatttccccttttctaggttattttctagaacttgtagatgtgcttcattttctcttgtctcctctcactgtgaatttgcaaatagcctctcttcaagcccactaattctttgttctgcttgatcagttctgctattaagtgactgatgcattcttccatatgtcagtggtgttttcaactccagcatttctgctcgattcttttaatttccatttatttattaaatttatgtgataggattctaaattctttatctgtgttatcttgaatttcttttgagtttcctcaaaacagctattttgagttatctttctgaaaggtcacatatctctgttagagattggtcactgatgccttatttagctcgtttggtgaggtcatgttttcctggatggtcttgatacttgttgatattcatcaatgtctgggcattgcagagttaggtttttattgtagtctttgtaatctaggtttgttgtacctgtccttgggcaggctttccaggtatttgaaggaacttaggtgttgtgatctaaatttttggtcactgcagccatatctgcattaggggataccccaaggcccagtaatgctgtggttcttgcagatttgtagggtacgactttggtggtcttggataagatccagaagaatcctctggattagcaggcagagactcttgttctcgtcccttactttctcccaaacaaacggagtttctgtttctgtgctgaactgcctagacctgaggagggatgacacaagcacccctttagccaccaccactgggactgccttaggtcagacttgaagccagcacattactgggtcttgcccaaggcccactgtaaccrctgcctggctgccacctatgtttgtgtgaggccctaaggctctataatcagcaggtgatgaagtcagccagtatcaggggaaattcagccagatatcgggtgaaattcacccccaatatttcacgtaggttctttcctattttccctaagtgccggccagtctgagaaataaagggacagagtacgaaagagagaaattttaaagctgggtgtccaggggagacatcacatgtcggcaggktccatgatgccccacaagccacaaaaccagcaagtttttattagtgattttcaaaaggggagggagtgtatgaatagggtctgggtcacagagatcacatgcttcacaaggtaayaagatatcacaaggcaaatggaggcagggtgagatcacaggaccggggcaaaactaaaattgctaatgaagttttgggcacatattgtcattgataacatcttatcaggagacagggtttgagagcaggcaaccggtctgaccraaatttattaggcaggaatttcctagtcctaataagcctgggagtgctacgggagactggggctaatttcatccctacagctgcgaccgtaaaagacagccgcccctgaagcagccatttcagaggcttaccctcagggacacattctctttctcagggatgttccttgctgagaaaaagaattcagcgatatttctgtcatttgcttttgaaagaagagaaatayggctctgttctgccyggctcaccggcagtcagagtttaaggttatctctcttgttccttgaaccaattgctgttatcctgttcttttttcaaggtgcccagatttcatattgttcaaacacacatgctctacaaacaatttgtgcagttaacgcaatcatcacagggtcctgaggtgacatacatcctcctcagcttacaaagatgacgggattaagagattaaagtaaagacaggcataggaaatcacaagggtattgattggggaagtgataagtgtccatgaaatcttcacaatttatgttcagagattgtagtaaagacaggcgtaagaaattataaaagtattaatttggggaactaatagatgtccatgaaatcttcacaatttatgttcttctgccatggcttcagccgttccctccgttcggggttcctgacttcccgcaacatctctccctttctttttatataaatgtgccatggtgatgaaggcttgttcattctcttgatttttacccaggattctttgactggtccggcacactaaaaacaagctgattaaacagagaaatgtaattccacaatttactacagtggagcccccaatagacttaatccaagtcgtggggtttaatccataaagattttctgccacctgatctaacgcctcagctccaggcacaatggataagtgagcttgagaggcttcaaaaatttgtttctttaatttagttatgtccaatgataaattatcttccctacccagaaggcgtcctttgaccatttcccatgaataatcagtctcattataggaataggggatgatacagaaatccaaagtattccagttgcactgcatttgcatgcgatgttcgagactcaccacccaatctccaagccaaataacagactgtcttaaatcattaatttgattagcttgtgtccatcccttaagggcactgagtttccctgggctgcgggtaggtccagagattctgtccaggagccagggcctggagttggaaaccttaggaataatcctggtgctctgttttactgtggctgagctggcacccargctacaagacagcatccttcccattcttccctcccctttttccaggcagatgattctttcccygtgtccaccactaccacaggcccacaaggagttctgtcagggtaccacaaatrtttacttaaggcccaagggctcttcagtcagcttgtgttgaatactgccaggcctgggactttcccttcagggcagtgggctcctcttggcctaggtaggtccagagatgccatccaagggccaaggcgtggaattggggagttggtaccaaagcttaagasaaagtcccctttactctttcctgtgtgtggaggctgtcccagtaattcagatttggtagaatggtggcttggaccagagtgatagcaatgggagaagacattagattttggacctgatttgaaaataggtacaggaggatttgctgatgttttgaataatgaggtattggagaaagaaaagcaaaggatgacttacatggttttgggcctgaggaactccaaaaaagtcattgctttttacacaggtgggaggtcttggaggaacaggtttttgcaattcagagtacagctttggcggccaggtgtgatggctcatgcctataatcgcagcacattagrggggctagcatgggaggattgcctgagcccaggacttcaagactagcctgagcaatgtagtgagaccccatctctacaaaaaaaawttttttaattttctgggtgtggtggcacattcctgtagtaccagctactcaggaggctgaggttgggggattacttgagcccaggagggcaaggctttaatgagctgttgtcatgtgactgcacgccagactgaacaatacaacaagattctgtctcaaaaaaaaaaagtgcaagtttggacatgatgggtgtgggatgtctgtaagacatgtaagttgagatgttgagaaggatgttgcaccatggcattcaaagagaggagaagtgtaggctggagacataaatttgaaagttaatacarttataaattatgagaccaaatggtatcatcaaaggagtaagtgaagatagaaaagaggtccaaagactgagagacctgggcactccaaaatttaaagattgaggagataaccagcaaagggaatgaagaacaaacagcaaatatggagggagaaaaactaggtgcatgtaatgtcctcacaggcaagtgaaaaaagtgtatcaggaactagagagtgtctcatactgctgataggtcaagtaagatgagggcccagtaattggatagagtaagatggagctccttgatgactttaacaggagcagtgtaaggagaacagtaaggtcagaagatgacttgaagtggataagagaacatcagataagataaattggagacagacactgtgggcaactctgtcttgaagcctggctgtaaagaggagcagtagtctttgaagcagtaacagaagcaagatacggggtcaagagggtattgttttcagggggaaataaactagtatatttgtaggctgaaagggagtgatgcaataaaagaagaggtagagggatggtaatgaagtggggagggaattgctgtttaacaattagtggttatagaagtgttttgtttatattttcataaaacacttgattaggacttaaaagatctgggtactaattataattttgtgacttaggtagtcattgaaaatttgtatgctttagtttctttatctgcaaaaatgttatgaacataaaacagttaagtatatgatcactttgaaaaggtgaaaagcactactgtgcttcattattgatcactctcttctttctctcataccatgaaatgtgcccattcatggcagaaaattctcttttaaaattcaagtgctcacatttttctgtttttgacaaaactatcatcatttatttatgtataacaagtagttataaataatatgttttgtgaaaaggctataaatctgtttcaatgtgttaaatcttacgtatggagctgtataaccttgggaagtttttatcaataaattaagttttctgtgtgatctttagttcattttcttaacagtaccaaatcaataaggaagaaaagtctaattccataaatggtgttggcataattggtaagcttttgggaagaaaacttaattttgatcatcacttcatagtacttaccaaaacaaattccagtttagttaaagatatttaaatgtttttttgaaaatcagccagcctgttttttgaaaaattagattactggctatcctggctaggaaggactttccaaatttaaagtgttaggaaaaatcacattaaaataaggatagactttattaagtatatttaatttctgcatttccaaaaggcaaagaagaaaagtttgcagaaaatatggcaaagaattaatgtttttttaaatgctaaaattgataaatagaaaaacctgttaaacctcagtagataaatgggcagaaggtatggacagacagatagaataagagatcaccagtaaataaaatgataaaatatctggccctgctaataattttaaaaatgcaaaccaaacagtagtgaatgactatatttgtcctattaaattagcaaaagcatttttttttcccctagagacaggttctcgctctgtcactcaggctgggttgcagtgtcatgatcgtagctcactgtagcctcaaacttgggggctcacatgatcctcctgccttggcccyctaacagtagctaggactacaggtatgtgccaccatgtctggctaattttttttttttttgtaggggcaggtttctccacctcagactcctaaagtactggtattacaggcatgaatcaccatgccagccaggaattttaaatagttgtaccgattaagagtaaactttgcactctcatgaattgttttgtgagtataaatttagctctttaggaaagctatctgggaatattaatcaaaggtctaaaaaatatgtatagttttaataatctgagggcatatgatagtcaatattkagtaataataaaatgccagacttattcagtgcttactatttgtattcttctgagtctgtacatgtataaactcacttaattctataacagctttattaggtaatatttagaaaaggaaaccgaggtataaggaggttaagaaacttgcccagggtcacacagctagttagtagtagaatcagaacttgatccctggcagtcctcagaacttaggctccaaaaatttaatagtatttttatagagagaatatttattatggagtatattggaagtttaagcactaatgatctagctttttagttgcttcttcaagaaatagtaaaaatgatagtgaacacttagtgagagcttactatgtacctgacaagcactttccatttcttaacttatttaatactctaaaataaccctaggaggaagatactatgattagcaccattttgtaggtaaaagctctagaaagatttgataacttgcccaaaattacccagtagagcctgcattttaaacccaaaatctgtccacttaactaataagttgtaaaaagcctgatagtctgtctcctaaccagtaygctsaactgactttataaaagtagtaattctttggatttgttttctcgaaattgagcttcattgggaaattaaaaacagaaacttttctttttttgtataagcatttaacacataggaagcagaacactggaacaagctaaaagaagttttaaaatgttttcccccaggatctcattgctaattaactcatgtcttcttccaaacatctagtgcccttcgcagtcttacaagttgtcaaaaataaaagtatcatgaatcaaacaacaaatctatgttatatctacagtgaatgctgtccttctgacaattgagttaatcaggtctccctggctagttttaaaactaccgcttacagctatacaggactccttgtctttatgctgcttcctgggcctgtatgcccacttcatttacctaactcctttctcattgtttaaaattcagtttagatgttactactaccaagaagccctccttcataaaactcaccctttctacttgatttgaatccagtctactcttgtcgttccctatgattacctcataacattagtgcatttttttcttacctgtttcctgcctctgtaccccagcatctaacaaagcgcatatcattcagtgtgttttttaarttgatgtggggagagagggtataggggaatacaaatttctgcatagtaaaaagcactgggaacaaagtctaaagactgacaggccatagaaaaatgtactcatgtcacaaatgactagtttcttaacatacagtagtccccctttatctggagaggacacattccaagaaccccagtggatgcctaaaactacagatagtaccaagccctatatactgttttttcctatacatatatacctatgataaagtttaatttataaattaggcacaataaaagattaacaacactaattaataaaatagaacattataacaatgaactctaataaaagttatgtaaatgtgtgctctttccccaccccaccccccaaaaaaatcttattctactttttactcacctattttcagaccgctattgacagtggctaactgtaagcatggaaaatgaaaccatggatgaggggggactactgtataaagctgtatrtagctcttacaaatcaataagaaaggccaataacccaataggaaaatgagcaaaaggaaaacagatcatttgtagaaagggagaaatgtctcaaacattataaaaaagatgagtcagccccaatagtaataagatgaatgcgaattacagaaatactgtttttaacctttcaggttaggtaagaccaaaaagttgatgcagtagggaaacagacacaatgctaatgggattataaattggtagatccttttgagttgcttgatgttcttccagaattacaagtacatatatattctrtaacagttccatttccaggaatttatcctacaaatatactaaaatgattatttacagcatacacattattgcattgtttgtaaaagaaaaaaatggagatactctgagtgtacatcaatagggggcagactaaatgaattttatttatccattcaattaggtcctctgtagtcattaaaaagaatgagacagctctgtgttatagggtgagcttccagatataatgttaagtgaaacagcaaggtgcaaaacaatgtgtatagaatgataccacttgtgttgggaagaagaagaaactgcacttgggtatatgctttgtatatcagcagactatttctgggaagatatcagagaacacaacagtgattatctctgggaagaagcactgattggtcatggcaggctggggaacaagtgtagtagaagggcatattttttcactgtctactctttaatcttttaatttgtaatcttgtgtgtactacctatgtataaaaataatttgtaaaagaatgaaaagaattacaaagtaaaatatgaattgttttgacaatcacaaaaagcaagtcaccagcaatgagcaaaataaggaaagaactcattaatattcattgaatttttttattttttttwtttttatwttttttttttgaggcagagtctcgcgctgtcgcccaggctggatggagtgcagggcgcgatctcggctcactgcaagctccgcctcctgcgttcacgccattctcccgcctcagcctcacgcgtagctgggactacaagtgctcgccacyatgcccagctaattttttgtatttttagtagagacagggttttaccgtstattgcatgttttttatgtgctagatgctttacatataattacttcatgtaatcttcgtaaatcctctgagaaatacctagttttagctgtatcgtacaaagagattgatggagccttagaaatgttagcattcggctaataaggaagcaagggtttatttgaaatcagatcttttctgtttccatagttgggtttttttcccaccaaaccatctggcttccaattagtgaccatcttttattagtgaaagtaagtataagtgtactttaatartgagcagcagttaccaaaaatgtccacaagatggaaatgttagacacaagcagatatttttctttgtaaaacatcatgctacatatccaagtggcatatttwaatagatgtgtcctgttttgcagtaacatttctttagtactttgttatagatagatagtttcagatatcacttaatgtttctcttttctcataacaatagttgatagggctttttctgtaccaggcagtattctgggtactttacataaattaatwcattaagtcttctcaacaggctgggtgtggtggctcacacctgtaatcccagctgcttgggaagctgaggtgggataatcacttgaacccgggagtgagagtttgcagtgagccaagatcacaccactgcactccagcctgggtgacagagtaagatcctgtctcaaaagttttctcaacaaataatattatgaagtatttgccattatcatttctgtttcataagtgaggaacataggtgaaatagcttacagtgtcacagctagtaagtggcagagctrggattcaaattttagcagttattgccacctatttgaaaaaaagatattggcttgtattgatagtgtgattttgtttataagtttcacctgggccgggcctggtggcttatgcctgtaatccccgcactttgggaggctaaggagggcggattgcctgagctcaggagttcgcagtcagcctgggcaacacggtgaaaccccgtctctactaaaatacaaaaaattagccgggcatggcagcatgcacctgtagtcccaactactcaggaggttgaggcaggagaattgcttgaacctgggaggcataggttgcagtgagctgagatcatgccactgctctccagcctgggcgacaagagcgagactccatctcaaaaaaaaaaaaaaaagtttcacctgtatataaatttaagaatacttgtagttaacgcttcccccccacccccacccattaagacagagtctcactctgtcgaccaggctggagtgcactagcgtcatctcagctcactgcaacctctgcctcccaagttcaagtgattctcatgcctcagccaccagagtagctgggattacaggtgtgcaccaccacgccctgctaattttgtatttttgatagagacgaggttttgctatgttggccaggttggtctcgaactcctgacctcaagtgatccacctgccttagcctcccaaagtgctgggattacagacataagccactgcgcccagtcacctctcattagctgatgtatcttgggtttgtgtgcccccttatttcaatcttaatatgtgtatggaaaaaaggacattatgtcttaaaattttaactgtgagttggtgaccagaattttatttttagttgtaggaaacatcttagatcctctcttgggaattcagacattcttcccctcccccaacctgcacccatgtttaatgttgtaattcttaagttatccacatttcatcatggaaacattgtcgtcaggaaatgccatatttattaccctgtcatatatcttaaacatgtgagaaaaatactttagtaaaagtatttgttttctttagttgcagagctygaagtgaaaaccagagaaaaattagaagctgctaagaaaaaaacaagctttgagattgcagagcttaaggagagattaaaagcaagtcgtgaaactataaattgtttaaaaaatgaaatcagaaaacttgaagaagatgaccaagcaaaagacatataaacagttctcatgagaacttggtagtaagctaaactgaaaataaggtgggcttcactggagaaatggacttactgcaaatgctgtgatgtttcttagaggaacttcatatacagctgttgaccatgaatttcttagcaataggaatttgtactatttaagcaatctttaatggaaaatatgtgtgtaagaatggatgctatataggtattttaccaacccattttaagaaaattctatgatattaagcacagtttttaaaaatgtttattgtagtatatgtatagcttattacccttttgacaggcatcaaaatttcattataaagtattacttgtacaaattttgtacttctttagtggctagaattagtgaagaaacttaatgtgtatatttaatttcttcaagttcttacctgcccccatccttttttgtatatgatgtgtccagtaagtattcaataaatgtagtttacagatcctatttctccctcctgatgtgtttcttcctctttgaagactttctggaactccctcaatacagttaaagtatctttatagtattgtgacatcacatctcttattggcactcattgtcgcatgtagaagctctttgatggtaaagattatatcttaagttttgttctgcctatatcatagtgtcattattcttcacatacaaatatattaattcttaggggccaggcatggcggcttacgcctgtaataccagcactttgggagtccaaggcaggtggatcacctgaagtcaggagttcaagactggcctggccaacatggtaaaaccccatctctactaaaaatacaaaaattagccaggcatggtggcacatgcctgtaatcccagctacttgggaagctgaggcaggagaattgcttgaacccaggaggcagaggttgcaatgagctgagatcacgccactgcactccagcctgggcggcagaatgagacttcatctcaaaaaaaaaaaaaaaattaaatctttcatagagacatatgggaagcagctgcagctgtgcattagcttcatgcactactcctaccctctcctctttagcctcttctgttcaaatccacacagcaagtcctctacttttagactcatctacttttaacattcattaatacctaatctttaaaggtatgttggctgaaccatcttggcaacctaggaacaaaaatacttttttatctgtctgccctgatggattggttactttttactttgtggctttattttttaaagttgtgacttttgcaattattatggaggatgtacaaaggcctctgtggtctgaaatttcggccagagccctctggggcttgatggtggtactttcaattgtgccaggcatcattcattttctctgcaccttttatccccatgcctacctgccaggcttatcatgataagatttcccaagtatcgcatagggcctggggatagatcaggaaaataacatgagggaaaagccccattctacttgaggagttggcacaggcaatcattattctagtcagctgcccacgaatgtattggttcaaatgtattggttcataaaactaaagtccatgtaggtaggtctgacttcatgcatgcatacaagggttcaaaatatgtggtcatggctcaatcttactctctattggctcttatttctttgttggctttaatcttggtaggatttcactgtgacattgcaaagaactcctgtaactcaataaaaatttttttaatgggcaaaggatttgaacagagatttctccaaggaaggtatcaaaatggtcaataagcatatgaggagatgctctgcatcattcatcattaggaaaatgtgaagtgtatcgcatttcacttcacatccaccattgtggctataattttaaacaaaatacccaaaaaagttgatgaggctatagaaaaattggaaccctcatatattgctggtaggaatgtaaaatggttcagccactttggaaaacagcttggcaattcttcaaaaagttaagcataattatccaatgacacaacaattccactcctagatatatacccaagagaaatgaaaacatgttcacacaaaaacttgtacatcaatgttcatagcatcatgcatgactgccaaaaaggaaacaattcaaaatgtccatcaactaatgaatgcattttttaaatgtggtatctccatatgatagattttcccattcttttataagtggaaagagaatatttcccaagggataatttcttcatctagacaataagaagaattaaagaaactcagctaattaggcagctcacttcttgaaagaagatcaaagtattagtttcattttttctaaccaatgtaggtgtttggtgctgttattcatattttacagataggagattaaggaactatagcttggtgttgagtcaaccagcagtgactcagatgagtaatctgctatgggcttttctgtctcattaatacttaattctcatgttcaaagtgttagcatttttaattgtctgttgctcatgcctaaatacttctcaaacctccttcctttaactaattgtagtaacttaatactatatcaaatatgaacatcaggtagcataaatgcaaaacactgtagataaaaatcttgctagccattaataacatgtaagaaaattctagtattaattttgttggatggaatactaaagcatagatatttgaaatctctagaaaacatttcaggtacctgttccttagcattacccctaatgtcttcagttttgttttgttttgttttttaataataatagatttcaaactcttgagatcaaaaccaaagaaaatgactgggcatggtggctcacgcctgtagtcccaacactttgtggggctgaggatctcttgagggcaggagtttgaaactagcctaggtcacatagtgagacctggtctctacaaaaaaaaccaaacaaacaaaagacacaaacaacagaaaaattggccaggtgtggtggcatccacctgtagtcctagctgctcaggaggctgaggcaggaggattgcttgagcccaagagtttgagactacagtgagctatgtgtgggccactgcattgcagcctggtgacagagcaagaccttgtctcttttaaaaaaagaaagaaaatgagatcatacaagtaccagctaggaaaaaaaaaagagtaaattgcttcccctcaacccagcccctgccaacaattgataaagaaaagaaaaaaaaaaaaggtaaatattattttcttggagttggaaagtacaatgcaaaacccagaaatcataaagttttggatctcaaatttgaatgagtttaggaatctcttgagagttgctaaatctggggaaaggggatggtagggggagtagaaatacagatgaaacaagattggctgttgctaattattaaagcttgataataggtacatgggaatttattgttttctgaactctcgtgtgtgcttgagatttttcataaaaaggtttttaataatgtcagagaaaatcattttttctccctgaagtcaactgatgaagaataagtcaatcttatcttgatcttactggatcagcacactgtctcacaagatgacagtagcttccaattgcatggttagcatgtttacttgtatgttttattttaataattctagcaaattcttcagtactgatcattgaatgtaatagaagtttggaagaatggatgggagggaggaaaaaacaaagggggcagttaggaaaggagaaagaaaaccccttagggagcttcttaatagttcagagtacaatagtaaagacatttgattaggtctagaatggagcccaggaatttgcatttgcacaaggcatccaggtgatttgagaaatggcataatggcacaactgcacaaattgtattacataaaatgcaacccttctaaatggagacaaaaaataaaaatagcctaaaggaaaagtgggacatatatgtgtctaaagctttaagattaaaagaattattatgaatcattaaggaaaacaaatgaaccactggcaaaaggagcaaaagacttgaataggcagttcactgaagaggacataaaaataaccaattttatgcttcgtctcactaaatcttaagaatatgcatatttaaatagcaaatatttctcatccatgtaggatgagataaatggtacagataaactgataacagagaagacatcactgatgataccaacagagagaccagaaacaggccatctggaagatggagatagtgtgtttgtttgtttgtttgtttgtttgtttgtggtagagtctcactctgttgcccaagctggaacactgcagccttgacctttctggctcaggtgatcctcccaactcaagctcctcaaactataggccttcaccaccatgcccagctaatttttgtatattttgtagaatttcgccatagtcttgaactcctgggctcaagcaatcggcccaccttggcctcccaaaatgctgcgattacaggcatgagccaccatgcctagcttgagatagagtatcattttttatctgaaattcaaatttaactaaacatactatacttttatttgctaactctactttttaaattttagatttaaaaaaagcaaagcaaaacaaaaaaagacagtgatagcaagtgaggaaacagctaccctcatacaatgatgggattataaattagttcaatgttttcagaggataatttaggaatatctgctaaaagactgactcaacagtttcacttttaaaattcacacttgtttacttttttattgaaagcaagtagagttttaggaatatattatttattttcacagaaggaagaagggaaaaggaaaaaaataagaaaaaatgtattacttacaaaccatttatccaaatatgcaagatatgtacaagaattttcattacagcattatttacaataaaaaatagaaaaaaaaatggaagcaaggcaaatgtctatcaatagaagctgtataaatatgatatatcatgatacaatggaatcctctgtggttgtcaaaatgaataaagcagatctatgctggtttgttggtgggggagggaaagcagtttgaaaaacagtgtttatgatttaatttttataagtaatatgttagtaagcaaagaaaagtaacttggaggaatgaatcatcaccaaacttaacaggaagaattttagggactgtaactatcttcattatgtatctaaatatttagctttttaaaaaataagaatgtatttcatttgagtgaaagagaataaaaatagtttaaaaattaaatgaaaaggaaaaacagatgtcttgattaacagaacattgcctcctatgatgaagtatcatgtgacagttcaaagaaattaaacatgacctgtaaatgatgtaagggaccagggccaggactccttcaggaactttactgaagggacttacgggtaaggtccttgctcttcagtgcattgtccggtgaactcggataaataacattatggtcctaatgtaaaaataggcagttaaaggtatgagtttcatctatctcctgccccagcctggactctctgatctggcttttaaattatttttagttatttttacttaagataaattttaaccaattgaccacctagatttcagtaaccttatgtaatacgcctcatgtcaatccccaactctaggtagccctcctggatctccaccctaatctgtttactctttctcactttcactggctatcctgagttaactgttctctaccctcaacacggcttcattgctctttagtaattccttagtctacccttagtaaattctttattgttgctgtctgaaaatttccagtctactgaatcaccagtctgcttattcactaaatgaatagagtcataaagctgggagctaatcatctaacttaattccctcatttgataagggagtagagccatgaagaaattaaatgactttcagagtcacacaatctgttgggacagagattcaattttaattcagcatttcctgactgaacagtcatggtacagctcccccaaagcttagaggagagtgtgcaaactggaaatcaactgggaaacaaactttccaagaaagaagaaatctgtaagctgaggtttactgttactgttatagtccaatccctattattaaaattttggctcattctggttaaatcatgttctcatgattaatgagttaaatctggttaactcatgttctcaaaattaatgagaacatgagttaatctggttaagtcatgttctcaaaattaatgagaattgtcactcctatttggtttaattacattcatgaattgaaaccatgaacctatttactcttattttgcacatcagcagatgacctcagttcttacatcattgagatcactgatgctattcaaattgattctgtaaacttccatccatacaaagtttctctttgttctcaccaaatcctgctttctttcatctccctaaat

SEQ ID NO: 97801 - DNA, 25041 bp, Homo sapiens
tgaagctggaaaccatcattctgagcaaactatcgcaaggacagaaaaccaaacaccgcatgttctcactcataagtcggaactgagcaataagaacaactggacacaggatggggagcatcacacactggggcctgtcatggggtagggggagggaggagggttagcattaggagatatacctaatgtaaatgacgagttaatgggtgcagcacaccaacatggcacaagtatacatatgtaacaaacctgcgtgttgtgcacatgtatcctagaacttaaagtaaaattttaaaaaatgcagtttcgagctcggggttaagatggtaaactagaagcaactcatgtgccaggctatcacggaaaggaaacaaaagggctagtgagcattgaccctgcaggccaatcatctgagaaatcatgtcagggattcgggatccttcaagatgtaaggggattacagagagcagaaaggggtgaagctagataccagcctgtccgggctcagcgtggatccaggagaatttctccaacactggaaagggtgagtgagtgagaaccccctaggggattcacactctcgacagggacctgtgcaagactggaaatgggagaatgcccctgaaacccctgcccacccccgaccccaccaccgtgcttctagactgaggcagagagccccccagacattttggagggcaactctctagtccaaggagacttctgcaagccttgtgcccccaagaagaccagcactggtgccatagcccaataaaggctgcagtcccagtgcctaggagcagtaagattgccccatctcaaaccctttctggatggggcttggtgccagcttccagcctactggtcctacttctctgtctgaactcagccagtgaccatagcctcctgttctcccaggaagcacctggagggcaagacaggtgactacatctacccctgccactggttgccaggcaggcaacacttgctagagcttccatcccagtggttccacttctgtctgaattcagccagagagcacagcctcctgttgtcctgggaaacattcaggcaaggtaggcaaccccacctaccctggcctcttgtagccaggcaagccatgcctgctagagcttccaatttatgtcccacagccaaattctcatttcccattcctttataaaattcttgtttctgttggttcaacatacacaaatcaataaatgtgattcaccacataagcagaacttaaaactgaaaccacgtgatcatctcaatagatacagaaaaggcttttgataaaattcaacatccattaatgttaaaaatcctcaacaaactagatattgaaggaacatacctccagataataagagccatctatgataaacccaaggtcaacatcatactgaatgggcgaaagctgaaagatttccccttgagaactggaaaaatacagggatgcccactcttagcactcctattcaacagagtactgctagcatgagcaagcaggcaagagaatgaaataaaaggcacctagataggaagagaggaagtcaaactatctatctttgcagacaatttgattgcatacctagaaaacccccacgtctctacccaaaagctcgtaggtctaataaacagcttcagcaaagttccaggatacaaaatcaacatacaaaaatgagtagcattcctatacactaacaaaatccaagccgagagccaaatcaggaagacaatcccattcacaatagccacaaaaagaataaaatacctagaaatacagctaacgcaggaggtgaaagatctctacaatgagaattacaaaacattgttcaaagaaatcagagatgacacaaacaaatggaaatgctcatggataggaagaatcgatattgctaaaatggccatactacccaaagcaatttacaaattcaatgctattcctaacaagctaccaatgacagtcttcatagaattagaaaaacctattttaaaattcctatagaacaaaaagtgctcaaatacccaaagcaatcctaagcaaaaagaacaaagctggaggcatcatgttacctgactttgaactatactataaggctacagtaaccaaaatagcatggtactggtacaaaaacagacacatagaccaatagaacagaatagagagcccatgttacctgactttgaactatactacaaggctatagtaaccaaaatgcatggtactggtacaaaaacagacacatagaccaatggaacagaatagagagcccaaacttaagggcacacacctacagccatctgatcttcaacaaagctgacaagaacaagcaatggggaaatgattccctgttcaataaagggtgctgggataactggctagccatatatagaagactgaaattggaccccttccttacatcatatatggaaatcaactcaagatggatgaaatgtaaaacctaaaaatattaaaaccctggaagataacctaggaaatacgattctcaacatagaaaccagcaaagatttcatgatgaagacaccaaaagcaactacgacaaaaccaaaaattgacaaacgggacctaattaaactaaagagcttctgatagcaaaagaaactatcaacagagtaaacaagcaactgacagatgggagaaaatatctgcaaactatgcataaccaaaggtctaatattgagaatctataagaaacttaagcaaattaacaagcaaaaaagcaaacagctccattaaaaagtgggcaaaggacatgaacagacactttttaaaagaagacatgcatgcggccaataagaatatgaaaaaatatgtggtgtttggttttctgtcctttgtgatattttgctgaaaatgatggtttccagcttcatccatgtccctgcaaaggacacaactcatccttttttatggatgcattgtattccatggtgcatatgtgccacattttctttacccagtctattgggttggttccaagtctttgctattgcaaatagtgccgcaataaacatatgaaccaacatggcacatgtatacctatgtaacaaacctgcacattgtgcacatgtacccaagaaattaaagtataataataaaaaaagaaaataaatttcttccttcagataccctaaaaaaaagaatatgaaaaaatactcaatatcattaatcattagaaaaatgcaaatcaaaaccacaatgagatatcatgtcataccagtcagaatgactattattaaaaagtcaacaaaaataacagatgctggtgaggttacagagaaaagggaacacttacaaactgctggtgagaatgtaaattagttcagtcactatggaaagcaatgtggtaatttctcaaagaacttaaaatagaagtaccattcaacccagcaatcctattattgggtacatacccaaaggaatataaatcattctgccataaagacacatgttcaagtatgttcatcatagcactattcacaatagcaaagacatggactcaacctaaatgcccatcaacagaagacaggataagggaaatgtggtacatatacaccatggactactatgcagccacaaaaaaaagaatatcatgtcctttgcagtaatgtgaatggaactggaggccattatcctaagtaaactaatgcaggaagagaaaaccaaatactgcatgttctcacttataagtgggaactgaacattatggacacaaagaggggaacaacagacactggggcctacttgagggtaaagaatgggtgaagagagaggactgaaaaactacctatcatgtactatgcttatgagtggggtgactaaataatctgtacactaaagcctcatgacatgcaatttacctaaataacaaacctgtacgtgtatacctgcacataaaatataagttaaaaaaaaacctacaatgagatatgatcttaccctggttaaaattgcttttatccaaaagacaggcaataacaaatgctggcaaggatgtggaaaaaaggaaactcttgtacactgttggtgggaatgtaaactattataactactatggataacagttcggaggttcctcaaaagactaaaaatagaactaccatatgatccagtaatcccactgccaggaatacatcaaaaagaaaggaaatcagtacatcaaagagatatctgcactcccatgtttattgcagcactattcacaatagccaagatttggaagcaacctaagtgtccatcagcagaagaatggatacagaaaatgtggtacatttacacaacggagtgctctttagccataaaaagaatgagatcctgtcatttgcaacaacatggatagaagtggaggtcattataagtgaattaagccaggcacagaaagacaaattttacatattctcacttgtttgtggaagctaaaaatattaagacaattgaacttatggagatagagattagaatgatgattactagaggctgggaagagtagtagcgggggaagtggggatggttaatgggtacaaaaatatacttagatagaattaataagatctagtgtttgttagaacaagaggatgactatagtcaacaatagtttattgcacatttcaaaataactaaaagagtataattggattgtttgtaatacaaagaataaatgcttgaagtcatttaccctgatgtgattattactcattgtatgctcgcatcaaatatctcatgtaccccataaatatatatatctactatgtgtccacaaaaaatttttaaaaataataagaattggcttaaaaaatgctgtttcctgggccccaccctagactgatggtcagatacctaatgttgacaaaaaaagtcaaactctgtaaaacatttgaagagatttattctaagccaaatatgaatgacctatggcctgtgacacagccctcaggagatcctgagaacatgtgccaggccacaacttggttttatacattttagggagacataaggcatcaatcaatacatgtaaggtgtacattggctaggtccagaaaggtgggacaattggaaacagggaagcggggcagcttccaagtcataggcagattcaaagattttctgattgacaatttgttgaaagagttattatcaatagaaaggaatgtttggagacatccaatagaaattcaatagacaatcattagaaaggaatgtctgggtcgtggagaccaaggttttattatgcagatgaagcctccaagtagcaggcttcagagagaataggttgtaaatgtttcttaatacacttaaaaagagcatgttctggctgggtgcagtggctcatgcctgtaatcccagcactttgggaggccaaggtggttggatcacctgctatcaggagttcaagaccagcctgaccaacatggcgaaacctcgtctctactaaaaatacaaatattagccgggcatggtggtgggtgcctgtaatcccagctactcgggaggctgaggcaagagaatcacttgaacccaggaggcagaggttgcagtgagacgcaatcatgccactgcattccagcctgggcaacagagtaagactctgtctcaaaaaaaaacaaaaacaaaaacaaaaaaagagtgtgttctattagtaattccaaaaggaaaaaggatgtaatgaggcatatccagcttccccttcacatcagttttcaggttaactttggaatgcccttggccaaaagcaggggtccagtcacatggttggtgagtatggccttagaatttaattttttggtttacattaggaatgcttccacattctctcaaacaaattttagtcacagttttgaataacgtactctggctcagccattgcaggtctcaagccgttaggtttcattttcctcctcccaacgattttaaattagtttcactttccagtttcctcttccttcccctaaaagcaattactcaaaaacggagaaaacatcagctgatgcgtgccctactctcccacccctttatrtagttccttcagtatttacttgaggcagacaggaagacttctgaagaacaaatcagcctggtcaccagcttttcgsaacagcagagacacagagggcagtcatgaggtcagtgaaataagaatgcataatcatgcttgtttttgagtgcaaattgtaagttgagtttcttactgtgcaggcacattcctgaattgtcctgatgtttatagattcaatatgtctttatcagtctgagcatttgtaagatgtttgaggggtttttccctgtggctttttttggtgtacacacaggcttcttaartttctggaatggttccctacggaactacatggsgggaggcagggtggggaatgcatcagctcatgtttcctccctgtgtgcagctatttcctgcaatgagaggaaggcttggcaggagcggtgtatttcactcagccacaaacttggctgattcaagggtagacctaagggaattactcttttgggtttttctgttattgtcattttgtttgaaaagattaagtcacaggctttttttcttgtaattttaaaaggaggaatttattttcaacagatattgtgaaagatacaatcagtactgcaaacccactcatgaagaaggcaattttgccctgaaacgttgcattactttaaggtgggaagtggaagaaacaattcttacaaatgggcatttttgtcatttcttatataaaaacaaacccaaagcttagcatttatttttattgatgtagtgaatgctggtcagcagcaaaaaaagaatttctcctcaaaagtgtaatgacctaatctattatctaaaactagtctaatctctaatggtgggaagcagatcagtggttgcctggagatggtggggattgagtaggaaggctcccaaaagaatctttttagaatcataggaatagtctatagggaggtagtgatggtggctacatatgcataaacatttaccaaaactcatcagactatacactgaaaatgggtgcatcttattgtatataaagcataatctcagtaaacttgatttttaaatttatatattgwcctcctggagttcttcaggggatagcatgttagggagaactaagagaaaaggatgcctttcccaccaagcatctctaggaaaggagtgaggaggtgattgccagggagggaagaccccatcgaccattcaggggggcagaaaaggaaaactggattccctaccttactctgccccaaggacttgaagatgctctgcaatgtcatgtttggggatgagatgggtaagaggaattcactgccaaatacctcagtatatagaatacccttttatatagaataagttcctggtcaagagtgatgttaattgtgtctgtgtgagtgggattgaccagagagcaaggcgtcttagtagccagcttgcaggaaaggttttacagggtcctgtctttaggtgtgtctatagccactgacctgaggaggtctgaggggggctctctgaactatgctggactcaggttcacatcaaggtgctcctatttccagaggctataggaacaggaagagattgggctgctcctccccagttgtgctaaaaatttccaaatgggaaaatcacctggagaactcactggcacgtgccagctgatgggcatcctcctctgccccatccactgaggaactctgttgctccctttacacactcacaaattcacttaaaattataacacaaatatattagtaccagcaatcatggtggtaacatttctttgtgatctgtagttagtggtttcatgcaagtccgtgtgaagagaccaccaaacaggctttgtgtgagcaacaaggctgtttatttcacctgggtgcaggtgggctgagtccgaaaagaaagtcagggaagggagataggggtggggccrttttataagatttgggtaggtaaaggaaaattactgtcaaaggggggttgttctctggtgggcaggtgtgggggtcacaaggtgctcagtaggggagcttttgagccaggatgagccaggagaaggaatttcacaagataatgtcatcggttaaggcaggaacaggccattttcacttcttttgtggtggaatgtcatcagttaaggcaggaactggccatctggatgtgtacatgcaggtcacaggatatgatggcttagcttgggctcagaggcctgacaagtgggcactgtgttaaacacgttttacgcatgacctcatatcacccttccaacagccctaggaagtaagagctattatttctattattagcctcattttctagatgaccaaaatggggcttagaagggcaaattacttgcccaagacatcagatagagagcaggtgtcagagcagagtcattaatggaggcaccaaactctactgctgatcatctgactctatgcccaatggccaaaaggtgaaagatcttaatgctttcaactatgctcactttagagagggggccagggatgggcttcctatctggagagtaagggccagcctttgatggttacccatgccttagagtggccaaagccacaagaactgaacccagatcttggagaagggtgaaagtggttctccccagggcataattttctatcatttggatgaagggaaaaggaaattcatcctagggcattttaaggataagggaatgaggctcagtgatatgactcaagaaatatcccagaactaagcaaagaggtcactgaaatccaggtgtcctgtggttttcttcccttcactcaagatgcctgataatgctgcttaattcaccacattagctccayaaataaaggggaaaactgctttttaaaatacctctatgacagcacttctcaaaatgtggtacaggaactcctgcactgaatttccaaggcacttgtgaaaacacaggtttctaagctcacatcagattcactgcaccagaatctctgggagtaggacygcatagtcagtactgtcaatatacaataatcagaaggctcaggatccagttaaaagagtttattcaacaaaaagttgagggcagcagtcccaggagtagagctgcacccaagaatggtgaacagtacttccagtgtagagaaaaatgaggactgtttacataggcaaagacagaggtgttcaacagaatgacaacttctcttgttgttgttgtttttgttgttgctgttgttgtttttgagacagagtctcactctgtcacccaggctggagtgcagtggcccgatcatggctcactgcagcctcagactcctgggctcaagggattctccyacccagcctcccaagtagctgggactataggagcacgccactatgcctggttaatttttttgtattttagtagcaatggggttttgccatgttggtcaggttggtcttgaactcctgaccttaagtgatgcacccaccttggcctcccaaagtgctgagattacaggcgtgagcctccgtgcctggccaacattttccatacagaggctaacatacagatatacaatttgattggctactattgattacagtccaagggaattgcttaatattcttttgtaaagaggtaacatggctggccgcagtggctcacacccataagcccaacactttgggaggccgaggagggcagatgcttgagctcaggagttgragaccagcctgggcaacatagtgagaccccgtctgtactaaaaatacaaaaatcagccaggcgtggtggcaygtgcctatagtctcatygactggagaggctgagatgggaggatcgcttgagcctgggaggcagaggttgcagtaagctgagatcgtgctactgcactccagcctggatgacagagtgagatcctgtctcaaaaaaaaaaaaaaaaaaaaaagtaacaatcaaaagggtctctatttccataacatgaggtctacgttttaataaagactaggttgtctgaggccgggcacggtggtgcaaggctataatcccagcactttgggaggccaaggcgggcagatcatgaggtcaggagttcgagaccagcctgaccaacatggtgaaaccccgcctctactaaaaatacaaaaattatccaggcatggtggtgcacgcctgtaatcccagctactcaggaggctgaggcaggagaatcacttgaacccgagaggcagaaattgcagtgagactagggagtctggttaacatgtaacccctcaccacacaggtcaaagagcaacagtcatgcacctgagaaaaaaaacagtcacgttacgtgagtcagttttcagggcttaactttgcctcttgacataacacatttggaagcttctaaaattttattttctttttacagtgcctttttacaactttcaaaccacagttttccaaatctgtctggaacatgttcctggcgtgagtgagctcagttctcacagattstgtttcagtttcccctcaagagggatcttgatagggttccawcagtttcactttcctttcccctttcataaaagcacagacctaacagyaccctgggtggaaacctcttcagcatttgcttggaatcagtaagctaaaaacaaaatcaaccgggaccccagcttttcagaactgcagggaaacagccatcatgaggtaaatagtccctgcttctctgataggaaacagaatttcttatgtacaacttcctgacttatgctatttcagtgtttgcttagagatgaaatatrcatttatctaattcaagcataaatctgccttaccaattcatgcatttttatttctgtagctctttgtgatgtatagagwtaggcagccaaaggacacagggaaatgggagctgggagctgggaagggwcggggcatattgagagatcctagagagcccatgctcagatsctttcaggtaaaatcgggccagtgaaagctggggcctggagggaagttactggaggtyctggttcgtcttttgtttcttatatttagaaagcctaagtcagaggtttgtggttttgttgtgactgtggttatttttaaaccatgcttgcttctcagcaaatgtgtcaataattaattcagcactgcaaaattccaatttatrttgaggtcacttttaccttgaaatgcactttttcataattgggggatatgtctacttgagttgtcctctagcaggtctagtgacctgctaagcctcccacgtgatcaatgaacagggagaaggtgttgcttgcagtctctcaaactgtgttctgcgagtggcctgaatcatatcaacctgagtcttctaatagaatgcaaatttctaggtcctgcattctgaaatcctgattgagtaaaacagaaataaggtccagaaacaaacatatatttaaagaggaccacaagtacttcataggcatactgaatggcttacagaagaaatgtccatctccaaatcctctcttccttaaatgcatacaaggcttcctgcattgtatgtgtgtaaatgtgaaggaggaaaccccaagaggcaggaggggggaggggtgggaagaatgttgaaataaagcaaagcttgtttctgggcacagtggctaagcctgtaatcccagcactttgggaggctgaggcaagaggattgcttgagcccaggggctccagaccagaattggcaacaaagtgagacctacaaaaaaacaaaaataaaataaaaataaagcaaagtttgactgtttaaagggtaatttaagtatgagaaactggtgattggaaatcactgccaaaaagggaagtcttcccagagccttgctgctcacagtgtggtctgaagctgagatcccccgggaggttgtaagaaaggtaacatcccagcttatctgaatccagatctgcattttaaaaagatctccagatgtttgtgtccatatgtacattaaaggttgagaagtccggctctggagagttccttcacttgctttctgaagtgatggactccttggattgggcctgttctgaccaaccaactgagcacaggtctgccagttccttcacgtagtcagttggagcataaccagcacatgctggggacaagctgcacatgtgcagacaagagtggggaaatccccactcttaccacttcaagaaagccactttctgaaaatttcaagattctactctagtaatagctttgactgggaaggagatgtggtatctaccctggagtctgtgggcaagacaggtggtcatgatctgggttaggtgagagactgtaactatgttgattctggggatttcctaaggactagcagcactagctttaactgctttagtaagcgaaatcttatgtctgcaatccgaggtcatgggaaatctctttctggacctgagggaatcctatctccctaaggtcttctactagatgcagatccaggtaggactggcattctactccccaagtttcacctgaacctagctattctgttttttcttctttttcttttattctttttttttttttttttttttttttttttttttgagacggagttttgctctttcgcccaggctggagtgtagtggcccgatcttggctcactgcaacctccgccttccggtttcaagcaattctgcctcggcttcccgagtagctgggattacaggcgcctgccaccacgcccggctaatttttgtgtttttagtacaggcggggtttcatcatgttggccaggctagtctcgaactcttgacctcatgatccacccgcctcagcctcccaaaatgctgggattacaggtgtgagccaccgcgcccggccacctagctgttctttatcaagtgactgtagtcatcatcccacctgcctgcttgtatttatttaaatatctgcattaattactgttaactaacttatttatacatataagaagtattcagagtaactttcaaaaacacatatgagataaattattaagtgaggaaaccttggcaattggagtatttgttttaagagggcaatagtattataatgaaaacctcctgacctgtggctctggggttcatgtttcttcttatcgaggtctcaggccttccagtccaatatattttgctccaaattttacttcaaggagagatcaagtatcaaatacctcatcaaattggagactttagggagtaaggcttaggaaaaatcaagagaatcaagggacccaattttcagtgggttttataatcataaagccacatgagtagttgactatcttcctgaataaattgttccatgttatcattaaatgtctcagcctggccagctctcgcattggtaaagcattggtggggatggaatatccctgagagatccatattcagagctctttcacaagtccagaaatgttcagtgtgcttttctgcttgtccaacactttcttgagcaattgatatcttctgaagctgacacatgacagggtggaagtatgtttcatctcagagggagaatcttgagctataagtgcttaaaatttagtttggtaagatccctggtgcattgatatgtcaaagccttctgccctccaaaaaaaaaaaaaaragagagagagatagtgtcatcagacttgcaaggtggtttccggtttcgttgaggcaaatacatccaacaatacatccaacatcacctgtcatcctgcaggtccactggatactctctattaattactagagtgttcagctatttttttcaggcacccatatgtacctacaaatctgcagatacattctattgatctgagactcacactttctccttttaaccttcctaattcacacatcagcaaagttaactcatgtttccatgactttattatgatttagtggcataacagatataagcagagttgttcaattatcatcgttataacttacttttggtattcattttttaaataattgctaacttgacttttgacttgtagtccttcatacagggtagttagaatacccaggtaaagccaaattgaaaacccctagggccaggtgtggtggttcacacctgtaatcccaacactttggtatgtcgaggcagaaggattgcttgagaccaggagtttgagaccactctgggcaatatagtgagaccctgtctctgcaaaaaaaggaaggaagggaggaaagaaggaaaatagggagggaggaagggagggagggagggaaggaaggaaggaagggaggaaagaaggaaaatagggagggaggaagagagggagggagggaaagaaggaaggaagaaaggaaggaccctataatagacagggaagatattgacactggaaccctagacagggaccaagaaaaggaaaaggactgtccccaaatcaaagcacacacataaagaggctagccggatgtagatggcaacttccctcctcactcccattgcccttgagttgattctgcatctctcactataaagcatttcatgtgcaatcatattgggccaaaaatggtttagatcagcattactggagagacagacaggaagtataatagatcagtacacttgcagtagcggtgtgagggccagtgctcgtccatggtaaattgcaaataaagtcaatggctccttgtagaacaaaatgcattcaatttaaagaattttgtttattctgagattactttttcagtggcaaggaaaattctttcttttctatcttttaaaataaaatattggtcagaatagatggttggtatcttttcagatacattagcagccctatttggttcataactttttttctgaaattgtgcttgtctgtgaaatccaaaaataaggacacttggtttaatgatttctggaggttctttccaatcttatggtgccgtgactccactggtaagaaggaagaagcacaaactcaagagtgagggacatacagcccaagccccaggcaaatgtagataatgggaacacacttagagaactcttgcaatttatccagctaaataaggcaagtgatctcctttagtatcttccaactacaaaacaaaaatgagtccattttgtttgtttgttgcaacaaattcattctgtctgggaatctggcctgtgtggtggggagactacttcagtcagactcaagctgagcctccgtgggtctgtttgtaagtggtggaaaagatgaagggaaaaatacctaaatcacataacatgttggcagacatatctgggcttttatttctttacatgtctcctaacaaaactgaaagcacctggcgggcagagaaggttgggataatctctatttttcttagtatccataatatctaataaagtgacaaaaagaggtascccaataaagagtcatgggatagctaaacaaaccttacccagaatgtacaaggaatgagaactgacttggtattttttaatttttattcttacttttattttttttgaggcagggtcccactctatcaccctggctggagtgtaatggtgtgatctcagctcactacaacttttgcctcctgggctcaagtgatcctcctgtctcagcctcccgaatggcgaggactacaggcatgtactaccatccctggctaatttttgtatttttagtagaggcaggctttcgccatgttgcccaggctggtcttgaatcctgggctcaggtgatccacccgccttggcctcccaaagtgctaggactacaggcatgagtcaccattcctggctgacttggtaattgagcagcgtgagagagatctcatttcctgtcactgaagctgcctcctcttacccatcttacctcacctcctgcatatctgcttacacggtgtaagggatgtgctttgtgggtgtctgcacagactgtagctaaagaaaagtgaatgtaggaagcaacttacaatttttccaaccttgtgatggtacaaaagtgataattccattcttgtttttcacttaaaatacagtattcaataagttacatgagatactcaacactttagtataaaataggctttgtgttaggtgactttgccccactgtaggctaatgtaagggttctgagcacatttaagctaggctaagctatggtaggttagatgtattaaatgcatctttttatttacaatgttttcaatttatgatgggtttatcaggatataaccccatcataagtcaaggaacatctatatataaagagatttattatgaggaattggctcacctgattatggagactggcaagtcccataatctgttgtctgcaagctggagaccaagraaagttgatggtgtagtcccagtccaagtctaaaagtctgagaaccaggtaagccaatggtgaaagttctagtccaagtctagtctaagggcagaaaaagaccaatgtcctagctcaagcagtcggtcagagggagaattctcccttcctctgcctttttgttctattaaggccctcaacagaatggataaygcccacccatactggggagagcaatctgctctactcagtccaccaattcacatgttcatgtcttccagaaacaacctcacatacatacccagaaataatgttggaccaaatatctgggcatcctgtggcccagttcaattgacatataaaattaatgatcacagggtgcagtgcttggcagtgtacatcacagtgaccatgtttattttctccacagtgaggtcaccaagaattccctggagaaaatccttccacagctgaaatgccatttcacctggaacttattcaaggaagacagtgtctcaagggatctagaagatagagtgtgtaaccagattgaatttttaaacactgagttcaaagctacaatgtacaacttgttggcctacataaaacacctagatggtaacaacgaggcagccctggaatgcttacggcaagctgaagagttaatccagcaagaacatgctgaccaagcagaaatcagaagtctagtcacttggggaaactacgcctgggtytactatcacttgggcagaytctcagatgctcagatttatgtagataaggtgaaacaaacctgcaagaaattttcaaatccatacagtattgagtattctgaacttgactgtgaggaagggtggacacaactgaartgtggaagaaatgaaagggcraaggtgtgttttgagaargctctggaagaaaagcccaacaacccagaattctcctctggactggcaattgcgatgtaccatctggataatcacccagagaaacagttctctactgatgttttgaagcaggccattgagctgagtcctgataaccaatacgtcaaggttctcttgggcctgaaactgcagaagatgaataaagaagctgaaggagagcagtttgttgaagaagccttggaaaagtctccttgccaaacagatgtcctccgcagtgcagccaaattttacagaagaaaaggtgacctagacaaagctattgaactgtttcaacgggtgttggaatccacaccaaacaatggctacctctatcaccagattgggtgctgctacaaggcaaaagtaagacaaatgcagaatacaggagaatctgaagctagtggaaataaagagatgattgaagcactaaagcaatatgctatggactattcgaataaagctcttgagaagggactgaatcctctgaatgcatactccgatctcgctgagttcctggagacrgaatgttatcagacaccattcaataaggaagtccctgatgctgaaaagcaacaatcccatcagcgctactgcaaccttcagaaatataatgggaagtctgaagacactgctgtgcaacatggtttagagggtttgtccataagcaaaaaatcaactgrcaaggaagagatcaaagaccaaccacagaatgtatcygaaaatctgcttccacaaaatgcaccraattattggtatcttcaaggattaattcataagcagaatggagatctgctgcaagcagccaaatgttatgagaaggaactgggccgcctgctaagggatgccccttcaggcataggcagtattttcctgtcagcatctgagcttgaggatggtagtgaggaaatgggccagggcgcagtcagctccagtcccagagagctcctctctaactcagagcaactgaactgagacagaggaggaaaacagagcatcagaagcctgcagtggtggttgtgacgggtaggasgataggaagacagggggccccaacctgggattgctgagcagggaagctttgcatgttgctctaaggtacatttttaaagagttgttttttggccgggcgcagtggctcatgcctgtaatcccagcactttgggaggccgaggtgggcggatcacgaggtctggagtttgagaccatcctggctaacacagtgaaatcccgtctctactaaaaatacaaaaaattagccaggcgtggtggctggcacctgtagtcccagctacttgggaggctgaggcaggagaatggcgtgaacctggaaggaagaggttgcagtgagccaagattgcgcccctgcactccagcctgggcaacagagcaagactccatctcaaaaaaaaaaaaaaaaaaaaaaaagagttgttttctcatgttcattatagttcattacagttacatagtccgaaggtcttacaactaatcactggtagcaataaatgcttcaggcccacatgatgctgattagttctcagttttcattcagttcacaatataaccaccattcctgccctccctgccaagggtcataaatggtgactgcctaacaacaaaatttgcagtctcatctcattttcatccagacttctggaactcaaagattaacttttgactaaccctggaatatctcttatctcacttatagcttcaggcatgtatttatatgtattcttgatagcaataccataatcaatgtgtattcctgatagtaatgctacaataaatccaaacatttcaactctgttagaatagaggtaattgtgtggtttgtgtatgggactataacagtaatattaattcccaaaatttctcctactaggaacagtgggtaattgctaagccgtaccatactattctcgacatgttcatttgagcccctcccttagaatgaacaccctccccctgaaggcagcctatccttacattataggaactatgactgtctttccagcctaggagccccaactaagccccatgcccagttagcagctgctgctgtagacagggttgctgtaagcccaggaatatctgggcaaatgcctccctgacagagtgtgagggacatcagtgtgaggctggtcaaaagggcagagatccatccaggtctacagcagtccctttcaaactgccagcatctgacacggtgagctccattttgttcaggttaaagtcagacctggacagcaaaggtctcttaaacacatgggggaatagcctccatggactcttgagattaacttctgcagttcatttttaattcactcatgaatgtaatatctagtcacaaaggtgtaaacagaaaggtaaaagtatataaatgtataagatgatcatttgaacactttccttttaaattccttatcccctaggaattaatgtaatatttgaaataaattctgaaatgattccctagctgatttaacacctggaaacttgcttgtaggttcataagtggcagaaagactgtggccctaaaggagttcatctctcagaatttagaatatagaccctacaccaggaacccataaagagttgccctctggtattcacagacatagtatatgcaccttggaccatttccaaactcaaagatccagacctgctagggattttgggttttgccaaggcattataccgtattaagaggctaacatagtacatcatggtgactatagttaataatgatatgttgcatacgtgaaaattgctgagagagtagattttgtgttctcactacaaaaagaaaggtaagtagctgaggtaatgcatatgttaaataatttgatttagccgttccacaatgtatacatatattaaaacatgctatacaccataaatatatacaatttttacatgtcaactaaatttttactttgtattaaaaaaggctaatggggggtaactgcagctaatgaataaacatccaataggtccagcattcccatgtcaagtgtcctctgcctgtcatcctttatacaataattctaatgaaatgctagatggaatgggacataccactcaagaataccacagatgatcacccttaagatattataagatgggcagagagcacagacttccactcttaactcttgcctggctgatcacaaatcatatcccagcccaggtccagggacctacttgcttccttacaaacgaggagaccctggttctaagacttttgctgagagcagaaataacctcccccatcctcctgctccttaaacaaaagaacctttagggcaattgtctaaaaggaaacaacataccagaaatacaattcctgggttaaagcaagcaaagctgcttttctaataactcccattttctatgcataccctgggtccagcattccatcttccaggtatggttagaaaagagatcagaccttagtgactgctggtgaagtgaattgcatgctgcagcccctcatcagcatctttgtacagctcagtttcgtgttttctgcagaatcaggagctgacaatcaaaatggcccctcactcacattcattggtcagactgggcttgtgataacaatttagactaatcactgacaagcagggatggggagcactgaagtcagctattggctgtgtcccggagcagttgggcattctgccactggatgctgcttttgtaatcttgtcatatgacaaagcattatgatgttcttttgttttccttggattggcttaagggctggtgagaagcaggaaatattctgccatgggaagtctactgacctgcaaaaatttatcaaaatacacagaagcaggaatggaaggtggaaaaattacaaactgtgataatcagctccaagagcatgtaggggtaaaaggaggtaggtaatacctctccttactcattgtaagagtcatggctgacactcctataacaaaagacaagttaacaagagaaaagcataacaaatttacttaatcaaagttttatgtgatatgagagccttcagaaatgaagacccaaagatccagggaaaactgtttttgtgcttaggttccatgaagaatgggcagctctgtagagatgtgtttggacaagagtatgatctaatggtaatagactgggttcaaattcttcttggactctctgtgtagcatttcttctttgcaagtatggggcaggattcctctggattaagggtcttcaaatgagaagggagaagggagagagtgaccttcctaagttttatggcttgctttggggaaagggcttctagtttctatcattgtcttgcggaagaggaattctagtttccatggttcactccaggggagaaagaagcatgaaagacaagagggcaggagaaggtcaaagagatctttcttcggaggcccttccaatgtctttcagttcaaagtactcagcacaccgaggcgctatactttgggcatcatgttctgagagccaacagctacagtgaagaagtatgagagcagtcactgagtagggagggagctttcaactaacttagaggagcagggcctgaccctagcaagcattcctggggcctcccgattgccatatggggcagtacttatgtgtgggacagtgatatgaggagctacactcaggaagcttcctgatctcaatttttattatgatttgtttctgatttgggatcttcctaactgaattaaagaacttatattaatttctagcttaattcaggcaggagttagtccaagtatcattcgacaaactttattaatcttttaaaagtgccttggctttgggtttagacctatttcaacctcacctccaccacttagtatctctacagtgttgggaaaaatcacctaacctctgtgaccctaagatattcctacataaaacctgggaataataaattatacctcacagaagattaaatgtgtttccttacaagcattatggtagaccagatatacacagaacaaaaagcctgtgtatcacaatgaaaaatgctatataatctgcaaaacatattttttaaatgcacagctgcatttataagagagtaaggaattccctgaagtccagaaatgacaggaaagtgaaaatccaccagaataagcatgtgttcatttgtgttggtgatctacatcactttctcatggactacattacattatgaaggagatggaagacaaagtctggggcctgcacgtggtacattgtatcatagaactcacataaaaccaggacccattcagaggttaaactggagaacaaactccttgcagacgtaaatgatggggctacacatgcctgtttttggctttggccctaagtaaagcagggaggaaaaaaagtcattgataatttctaatcttaagtggagaagcatgattgttttgggctgaaattctcactatccatgcggcaagaaaaaaaaaaaaaaacctcaagtagaaaatttcattttaagcaattctggcttggtagtgctcccatgcacctaacaaaagcaaataaaaacacccctcaaagggaaacactttttacatagttctcaaagaatttccaagtttgataaagttccaaggaatatcaggtcataatacaaaatcaaagaatacacacaaataaataagccacaatgtgcaaaagttgccagataataaacgataagccagagcaacaaaactgcagatattgtaattgaatagagaataaaaaagaatgtatttagtacactttgggaggccgaggcaggtgtatcactgaggacaggagttagagaccagcctggccaacatggtagaacccggtttctactaaaaatacaaaaattagcaaggcatagtggcgggcatctgtaatcccagccacttgggagtctaaggcaggagaatggcttaaacctggcaggtagaggttgcagtgagccgagatcgcaccactgcactccagcctgggcaacagagtaactctgtctcaataaaaaaaaaaagaatgtattagtgtatttagtaaatttcaagataaagaaagaaaaaattaagttttaacaaaggaataggccgggcgcagtgcctcatgcctgtaatcccagcactttgggaggctgaggtgagcagattgcctgaggtcaggagttcaagaccagcctggccaacatggtgaaaacccatctccactaaaaatacaaaaattagccaggtgtggtgatgggtgcctgtaatctcagctactcaggaggctgaggcaggagaatctcttgaacccaagagacagaggttgcagtgagctgagatcatgccactacactctagcctgggtgacaggtcgagactccatctcaaaaaataaataaataaataaataaataaataaataaaggaacaatagtgtattaaatttgattaggcatatttgcacaagaaccaaacaaaacttagaaatataaaaactaaaataatagaaattagaaactcaaaggatttgttgaaaagtaatttatacacagctgaaaagcatttattgatttagaagacagattcgaagaaactactcagaatgcagcacagaaaaacagtgagatggaaaatcaacagagatattcagggacatggagaacaaagtgaggaagttaaaatgcatgtgatcagagttgcagaagaacaaataaaagggaatggaggaaaggcaatagttgaagagacaatgaccgaaattttcggaattaatgaaaaatgctaatcctcaaatacatgaattccacaaaagatcacccaagcagatgtcacctaaaaacatagtagtatcttttaagtgcctttgaggcagaaagatttttaaaacgacaaaaaacagaagaaatatctgtgaaggaattggtattaggttaagctcagacttctcaatagcaaccaaaacacagtgggaaatagtttcaaaatgccaagagaaaataattgtcagcctataatttgactttttaaccctttttatttgaaatgattttagacttaaagttgtaaaaatggtgcccagaattcccatataccctttacgcagcttcccatcatgttaacaccttacataaacatagaataatctttaagacaggaaactaacagtgacaacatataatcaactaatctacaagtcttgttcaaattttaccagttgtcccactaatattctttttctagttcaacatccaacctgggatcttccccaaaatgacctttgttcacagtgtcataattcaccctgcaacacaagctctgctcaactagagtttgatgaataaaatgattttctctttgccatggtccctttatatgaatatctcataaagcataaaggtcagggtggttcctgttagaatattcacttcccttgatttcctgccaaatatcatttcacaaccctcctgagctccctcttgattataaagggaaagacattgactccagtctgacgcaataaacagaagagtttttgatgaccctgcaccttcttttcttctgatttatgtggaacataccagcaacaaaatcctgaaccaagatccaccaggggatggacaggtgtcctaggtatgcccaagaatgatgcaacatccccagccatgcgcatgatggctgaggaatctggggacagctattgtgtggaaagaaaatcttacaaagggaaatcctcataggaaattgcgtaggttggagaaagagccacactcagtcaggcttagcctgtcttttctctcctttggtctcccagagggagctgttatattc
